United States Patent Application Publication US 2008/0114160 A1 - sequence listing, part 54

SEQ ID NO: 17357 - DNA, 10023 bp, Oryza sativa
tgtgacagtacccctcgcacaacacaatccaccacagtgcaccgttcttggatcataatcacccccttataaacaaggtatggactccccagcgacccccgtgggcttatctccgccacttctcagtctagtgctccgcaatgaaccatgctatataaaaggtaaagccgttgcccccatactggcttgtggttggcacggttaatgtttcacaaccgaaactcatgaaccggtccttaattgtcatgagcacgaccatcaaaaccatgtgctcacaacccaccattatcaagttttagttgacaatttaattaattaaccaatcacgattgaccatcgtgagcttccattaaatatccataagtgatagtgaagcatgatttatcccattaatgagctaatgtttctaagcacggctaagcaactataaataacatctagctgaaccaatccaatatataaggtccatgctagtcaaattataacccataggaaaataaagtcatctttggccataattaaatgggaaaggctcaccacccaatgacattcgaaaacaatgcataagttgaaataaatcaatagctttaaacaggttcaacatgctcaaagggttgtttgggggatctgtgtgacttgccttacaaacaagcgtcttcaattcgtcttcaggaacttctccaacgaacgaacgatcctccgaaacaacgggaagtctaaacctaaaacgcaaaacaaggaaaaacactaataaaaaccaaatgaacagtacaattaaagttcataagggtagagtttgaatttagatgaattatgagacttgaacgacctcattccgagttcgtatgaattagatatgaattttacaagatttaattccaattaaacctattaaagaaaagactattccaaattgattaaacaatttacaaatgatttatagctgagacagaagattaaaacatcctccggaaaaagattagatcatatttagtagatgacatatattaaaaaggaataatatgtcattgaaaagagatgacaaatttatattaattttggatggtcaagatggcgctgatgccagcgatgacatggctgccatgcaggatcgacgaccgcaagcacgggaacggcagttaccagcgaaccacggtacaaagatgcaaacgaagggcaccgggagagagaggagatcaaggcgacccttaccaccacttacgcgaccacagacggcgagggagatggcaggcgacgaggcggcgaccttgggttgacgatggcgacggctttccggcgacgagaggcagcaaccgaagggcggacggtcttcacctcggtcctgcgatcccgagggtggtgacggtgagtgaaggcggcgatggacggcgacgaacggcgcggctgaagatggaacagatcggcttcacggtgacgacgggcttcccggggtcttcgacgatggggaagtggaggccggtcttcttctcctcgcaaactcaacggcggcagcggcgaccgaaggcgacgaccacagcgacggcgcggggctgctggagcggcggccggaggtggagagagaaggcgagcgcggggagagcgattccggcgagattcggcgcaagggaacgggtggccggggtagctctcacccttgcgaaacccaaggaggctacggcgcatgtcggggtcgaccgagaaggcggcgcgacgcggctggagggtcaccggcgtcggcggcggctagggcaaggcggcggcggcgctacaagcgacggctcggcttgggacttgaggcaaacggaagaggaggccgaggggatgctatttatagccggaagagggagagatcggctcgggaacggatggaatcggcgacggattaggtagggttcgccggaaaaaggaaggatttgatccgcgaaattggaaagaatttccatataaacttttggggatttcttgggggaaatgaagaggagattgagaggattccattcccacaactaatttggaaataggagcaacggagaggacgaatttgatggggaggcggcgctgtacacgggcacggcagggaggatatcggccggctggaggttaggggcgacactgtagcagagggggacaaaacagacttatttccgggcttcatttcctcggcccgattgaaggaggaaggcaaatagaacttcgtcagagagaggaagagaagatgcaggctcgggttgggccggcggaagagagaggaaggaagggaatgggccggattcggcccgagacaaagaagtggattttgattgactttttaatttaaataattgctgaaatgatgtttcatttattaaaaatacttataatgctcaaataattccgggaaaaatccagaaaatatttggacactaaaaatatttaataaagttttatctatatcaatttaatgttcaaaattttcatatattttattcaaacacttactttaattattaaataaattctaaaaattcctttttttacaacaatttataatatagcgattttcagggtgtgacatagtccaggaaaatgatgcatccgaaattctgaagatcaaaatacctggaagggagatgtcggactttccagcatggcatcttgagaagacaggaattttcactgtcaggagcgcctataggttagcatggaatcaatcagggaaggctcgtgtggaatcttcatctagcacggcgacaaatggtgaaaggaagctttggaagaatatatggcaaacaaatgctcaaccaaaagtgagaatttttgcatggaagctagccaggacagattgcccacttggggaaataagggcctgtttaattcgcgaaaagaaaatttttgggtgtcacatcagacgtttgaccggatatcggaaggggttttcggacacgaataaaaaaactaatttcataactcgcgtggaaatcacaagacgaatcttttgagcctaattaattcgtcattagcacatgtgggttgctatagcacttatggcaaatcatgggctaattagactcaaaagattcgtctcgcgatttcccccctaactgtgcaattagttttttaaaaaatctatatttaatgcttcatgcatgtatccaaagattcgatgtgatgtttttgggaaaaactttttgggaaccaggattcttgtggttccggggaatccagctacaggagaaccaggaacggggagctctcccctgccctaagagaaagagaaagatagaacagagtggcatatgcccgatctgcgggatggctgaagagaacgggtttcatgtacggtggagtgcactctagctagaggtttacgggaggcaatgagaacacattggctattgccggttgaaacgagttttgcatatacagggccggactggctgttagtgctgctggatagttcgcagtgttcagaaaaggcacatgttatgtatttactctggagagtttggcacctgcgaaacaacatgatccatggcaaaggaagtgcatcaattgctgatttggtcagtttcttggttagctatgaaggccaactgttgccaatccgacaacaagaagatgaccacaaaggaaagggccctatatacatggaaccgaaccagatatctctctctacaagtatcagcaaactgactgacaaatggtgtccaccgccggagcgcttcgctaaactgaatgttgacgcaggttatagggaagaaaccggggatgctagtgtcgggtttatatttagagattgcaggggtttggtgctattggcggcccaaagaaccctgcatcaatgtggctcagctgtctaggcattggcgctagcatatatcttgagggactcagagcggcgactgacttgattcacatgcccattgtgttggagatggacaatgcataaattgttagggatttaataagaaaggaacagctgaaatcggcctgggcgacgacaattgaagatattaaaggagtgatgcaaagtgcaagtgcacaagataaagagagaagcaaatagggtagcacatgttttagcacaaatggctgtcttgagggactcagagcggcgactgacttgattcacatgcccattgtgttggagatggacaatgcagaaattgttagagatttaataagagaggaacagctgaaatcggcctgggcgacgacgattgaagagattaaaggagtgatgcaaagtgcaagacttgattcatatgcccattgtgttggagatggacaatgcagaaattgttagagatttagtaagacaggaacagctgaaatcggcctgggcgacgatgattgaagagattaaatgagtgatgcaaagtgcaagtacacaagataaagagagaagcaaatagggtagcacatgttttagcacaaatgacaatgagttgtaggtcctacgcggagtggaggttgtgtgctcccgcaagaattctagacttattaaatcaggagtgtaatcccttatttaagcattaataaagctctctttaccctcatttttttttgcatgtgctagaatcgatcgcagaatgaatacgaaaatgcgtgtgccatattccgttctactccagttgggttgaggccatggcttgcgtacatggtggatttgtgggcttctcgttctgggccagaggaaacgagggacccaacataagaatataacaggctgtgggctcgtgggctcaattttaatacttcccagctagcattcgacaccgtttttggatttttagttttccaaatttatttctgtttgttttaatactttgtcaagcaatcaagttataataataaaatataatgatttttttttaaaaaaacagtcaagataggtttgtacttacacttagctcttatatggtttattaactaattgagtgaaatatagtttgggccatttttatggttgaagattcactttggacctccttttaaggtaacattttcactttgcaccattttaaggccctgtttagagtctaacttttttttccaaacttctaacttttccgtcacatcgaactttcctaaacacacaaacttccaacttttccgtcacatcatttcaatttcttcaaactttcaattttggcgtggaactaaacacatcctaactctattttcttttagccacatacaacttcgtctctggtaaagaagtagattgaacacaagtgtgagagattgccagcatgtggatgtaagtgcgcttgaggctgttgatgtgcttgagaaaagagttgttgtggttcaaactgtaataaaggtagatttatctagtccgaagtaaaaatattagataaagatagttcaacgtaaaacattggcaataaaagttagtccgatccaaaccacagttttaggcatttgatttcaagcttcaaattgtgctcgaatttttttatagttttttatggattttttttgagaaagagagcgtaagctccccatttcattaacaaaatgcaaattaccacatgttcagtacagagttcagaaaactaaaaagaaagaaaaacttgaaatatataatatataacatttcattaactaaagttcagagttttttatggaatatataatatattatgagtccctaatatggatttgacaccaacctctttaaatttagttttaattttcttcattcattgtcacgacgttccaaggtcttatttaatctggaagaagtggaaaatttggctcgtcgatcgtagctcaaaataaccatggttagcattcgaatacgactacaaaataaacatgacatacttttcaaaaaaaataaattgtgaagcccatacactagaacaggatcgcttatctgtgacgggctgaaagcatcatcactatcgggtaaggcccccgtcaatgggcaaaggtcactgatgtgaggaaaaatctcaatcgggcaaaagcccgtcacggatggatgttatctcaatcgggccgaaaacaaagcccgtcacagatgagtatgaccagtcaaaccagcgtagtaagaagcctgtcacggatgactaatctcaatcgggcacaccactaagcccgtgacggatgagtagtcatctccatcgggcatttagccagagcccgtcactgataggtttgacgccacgtgttgagtcaaactagtcccggttcggacgacttatctctatcgggtgtattctaaaagcccgtcacggatgactaatctctaacgggctggactctatagcccgtcacgggatgagttatctctttcgggcattagctaaatgcccgtcagggatgagtttagaaccaaaaaaaaaataaaatttgtctttttggctagcctcagacctttgctagccatgcccgctgcaaaaatgacagaagcatatatatatacatagtcccattcccagcaaccccattcccagcatcaattcacatattccatcacagccatttcatatagacccattaccagcatcacatcagccaattcacattcatattccatcacagcacagtcaattcacaaaatcaagcacatatacattcacatccacaacccattcacatatatgtcattcacatccatttttctctccaaaccgccgacatgcatcaaaacctgcaaaaataagttataaattggaacaattttatatgtaactagaaatgcaagtatatacagagacgagctacctaggactttactctaaagaatataattgtattacaaagaatatttacaaaaatcaaatgtttgtcgcatatgcattgcaaatgttctgccattctgagacgagctacctaggacttcactctaaacatccctttcggtgacaagatatcatctagtatgaattgtgctatctcctctctaatgatttcgaagttgatttctggaatccttgaaataaattcctgcatgttcggcgccaagttagtctacatacttgtaaatttgtcgtcctatgtgtatataaacaattgaattacacaccttagggtcgagcaatgtcaccttgtctgcgaagctcctcatgttatggcagacatggaacccacactggttgctaacttgttgacatattgggaagtctttcttgtgaccgagtttgggatgcccatccttatgcctcccgcctcttgccacgtattggtcccatgcctcgttcaaggaagattcgatggccgaccaatcgtatatttctggcttgatattggagttaaggtagtgtaccaaactccacttcggcgttattaccagaagaatccaatgtcgcctgcgaaattattaaattgccagttacatactacagttgtacgcgttgagtatttgagtataagtacggtacacgcttactgttgattgtaggcgcacataatgaagtccttgtcttgacgggcaaataagcagtccttgatataggtcaccatgtttgctcgatcatttttcagcgttgtcacgttgacgacagctggatcgagtaaggcaatatggggtgctttacgatggacatgcttccaggttaacctacaagcaagacatgagtcagggtaagcgtaatttatggacagtcgctaccatatcgcgtaccaagaaatacttacaaggagtagcacttaaggaggttggtgtcgatcgctcgcaccctatagaggtcccatagatctttgaagtctacggcgatgaaggcagtaggcccgaggaacggctgaccatcgtgctggcccaacatggaggtctctctattcttcctccttgcattggacttctccctgtagtacctgtgcaactccttgcatgcagggcccatcttgaataaggcatcgtctccgaccaatggcatgcccaatgtgaattctgctggaggctttggaggagctactggtgccttgccaagatcaagcttctttggggctaatggcacctttatttttcctctccccgttccagcagcttttctgcgtgtgtcaagcttgggtggagaagatttcgccctcttgctccttttcgcagaaggggggaggtgcggcctgctgtcaacctccataccgtcgtcccaaaaatcagtatcatactgtaattggagatcttcatctctttgttcaacggcaggagggagagatacaacagtttgatggggatgcgtcggcggcggacgagaacttggcgctggccttggagttatattgatctcaatgttgtgcttgggccattgaataaaggtcccacgtgcagccccaagggtcagaatctcgtcattaggtgggtgtgggatagtgtagccaacccaatcgggcttcactaagtccacctgaactttggcattgccggcttgctgctgcgccccatgcactcgggtctccggggtaggcttgaaagcttgaccctctgcggcaggaattgcaaatcctggtgtcaccctaacgactagggtacacgatgtgggttcctgcgatagattcattagtgtccttagtatatgttgcaatgtattgtggtgctaatataatatatgcgttcctgcgatagattcattagtgtccttagtatatgttgcaatgtattgtggtgctaatataatatatgcgttattaagttgtttttaccgttatgtggtccaccgcggcggggccttcaggctgttctgtcggagcctcagttgatgcgcagctgctacgcctctgcgtggggctcacttgtactatgggaccgggagtggcatcggtcgacctatccctgatgcgtgcctccatccgagcctccatatctaacagctcggcagtgagctcttctctaagctcttctttaagctcctcccgaagttgggccttaatgcgtgcagctttctgtgccttggaaagcttgtgcttcttgtactgccacgcgtattggaaaaacccaaacttccatggaacattggagccaatgcccttagtttgtccacggtgttcttcatttcccaacgctttcgtgcggatgtcatcctcgcgtttttgtgagcatacctcttgggaggcctgtctctcagcattcagttcgacctggggtacagttaggacgcgttagacgaagaacaagatacaacataatgaaacttattctatgtgttcaatttacgattttctggtacaccgcttgatcttcgggatttggaaacgaaagagttccgtcactattcttcttcacccttgcccttgcccagttccttgcccgctggaccgggatatcagcaagcacttgcggggtgttagattccgctgcagcttcatcctcgttgtcccattctgcctgtttccccgtgtagcctccggtgccaagccggtgcgggtgaaggttccttgcctgcagatcacggtaggtctggcttttttctcgagactctttcgtttatttggcggcatggaactcatcccacacgggttgggtgatgaatgggtatttcccaaatggttctggctgggcggggttgaggacgtactccgtgtccagcgttgtcttgaaatttttccaacaattccccatcttgcggatagcctgccgcttcagtcctgcctcggcctctgtagggtatcagaagctttccttgaactacctccaggcctcttctttttcttcttgagggaccagatcgatgtggtccttcagaatagtgaagttccgcctccctaggactccgcatatcgtagggaactttttgacagctttcgtcggagccgtcggatatccaacatcgtccacctctgttatggtgtagacttccttagtaatcttattatgggtcctaggattctggctcgatgtagtcccagtagtggtcatcgacatcggttcgccttgctgcgacatgtcctatgtcactgttgtacgggagaaagtactttttaaacacaaaattgcatctatacacattctcttatggtttgatatacctctatctcctacctgcgttcgcctcgtcgatggaaccatagcatccatggtcaatagggccggag

SEQ ID NO: 17358 - DNA, 3440 bp, Oryza sativa
agccgaattcacctgaaaacctcttgtacgtcctccattagctgttccgacagctgtgtgcaccatgtttacaggaaaaggattaccatcaaccttcatcggcctcttggaatcatcaaatttgatcttgcctccttcaatggctactagaatttgttgcctgaagacttgtaatcattagtagaatgagacccagagttatgccacttgcaataccttcttttgcctaattcctcggccgatggaatcgtatgaccagcggggagttgaatctgcttctctcagagcaacagatcaaaaatcttgttagccttggttatatcaaagtcatacctctcctcttttctagaattctttaccccctagcatggtataacctttttacttcttacccattcagctgcagctatttcacagtcatcatcatcattatccgatccatatatgtaaggacaaacatgattaacccttttagggttctttctggcttctgcagacctctgctcgtgcagggttaccttttgtataagatgtgacaagctatcaaagtcctcagatgagaatatttccctgatcggagcaatcataccctgaaaagccaaaacggctaactgggcatcagtcaaattcaaactatagcacttattccccatctctctgaacctttggatatactcatgcataggttcatcatgcctttgcttgattgctgttaaatcggacaatttcatctcatgaaccccactgtagaaatagctgtgaaattgcttctccaaatcggcccaagtgttgattgatccatatggcacagaagaaaaccaagtaaaagccgatccagacaaggacaaccggaacaacctaactctcaaggcatccacagccgatgcttcaccacattgagctaaaaatcggctaatgtgctcataagttgacacaccatcttgccctgagaattttgaaaaatctagaactttgaacctattaggaagaggaactctctcaaaccactcagggtaaggttgccgatacaagtttccagcatctttcggcttaagcccgaactgttccctcatcacatcggtaatcacatcagcccacggtcgttgctgagttgctccttgcgactgttgttgcttgggctcgaattgattgtactgaagaacaaactgagattgagtgggcccccctgctgatattgagcttgcggcgaaggaggttgatattggtaattcaaattgcccccctgataattctggtagttcggctgaatattacgcaccgagtgttcaggaacaatctgaggtaccaccgtctggtccggctgcacatgatgaactaaatgctctgggacaacctgatttagagcatgttgtcctagctgattgttaggtgttgcaaacccagccgatgcattcattaacccttgctgatgaatcggttgaataacctgttgcgttaatggcatttgctgaatcgactgcaaaacctgccgtcttggtggcgtctgttgaattggttgcacaacctgttggattgggggtgtttgctaagctggttgcacaaactgctgccttggcggtgtttgctgaatcggctgctgctggactagaacaacaataggttgaggtggtaagaacatggccgcaacctgatcttgcgtagccgattcacatcctgccccctatgctgtggttgttctctcatcaacaaccgaggactaactagttggcctggtgccgacgtagacgcagcaagtgcgggagccgataccggtgccgtcggctgagctgatggcgcattgggaggaactgtttaaacagatggctgagtattggtgatcagaggccgataatctggaaagacacctccttgcaaataaactgggcctgtagcctgatattcagccattgaaccatcaaccattgatttcatcatgtttgacaaggtattgactaacaccccagactgattgatcaaagcattgtgcacggcatagtcaacccgatcttggaagttattgaaaagctcatgtgctgcattgccattctgactaagatttccaccttgtaatccttgggaattatcaccttgagaaccaagaccttgaacttcttgaaaaccatcgccttgatttccttgagaaccatttgcaacaccttgatcacctggctgagccataccatctggagcctgttttagttcaccatctttggaagaacctgtcccaggaacatccgcaaccaccattaatttatacttctgaaccaacgttcccttgcgggtctgtgtaaatgaactcaaaaattggttctttgcttgctgcatcattgcttcaagatccttatgctgttcaggtgtcaatttatccagagtgatgggcataatgttgctctcatcaacctcagacagacccaacttaaggatcttagctttgacagaatcaggttctctagccgaggacggtgacggtggcggtttctcggccatgaggaaaactgctgttgtgactctgacttctaatcagtcctatcaggcatgccaaaagcgtattgacagaaaacacgaggcctgggagatctgcttaactccagtgcaggtccaaaactcgccttcggatgtatgagcatgccagttgatttgatcctacaatcaacaagaaataaagacaaagaaaccgtggttaaatccataaatgatagtcgatcggctaagtgccgatgacatatcatttacctttgggccgatgtcatatgtacatcgatcgatagccataaatgaataaaaaggaactaaatctactcaatcggctgtagatattaacaatatataatccttatgtcgatatatacttaaatcaagtgattgggatagatcggtcgccatggggagacagtataaatcacttagatcgatataatctaagccaacgtcgctatttaacctaatcggccgccttgtgttaacagatgttagccgattgtaggttagatgacgatattatcaaagattatataagatatatgataactcgatgaattacataaacaagattagagtataataaagatgcaagcactaatcccgagaacgcaagccgccataacaagtcttacctcttgttgaagatcgaaaccgatgcagctcaacccaaaagcaagaactcatcgaaacaaaacaaaagtaaaagggtggcgatgcgccgagattgtattgatagtgtgtgttaataattacatagggctcggggtctatttatacccaagaattacaagatatgtccaaatcggacacgactattatctctaacaatctctaagataccataagtctttacgacagacttttacccacatttatctctaaagaatttacataaaatatcctaattaatagatacaattgccttctcagaactcaatccatgcgcggcaatcatattg

SEQ ID NO: 17359 - DNA, 650 bp, Oryza sativa
ctcgggtcggctaaaatcgccaaacggggcccagaaccgagccgtgccccggggcgtagtgaactccgggggggaatcagcaaaaacccacaatcgggtcacccataaccctcggtcaccacgctcccggcctggccagtctcgacatgtggatctccccaggcactagccccgacccgagccatttgaggactaggacctgggcacgagcccttgttcaagccaagacacaaaaggaccgtggcacagacatccttgtctcatacacacaacaaatagaattgacacaaaaaatttcctctttatttgattgcagattaaattagtctatacaagaagggggcccgaaggcctcggaagaagaaaagaagaaactatttaaagattggcgggggcctgggggctcactccgatgcacccgggtcgccagcctcgtcgccactgtcgcccactccgccgtcatcgtcctcctcgtcggagttgaaggcgaacgcgagccgaggggtcgaaccctcgaagctgtggacgatatggtcggcggcgtcccggacctgcgcgcgcgcgccatcctcggtcccgggagggaactcgtccagcgccgtccatggggagaagtcgggatccctggcttggtaactcgccagtatgag

SEQ ID NO: 17360 - DNA, 9131 bp, Oryza sativa
catcagttaacatggtttttaccttgccagccgaattcgagatcaaacaaaccgatgttgacaaagtagaagaagaatcggctaagttggttctatcaccagaacaagcaatctttgagaagcctgaggggacagaaaatcggcatgctaaaccattgtatataaatggctatgtcaatgggaagccgatgtctaagatgatgatcgatggtggggctgcagtaaatttgatgccttaagctacgttctagaagttgggcagaaacgctgaagatctcatcaagacaaacatggtgctcaaagactttggtggcaatccatcggaaaccaagggtgttctaaatgttgagctgacagtcggcagcacaaccatccctactaccttttttgtcatcgatcggaagggttcttacaacttgttgcttggtagggattggattcatgccaattgttgtactccttcaaccatgcatcaatgcttgattcaatggtaaggcaacaagatttagatcgtgccaaccgacaggtcagtcaatgttgccagtgccaatttagctctttgggagatggatggtcttgattgcttatctggaaaagtttgggatggagattttctaaaatagtccgattctgatatacagccaattgaagatggagaacccaattgaagatggagaacccaggctattattttgaaggcgttgtggagggttcaaacgtctacaccaaggatacagtagatgatctcgatgacaaacaaggtcaaggtttaatgtcggccgatgatttcgaagaaatagatataggtccaagcgatcggccaaggccgacatttattagtaagaatttatctccagagtttagaaccaagctgatagagctctagaaagaatttagagattgcttcgcttgggagtattatgagatgccaggacttagccgatcgattgtcgaacatcgactacctatcaaactaggggttagaccgcaccagcagcctccgagaagatgcaaagccgatatgctcgaacctgtgaaggcggagattaagcgtttatatgatgctggttttattcgtccttgccgatatgctgagtgggtttctagcatagttcatgttatcaagaagaacggcaatgtgagggtgtgcattgattttagagatttgaataaagctaccccaaaggacgagtatccaatgccagtagccgatcagttggttgatgctgcttcaggacataagatattgagttttatggatggaaatgtgggatataatcagatctttatggctaaggaagatatttataagacggcttttagatgtcctggtgcaatcggcttatttgaatgggtagtaatgacttttggattaaaaagtgctggagccacatatcaaagggccatgaactatatttatcatgatctgatcggctggttggtcgaagtctatattgatgatgtggttattaagtctaaggaaatagcgaaccacatagccaatttgagaaaagtttttgagagaactaggaaaaatatggcttgaagatgaatccgataaagtgtgctcttggcgtatcggctggccagttcttgggatttcttgttcatgagaggggaattgaaataactcaaagaagtgtcaatgcgatcaagaagattaagcctacagagaacaagacaaaattgcaggagatgatcggcaagattaattttgttagaaggtttatttctaatttgtccggaaggttagagccttttacaccgttgttgagattgaaggccgatcaacagtttacttgggggacagagcagcagaaagctttagataatattaaggaatatctaatgatttagcccaaggggcatcgggatataagccgatgatcaaagatgttaagattgaagttgctgccataacagccgatgattggagatatgatgtccatcagtatttacagaatctgtctcaatcggcttcttggaagttaagatataaagcgttgaagtatactttgttagataatgagctttattatcggacgattgatggggtgttgctcaaatgttttagtgccgatcaggctaaacttgcaatcggtgaagttcatgaagggatatgtgccactcatcaatcggctcataaaatgaagtggttgcttcgacgtgctggatatttttggccgacgatgctggaggattgtttcagatattacaagggatgtcaagattgtcagaaatttggggcgatctagagagcaccggcgtcggctatgaatcctattattaaaccatggccatttcgaggttggggaattgatatgatcggcatgattaatccaccgtcaagtaaagggcataagtttatattggtggcgaccgattattttaccaagtggatagaggcgattcctttgaagaaggttgattctggggatgctatacaatttgttcaagaacatataatctatcgatttggtattcctcaaaccattacaaccgatcaaggttcaatcttcgtgtccgatgagtttgttcagtttgccgatagcatgggtatcaaattgttgaattcttcaccatattatacacaagctaatgggcaggccgaggcatctagcaaaagcatgatcaagttgattaagaagggaaaatttctgattatcctcggcattggcatactcgtttagccgaagcattgtggtcttatcggatggcttgtcatggatcgattcaagttcctccttataagcttgtttatgggcatgcggctgtattaccatgggaagttaaaatcggttcgagaagaatagaattgcaagatggtttgacagccgatgagtattataaccttatggccgatgagagggaggacttagttcagtcgcgtttgcgagcccttgcaaaagttaccaaagataaggaacgagttgctcgacactataacaagcaagtggtacccaagactttttcggaaggtgaacttgtatggaagttgattttgccgattggaactcgggataacaaattcggcaaatggtcaccgaattgggaacgaccgttccaaatctataaggttgtgtctaagggggcatatatgttgcaagggcttcatggcgaagtctatggacgagcgctcaatggtaagtacttgcagaaatattacccaagtgtttgggttaatgcatgatcggttagtgttgccgatacatgatagccgatgggtttgcatcgccttgggatgggcgatattgttatatcgcccttagttgtttttatgttgtaatcagttgaggtttgccgatttacaatggccgatattgttatatcgcccttagttgtttttatgttataatcgggcccttagttgtttttatgttgtaatcggttgaggtttgccgatttacaatggccgatattgttatatcgcccttagttgtttttatgttataatcgggcccttagttgtttttatgttgtaatcggttgaggtttgccgatttacaatggccgatattgttatatcgtccttagttgtttttatgttgtaatcggttgtggtttgccgatatacaatggcggatattgctatatcgccctaagttttaaactataattaaatcaatgcttttgacattgtaaaattaggggggcacatatatacaccagttacaaattttgacaatttttgagcaaatttggaagttatattaatcggcacaaaggattatcaagataaacatcagtagtatcttagccgattacaaaaatttctaaggtctattacacagaaagttaccgagacaaatagcgctggatagccgatatagctctttgcctaatttgttctacttcttcgatggcttgggcatcttgagcatcggttccagggatgacttttaaagacttggttagatcagcaacattttttatagccgattttagtcttgctttctgcttttcaacagattttgggagatcggctagctttttatgttccatgtccagattggcactgcattcttgaagttgtgccaggagctcaatctttcgagcttcaagccgatcaatattagacttgatcggaccttcagataactgatcaagcttggccttctcttcatgaacaagctgccgattggcctaaattgtggcctcgatgtctttgcgctcccgacgctcgactagtctcagcttggccttctccagcttgaattgatgctgctcgagatagacagctggagttaggacatcggctagctcatctgggatcagagcttgaatctcatgtagccgagtcctaattgagccacaatcaaccactaagctgtctaacgatgatgcctctagccgatgagagatatcttcaagaattttcttcacatcatcggataagggggctaaagctttgcttgtggtatcctcttctccttcatcaagatagtctctaatgtcaaaagagaaaagatcggctaagacatgcaataatgatttaaagagaagttagaggtcaaatagacatagccgatctgggtattttgtgtcaaagaaaagcttaccaggatagcaggagcagtcggttggacttcttcttcaacatggtgaatccctacagctgatggagtctggtcacttgatgactgttgtacaggagaaggaggaggagactgtaaaagagacaagtgttagacaaaatcggctgagatcaactaatgaaagaattaagatgtcattatagccgatttcttcttcacagcagtcttctttttctacaactacaaaatctgtgagtaatcggccataaagtaaaatgattgcaaaaaggatcaaagagagctgcttactcttgaaaagtgagctggagcaaaaggagttggaggggtctgcttgggtgaagccgatggtgttctttctgtgtcgcttactttggctgcggcttggtcaacgtcttcttcaatttcctcttcatccagagcttgttcaatggatggatctagggcaggcagatcatcagatggcttagttatctttgtcttggttttcttctttggagctggggctgaagtatctacagccgatgatctggtttttcttttcttgccggcatcggctggttctctgatgagcccttgaagaagagctgaagtcttgggggcatcatagccgatgacaggaggagatggtccacctccatttggaattaatcccgaggcatattcaatgttcctgccactgttactttggcgaggaggagagaactctgttgtctgcaggtcgaaaggaaagttagtcaaggttagtcggctaagcaactattcaaatgaaattgagtaaattaagacatacctgagggacaacatctggaaagagatctgtcatatacatagaggccgattgatggaatagatgcagtttccattcactccaccatctgtcgaatgctctgctcctgaaggttaccagctctatattatcaatgctgcctagagggggtccttggaggttaagcagccgatccatcattaaggttgacgaaatttcccctcagcactggatcttatcttcaaagaataagccgattgggagttggcccattccaaactgcctggcagaacttattggatgataaaattcataggagacttagatgtttcttccttgatgaatgccgacaggaaggatacatggactgattgcagctgaagaaatttctctgggtttctgatatctttcattgttgatgtcttcgaatatgaagtccaatggattttctagaagtgttgaatcttcatagaggaaccaaacttgagtatgtttttggaaaccctcataaaaattgcagaaccagtctttaagcagctcggccgatagctttgcttctgcatcggttggtatggaggcatattctccgtaagatgtgcatctccgatgagtacgttcttctccatcattgtctacaatcggctccagtcttggaaattcagcttctgttacagatggccaattgacaaacttcatgactaccaaattcagccaggactgcaatagccatcatggtccacctgctccgactactgagccgacagctaacttagccgatgcattgtttagcatttggtacaagtagccgagaagtatttttcttaaaggaaattgtttctttgcttctaaggcttcggctacaaactgccaattggttgtagggccacagcttgatccacaaaagaggaatttctctagccacattagcaagaaagccacatgttctcgaggggtgacggaaccctggcccatgtatgctgctacatagcctgaccagccgcctatgctcttggtcttgaagtcgtattggttcttcgtgttcaagctcatagagttagccgataaggtgacatccagacccgtgatcatgatgatatctatgagagttggggtcatcggcccttggttgaacaagaaggcgttgatggtgttggaccagaaataagaggcagttgccattaggggctcatccttagctgagttggctatggtgagatcgagtgcttggccgattccaatctcgtcccaatgaactcttttgctagccgacatgctcttgaaccatgtgatccaacttttctcgggtcgagttttctcgagggatggccaggatttaaggtgtttttccagtgacctagatctgggttggccaatctaaaaggaatcctattggtttcaccaataaagaactctgtgggatcagggttgccgactgggccgagaaagtagtagttttcatgcgataggctgggaattgcaactaggttggagagatgctacaaatccaaagtaatcgagaaagggaaagcaatataaggcgagagaaaatcgatctgatgctaagaaaggggatctagccgaccgggacttacctcagtgtactcgccgacggcgtggcagacgggctggcggaggacgacatcgccgcaggcgtagatctagccggagatgaagccgcctggggatcgctttgtgcgtcagagaaatcgccggagaggaagagaacaaaattggcttcggtggtgaaaacggaagtaatggggtaaagattttccagggcggcggttagtatttaaagcactgaggataacggtcagaaaatggcagagtgcgaaacttactcgaagtcgatacgcggcaaatccgaaacattaccaaatatcccggacttggggggcatgtgttaacgaccaaatttggtaatatcaatatcggatatgaagattaaatcgaagcggaaccgaagataaggattgtcgcggaaacagagtaagaatcggctggagtccggatcggctacgactgggatcggctaagtccgagtctgactgggttaagtgatacagccgattccgacaatacgacttgtgtacgacatcgggtttgagttgataagcttcaagatgattgccgcgcatggatagagtcctaagaaggcaattgtatctattaattaggatattttatgtaaattctttagagataaatgtgggcaaaagtctgccgcaaagacttatggtatcttagagtttgttagagataatagtcgtgtccgatatggacatatcttgtaattcttgggtataaatagaccccgagccctatgtaattattaacacacacgttcaatacaatctcggcgcatcgccacccttttacttttgttttgtttcgacgagttcttgctttcgggttgagctgcatcggtttcgatcttcaacaacaggtaagacttgttatggcggttttatgatactctaatcttgtttatgtaattcgtcgagttatcatatatcttatataatctttgataatatcgtcatctaacctacaatcggctaacatctgttaacacaaggcggccgattagattaaatagcgacgttggcttagattatataagatatctatcactttatgaaacatccagtggcttgattgtctagatattgttcttcttttcatactcaatgctgcatcagttgagtttgatctattaagtcgtgcttagaatttcaatctctagcctgccttctggttgccgattagggtagtatcggagtttcagtcgaccttacctgatttaactaccttatcttatatgcttgattgatatgttgaatctgccctttatattaagatcttgctgcatttaagtatattaggcttctgtttggtatatcctatttgctttaatatcttaatacagagtggtatcggagtattagccgatacatgctagatctatctgatcggctatgctatgaacatatataatcttgttgttaatatatatttcgatctaagtgatttatactgtctcggcatggcgaccgatctatcccaatcacttgatttaagtatatatcgacataaggattatatattattaatatctacagccgatcgagtagatttagttcctttttattcatttatggttgtcgatcgatgtatatatgacatcggcccaaaggtaaatgatatgtcatcggcacttagccgatcggctatcatttatggatttaaccacggtttctttgtctttgtttcttgttgattgcaggatcaaatcaactggcacgctcatacatctgaaggcgagttttggacctgcactggagttaaccagatctcccaggcctcgtgttttctgtcaacaacgcttagtattcatctagaaatcataaacatgatttatccacaaatatctacagaaaacaacctgaaaccgaaatcgacacatattcggccgatcagaccgcgggctgaccggtctgaccgcgcaacacacgccggtctgatcggcaaccacagttcgctctaactggtccaaactgacagcagtccctatttatcatctgaaaatcaaccttctccaaaaccacttcaccaataatctaaaaatatcaaaacaataatctcaaatgataattgttcatcacaaaataataagagtaaagtccatcaccggtccctaaacttgtaccgctgtgtcatcccggtcccgaaactcgcaaatcgactgttcaggtcctcaaacttgttcaactgtgtcatcccgatccttaaacttttagatcactcgt

SEQ ID NO: 17361 - DNA, 8127 bp, Oryza sativa
gacggtcctgtttagggaccggggtgacacaactgaacaagttggaggacctaaacgagtgatctgcaagtttaaggaccgggatgacacagtcgaacaagtttgaggacctgaacggtcgatttgcgagtttagggaccgggatgacacagcggtacaagtttagggaccggtgatggactttactcaaataataatcaaacactctctgattttacagcaatgtcaagattctgaattgctgatgccacccactccaaagcaggaacagttatgttgtcctatggggatgttcagcaagattacgattaaaaaaaatgttcctatggggatgttcagaaagattacaattaaaaaaatgtcatctcaagactattgtgttgtccaatccttgtgtctttttttctgccaaatttaagggaagtgaataatgaacgggagggattcatatgtattccctccgtcctaaaataactcaattcctgcgtttctgtgtccaacgtttcaccgtctgtctcatatgaaatttttttatgattactattttcattgttgttagataataaaacatgaataatactttatgcgtgacttatcattttaaattttttcataatttttttaaataagacggacagtcaaacgttggacacagaaactcaggaattgagttattttgggatggagggagtatagctgagacagtgagacaagagataatcaacatgacagggatgaaagactaatgacccacctacaagatatttttaaatatgattttttattataatacacacatgtatataataagtagatattttattttctcaaagtatttctaagacttatctatttgtttgaaaacataactactttattaaggtagaagcaaaggacatgcatggtttaaggtaacatccccaaaggggttggataataacatctccactgtaggacaagtcgatgaatgatgatagatatgagtgatattctggcatattttttaaaacctgtacattggcaacagttgcttttactttttttgataaataatctgccattttgtttagttttcttggaaccagccgaacattaagcgattgaccctgcagtagaaaattaagtaattttaagacttatctacacatcgtgttttactgtctccaaacaaaatattctgtaagttattaatggtcaaaagttctaatttttttatgttaaccttgtccaaaacagctagagcaggatataatactaattaacatggtgtttgctttgggtcttcaattaattctataatcagaatacatgaaaactaactttttttttaggtaaacgacggcaggagctctgccggaatttcattagaacaaaaacatgtaatattttgcaactggtttgtttgattatcagaacccactatatctggactcaccacttctgtcatcatcaggtgacaacgccaaattttcaccacagtcgcatagtatttcatatttatagtgccaattaatttatacatgcacccctgctcagcttaactgttttctcgagtaatggtaatcaccagtcgttatgaccctgaacctggcatttcataggaagcaggcaatcagcttcactcttttcttgagtccatcctctgtttttttcccagtgtggtttcaatctgtacactaattaagaacagaggaagtatgcaagtctgtaaaatgcaaatttggaatggtgcatattatgtactacttgacaattagattacttaaatatctgcttggatgttttcataataaatgcttatcataaacactaaccaaagagtacaaatcagaaccaccttgctagatcaaatccctctcatgagtcatgagaatatattatgttggaagatcttatggtcatgaacccttgacatgttaattagcgcgtactacgaaataatacatgaatataatccgggttttgtggataatagtaaaatgttgcaacaaagccaaataatactgatgagattcggttgtatcactggtgaccttttatttcgtgaatgaatcatcgctgtatgaaacaaaaaaattcatacaactgaaattagtttgcgccaataaattatcatgggtagggagctacacaccaatgtgataaaccatgacatatgggtcttttccatgccaactaccatcagcacatctggcggatcagtaatcctcggttgagcaggcagacaactgactgttctgagatatcattttcctgatcccgcgcattccaatcagcaattgacttgtttattgtcccccatgggctgggtaatacattcatatttcaattgaaatggaattaaatgtgaaaaataccccctacaaatcacttgtgtttcttctttgcctactactacttaatttcgtacattaaacccccacacaagacaatttctcctaacctattttcatctatttctaatgattgtggttggtctctcacaacctccttcctcccttacagtatctgccttcccaaatccccatatgagctaagatgatggcagaacacgatggcacaacttgtgcgccagctgtaatttctataataccaagttaccaacctatcgaggtggcatgagttactattgtcccatgacgctggaggcccatgcagcactagaaattgaaataactaggtgaaataattgacaatgggactgtggttaaagttaggacataaattaacttgttgggaggattttctgtatgaaattgagttgtagggggaaatagaaaaactagtgagttgtagggggttatttggaatttcactggaattatattatgagcaaaataaggcggatttcttttttgaatatttaaatgtcatgattcagctcctgttgtttttgcgtgctctagggcgcataattcctctggaaactcaggatgtatcctggcagaataagagagagaatgtggggatacgtgttacggctactgtaccaaatatgacaacgatgaacccgatcaaagtgaggcgtgttccacacatgccaggcttgccaatgttcgccttggtggatccggatgggaagatgtgctaattgtaaaggatgcgactatataagcaccctggagtggactggaagcttgaaaattaccgttggatcaaaaatagatgtccgagattcgtcaatgtcacggttaaaattttactcatagcaaaatttttactcgtgatgacatagacaaatatcagacgtctatttttcgatccaacggtagttttcaggtttccactacatatgtactttgcaccatatatttttccgggttagacacagatggattgggttagtgatcatattagtataggatgctgctagccaacagatggggaattgaggtttaaggaattactaagctaccattattaatattatttgttgtttctagattatcctttcgaaatcaaaggtgcatattaattcatttaggaggtacctgggtacctctcaagcacagtaaaatcctctcagaaatgtatgttgatatgagattgatcaggtagtgaccaacgcagtgtttaattagctttcttttgtgcttacgttttgcaaaaaataaatgaatgaataaataattagctcagatttgtcattttggtcttatacaatggtcatgatatatagagtcagaacttttgaaactttaactatcattagtttttctaatgctcattttaaaaagggaaaaaatagtatatatgcttagttttccctgaaaaagtattatcatggtataaaaacttattagatattctaatacaaaattgatagtcaaagtttgtaagtgagagattttacggtctggaggtaccacattttacctctcgttgtgtttggtactaggagctacgggtacctcttagtaactcttgagtgctagctgtaaaatttcaagtcaaattttgttctaaatattaagtatttatgcccggatggtgtatatgatacggatccgtatcctcaatacttcatgcagtttgtccttgatataaagttctgaaaaaaaaaaccttttttttggttgggccgggggggggggggggtgggacattgacctgctgtcttctctgctctgaacattcactacccacagatacacaccttctgctcttcttgcccgatcacctatcccttattattacaagtctcattttatttttcttattttcccatcactgcatgctgcaagtgttaagctactgcttagctgtgcattcaactcgagtcctgaataagttttggagatatatctgagcctagccaattgaatcagatgcatcgatttctgattcgggtgattggcagacatatcattaccagctagcagacgagaagatcaatcacaattaagttcagaactctttcctttagtcagttcatttgttggccctaattgttggtaactatctttgcatgggattgggaggtactgcgagatgtaagaatgctgattcgttggattctgcaagtgcatcgtgaagaaatggttctgggatttccttgctggaactgtatgtagcactgatgcagtgatatgtcgctaataccagatcatgtcgtaggattgtttcaggaggttagcatctctaggtggctacgagaatattaatagctagtatatctgtccataaatgtagcttcggagttttaggatgggatattatctaagaatatcaccaacagtgctcctattttatttctaaaaccaatttgagggattttagtttaaaaaaaactacttcaccagatactttattcttttgcatgatttttggagttccctaccctgaaattgtctgatacgaggggaagcgagccttttttggtagtttaacagaatagctcacttttagtttttcaaattaaattaaagttttttcttgaagagattatttttttcacttcctattttcagattaagaagccaaaaacaaaattttgggggtgaattatttcaattctgccagtgatgctataatattacgattggcggttctagaaatcttttagctgaacaaatataacgagataacaagcatacatataatctatataattatatagaccatttatgatttatctataccgtgctgttgggtaaaaccaacgtgatcaattaatgtagcatgggctagactaatatatttctgcgatggccttaattacttttgtcgaagcaagatttcgacaataataaaagggggtggctatcaagctaggaaagtggatgggtttggagataagaaattttatacaggttcaggccttcttattcaagaagtaataccctactcctatccggggatgattccgccgagtgtgttattgattgtataaaatggaaaaggaatcgccccccaagaggcacacggaccctcttatatagggaaaggagtccgctttacaaaatacagtccatatcctaatagaatatgggattatagataaaatacaatcgtaaccgactaagatcccgggtatttccttgacatacaagtttagaacctaacccgaatcttcatagagatattccatctatatttagtaccgtatatccgactaaattacaaccgtcatgtagatatggggtatccataatctccacagtagcccccgagaccttcgcagttgacaaaatagccttctcgaaacaaaaaaacagtagtccgagtgcttcaattcaacttgctccagcttgccgagtgctaaaaattaaaaactgtgaagggcgaaaataaaacatggtgcatcgagtagatgcacctaattaggtgtagcccccgagtatgtgattagttgaaaaactaaacatatagtcaagaaccgagtggttttatagcgaagcacgaatggtacttagtaagatacccagccgactgcttctcaacttgaatatatcaaggacaaaaaatacaagaagggccgagtgataaacactcaaaggtccaaaaataaacatgtttgataggaatccgagtaagaatctcataaaatgacccaccaaacaggatagaaaatcatggtaattaatgagtccaatagcctaggctgtgacccttaccataaccaaaataagcatataacatgctaaaagaatgactattaataaaccagtcatctcaaatcaacccaaacagcttttgcagcctaacaaagcttacaaaaacggtataacacctttctgtcgggcacctttttatgtgcatcataataattcccaagaattattgaatcgtgttaaaaaggattttaacagcattgggccacaccattgtgaacacaaatcgccaaagcaaaaagtgcctaagtccctagggatcacaacaggccacgctgattatagtattgggctgaagtactgtacaggcccaggcccattagtactcccgataccctaataataccgaagtgaaactcgtctcttcgtcttccccgccgagactctcgccattttccccatttcctgctacagtgcaaaactgcgccggccaaactagggttcatcaatccgctccaatccctcctcaaaatcttcacgaaatttctccccgtatccaccgctcaaattccccatccctttccagccgtatctcgaactaaatcagaccatccagttcacattcatggcggaagaaagagaaagcttcaagagtcagtgggcgccctccgatgtgacggaagacaatctgaaggagatggtggcgcacggcgttcttccagcaaaagagatcatcgggtggcaaccggcatttggtgaggcatttccaacacccgatacacacgaaatcgtggtatttgctcatttcttctacggcggattttctcttccaaccttaagatttttccggggaattctgaacttctacgggattagcttgcatcatctgaatccaaactccatagtgcatattgccaactttattcatgcctgcgaagcttttctgggcattaggcctcatttcgccttgttccgccgcatcttcttcctcaagccccaaccaaacaagagtaaaccatgcgtcgttgggggtgctggtttccaactcaggggaacactaagccaaaaatacttctccatgcccttcaagacctcaaataaaggctggcacgcaaattggttttatgttcaaaaccccgagcctgttcttcccgagtactcctgtcttcctccagtttatcgggatacttggaattcactgccaatgggagacgaagctgcacaagcagtagaactgatcgagaggatgattaagctgaaagatcagggccttcaaggaaaacagatcacccggcactttatcaagtgtcggttagctctaatcaaagaaagatctcgcacagccttcgaatttgacggcaagcatgatccaaaccgtgaagatccagattctcttgacttcaaggtcatgaaggaaaggatgtataagatcttctcaaacgccatcgttgttagctactctcacttgctgccagtcataccgttcaatgcattcaatcctcctccactggtacgtattcatacacttcaacctttctcaaaatatgatcttgctttcttgttgaatcagttaacaatgaaggatattacacccaggaatttgctttgatgaagtcggatcccccaatcgctcaacgccgatcgccccgccatcaaactgggcaagggagcggaggaccaagaattcggtctgaaactcaaccaagtgcttctgatccaatcggccagtcagattctcgaaagaagaagctggttctaagtgacgacgaagccgatgataccgccaggaggcctggagaccgagagacaaccaagaaactaccaaaacaggctactccaaggaagaaaacatccagtcgccctgtgccaaagatcaggaagtcttctaggtgcaactcatataacgacctctcttgcattgatgcgcacccattgcggcaataatactgataatcaaatttgcaggaagccatctgatatagatccgtctgggaaagactctgacccaactaacgtggacacaagttctttcaaagaaactgagcccactgctgaggatcatccgagtgacaat

SEQ ID NO: 17362 - DNA, 12656 bp, Oryza sativa
  unsure (1)..(12656): unsure at all n locations
caaaatatgatcttgctttcttgttgaatcagttaacaatgaaggatattacacccaggaatttgctttgatgaagtcggatcccccaatcgctcaacgccgatcgccccgccatcaaactgggcaagggagcggaggaccaagaattcggtctgaaactcaaccaagtgcttctgatccaatcggccagtcagattctcgaaagaagaagctggttctaagtgacgacgaagccgatgataccgccaggaggcctggagaccgagagacaaccaagaaactaccaaaacaggctactccaaggaagaaaacatccagtcgccctgtcccaaagatcaggaagtcttctaggtgcaactcatataacgacctctcttgcattgatgcgcacccattgcggcaataatactgataatcaaatttgcaggaagccatctgatatagatccgtctgggaaagactctgacccaactaacgtggacacaagttcttccaaagaaactgagccaactgctgaggatcatccgagtgacaatcaaccggcaaccgataatgtagaatccagtgaccaacccccgactggaatccagttggccgaagccgaagccggagttaatcaagatcccccgactggaaaccagtcggacgcagggccaagccaagagattccagaagtcgaaacccaagcaaacaaccctcgcggacaagacgccagcaatgaccggagatctggatcccctttaaaagtatccgaatccactcgtcctcgtcctgaaatcattacaggtaaacactttgtccgaaaccatgttgacccaaataactctgatcgattgtctaacctttgtcattggatgcattaggaccaatgatcgatgatgaagaagaaattccccgtatataagcaaccgaagattcgtgccctcctattctggtcaagtggtgggatgacaacttgcaacctcaaggaattgtaataaaccggcaaaaagaagacgaagaggtatgcctgctgaaaaagggactcaaccaagcgactcgcattgtaaatgtaagtttctttgatgcctgacctcagccatcttgtttactgtctagctcgagcgctgattaaactgctccgcagaggattcatcttaggaacgaggcgaaaaccgcaaccctagagagactagttcctcatcttggaaccctcgaagccaccaggagtcaactgcacgaggccagagaacttgccaagaagaatgaacacgatctgagggatcggattgctgagctccaggagtccaatttcgaactgagtggctcatcaaaaggttcgcgcaaactctgcccaactaatttgtgctgttatctttgtaaccttgattaaccgaagttaatgtagtgcaagctgccaagatatctcaactagagaagcatatccaaactctggaaaatgacaaggcagagctggcaagacagagggattcggctttaaaggaggttgaaggtaccaataatcaatacttcaaaagccattatcttctacatgctgattcattaatgtgaatctgttgacgcagaccgcaagatcaagtctcaagcacaatttgatgtcttagttgacaagatcaacaagcttgaaggagccagggataaagtcgctaatgccgctactccacttatccaggccatgttcttcaataacgccggttcgagtacacttgatgctgccgaaatcttcgacaagctgagagtcgctccagatacttacttcaagaacatcaaagaagctggaagtatgggagcaagtctggcattggcgatgaccaaatccctttatccaagagttgacattgatgccattgatggctttgcagacgggacgagcaaagaagctgctcttgacctcatcaatgatgcgcagaaagcggctgacaagattgctgctgatgtagttgagagattccaatatgtcgaccttcggccgactgggtctaataagtctgatgatgaaaaaactgatactgattgatataacaatgattttgatgatcaatgacggtggaggctcaatttgtacaatactgatgaatttatgctatgcttggtgttccatacttagcttctgatttcttaaaagcctttgtcaagccttattgagcctaaaacccgcaaaagctattaaaaaccttcagtcctcattggctaagtcgaaagaccaaacagggcaatgataaatcaagtaagcaaattgaattgataaaaatcacactccattactatcataatagccccctgactgaaaacttcaaggagaaacttgaagttagcagtcaaataggaaagatacaagcgaaatgcctaagcataaaatcgacgaaggtgttcaatattccaagaattgttgatgagagtaccgtcttcgcgcttgagtcgataagaacctggccgagtgacttcagcaattatgaactgtccttcccataagggagataatttatgccgatcctgtgttgtttgaattttcctcagaaccaggtcaccgactaaaaaggctcgcgatcgaacattccgattatgataacggcgtaacccttgcaaatatcgagtcgactgaattaaagctgcttctcgggcttcttctagtcggttgatgtcatctactcggccctcttcatagccctcctcgttgaagttccgaaatcgtagtgattcaaattccacttcactcggcaacattgcttctgcgccataaaccaaaaagaacggcgactggccggtagcccgactaggagtagtgcgtaaagaccaaagtacggacggcagctgatctacccacttgccagcatagggacgtagtcggtcaaaaactcgtgctttgatcccttgcaatatcatgccgttagcgcgctcgacttgtccgttattcatagggtgcgccacggaggcgtaaaaaattttaatgccgaagtcttcacaaaagtctttaaatgctccgccagtgaattgagtgccattgtcagtgatgatccgattaggtaccccaaaccgatgcacaatgttgatgaaaaaatctctaactttatctgttgtgatcgtgatgaccggtttagcctcaatccacttggagaatttgtcgatagccacaaagagatgcgtgtaaccaccgactacccttttaaacgggccgaccatgtcaagcccccagaccgcaaatggccagaacaacgggatggtttgcaactcttgggctggcaaatgaatttgtctggcaaaaaattgacaaccttcgcatgttcgcacaatcttgtcagcgtcggacaccgctgtaggctagaaaaaaccttgccggtaagctttgccgataatggtccgtgcagcggcatggttaccacaaataccagaatgtatatccttcaacaactgtctcccttcttccaaagacacacagcgctgcagtattcctgacggacttttcttgtacagctcagtctcatgaataatgtaaagtctactgcgcctggaaatccgctcggcttcattttcgtcttgaggtagttcttgtttgctcaaaaattttataaacggttctctccagtcggcttcgatcatgcttacgccttgaatatccatggcttcgactgtctcttttctgggcacggtcggttcgtaaaggtgttcgacaaacacatctgaaggagctgcttcccgttttgaaccaaaattggccagtctgtcggctgcctcattgttatgtcggaggacatgggtgagctcgagtccatcgaatttattttccaacttgcgtacctcttgtcgataagcggtcatattatcatctagacatgaccactctttcatgacttgattgacaaccaactgagagtatccacggacgattagtcggcgaatacttagagatattgcaatccttagtccatggagtagcgcctcgtattccgccacattatgggacgcagaaaaatgtatccacaatacgtagctcaatctttctccagtcggggagattaaaacaaccccagctccagtgcctgtaagcctcttcgacccatcaaaatgcatagtccaatattccatcttttcctctggcatgtcttcttggcactcggtccactcggcaaggaaatcagctaaagcttgtgacttgatcgaagttcgtggtttgaacgatatgtccaaagacatcaattctaaggcccacttcgcaatccgtctgtttgcttcgcgattatgaagtatatccccgagtggaaacgatgtgaccaccgtgaccgagtgactttgaaagtagtgagataatttcctgatggtaattaagacaccatataataacttttgaacctgaggataccttgtcttggagtcggctaaaacctcgctgacaaaataaattggtcgttggactttttgaatatggccttcctcttcacgctcgacaaccaggaccgtactcacaacctgggaggtcgccgacacatataacagtagcggctctggtggatgtggtgaggccaaaactggtggagtggtaagaagtttcttgaagtcttcaaaggctttttgtgcttcgggtccccactggaaattgttagtcttcttcagcagcttgaagaagggcatcccccattcgccgagtcgtgagacgaaccggctgagcgccgccatgcaaccagtcagcttttggacgtctttttgggagcttggcggtttcatgttgaggatggcgttgattttctctgggttggcctgtatgcctctttgagataccataaatccgagcaacttccctgatggtactccgaagatgcacttttccgggtttagtttcatcttgaaagcacgtatgcttgtaaaggtttcttctaaatccgcaatcagatcatccttctgcttggtcttgacgactatatcatcaacataagcttcaacattacgaccgatctgagttgaaaaacatctttgaatcatgcgttgataggtcgctcctgcattcttcaatccaaagggcatggtgatgtagcagtaggccccaaagggcgtaataaacgaggtcttcaagcagtcggattcttttagtcggatttgatgatatcccgagtaacagtccaagaagctgagtaactcgtagccggccgttgagtcaaccacctggtcaatgcgaggtaacccaaaagggtctttgggacaagatttgtagaggtcggtataatcgacacacatgcgccattgccccgtctttttccgaaccaggactgggttagccagccagtcgggatgaaggacttccttaatgaagcctgctgctaacagcttggttaattcctccttgatcgcatccttcctgtcctgtgcaaaacggtggagtcgttgcttgatgggtttggcgtcttccttaacatgtaaagagtgctcaatcacctctctggggataccaggcatatcggatggtttccacgcaaaaatatctttattattctgaagaaaggtgatgagcgcgctttcctatttacaatctaactcagcgcctattacagcagtcttatcaggatcggagggatctaagggaatctttttcgtcttggcatcactttcttcggtcttcgtcagcttggttgcaggcacttctccctcgcttgccgtggtcgcagccagtcggatctcttcgcgggcgagagtagtctcgtgagtttgggccatctcgcaactttctttgtcacatgtgacggcttgcttgatgtcgttccgtagtgatatgacccctcgaggaccaggcatcttgatcatcatgtaggtgtagtgtgggacggccacgaatttggctagagccagtcgtccgagtatagcatgatatgctgtctcgaaatcagcaacttcgaaacaaacattttctgtgcgaaaattctcccgagtgccgaaggtaactggaagagtgatatggccaagtggtgtagctgacaatcctgggataacaccgtggaagggtgcattactcggctttaattctgtgcgaggaatctgcatatcgtccagggtcttagcgaaaaggatgttgagtgcgctgccaccatcgatgagagttcgtcggagcttgacgttgcgaaccactgggtctagtaccagaggataccgccccgggtggaccactcggtcgggatgatctgagcggtcgaatttaattgctatctctgaccaccggaggtattggggcgtgttaggctgaactgcattgatctcccgttctgttagcttctgctttctcttatattcataagccaggggtccgccgaagatgtgattaagttctttgcgatgatcttgaaaaccagtcggggcatcgtcttcatcatctttcttctttgatgtgccttgatctccgtctgagggcttacgtgcgttcttcacgtattgctccgcaaattgtttgtagacgaagcaatccttggccacgtggttggagttggggtgatgcggacattgggagttcattatcttgtcgaaggtgttgacgcggggacgttgtcgggaagatggagaggttgtggccacaagttcttcgggcttacgcttgcgatccttgtggttgttacttccgctccctcctgcagtcggcgtgtccttctttggcttccaagtggtgcccgactgcttggacgctgtgatagcatcttcggctttggcatactcattggctttttcaaacatatgtttgaccgtcttgggaggtttgcgtccgaacttgccgactaggtcctcgtggcgaatgcctttagtaaaggcggcgatgataacatcgtcggtgatgtcggagatcttgttacgttgctcagagaagcgtcgaatgtaatctcgaagagattctccagacttctgaacgatgttgtagagatcgaagtgtgtaccgggccgttcaaaagtaccttggaagttggcgatgaagtggtcgcgtagctctgcccatgatccgatcgtgccgcggggtagcccatgaagccatgaccgggcagaatccgctagggccacaggtagatagttcgccatggctttgctgtctcctcctgctgcgcagattgcgagactatagacggtaagccaagactcagggttggtggtgccgtcatatttctcgattccagtcggcttaaagctggctggccaatccactcgacacagatcgcttgtgaaggcagcaactccgtccacgtcgtcgtcgtagcgatccggtgaatgatggcctcttgtgcgcggcgctggttgatggtgtcgcgaagatcgatggggcatcttcgatgtggggactgtggtcgttcgacttggcgctccctatatcgctcgggaggcgagcgaacggaccgttcatcatgtcccctgctcctgcgactagatttgacgccggcaatgctgaggcttggctggtgatagtcttgagatcgaagatgagggactcggctaccagttggggtgcgggtgcttgcggagttggctggaaccgaggcagcgatcatggtcttcgtctggttcaagatgttgactacatgataagcttggttgagtgcgtcttccttgaggagggtgtcgaggagagtgattgctgcaaccgcgttctgctggggggtgcgaaagaccgctgtcccatcaacgtcttgttgcccaatgagctctctcgctcgccgcccagattccaaggcgcgttgtcgtcgatcttcagcctcctttgcaatccgttcgtgatcttgttgctcacactgtagtcgttctcgctcctatcgctgtcgctcttcctctagtcgatgacgttcagcttcttgtcgtgcgcgatcttggtccgcttctcgggcttggtgctgttcctccatttcattgttagccttgaatacgccgaagaagaggggcgtgtagttatcctcatagctgtcgtcgaagttgtcgaggtcgccgtggtcgtagtggtagccgaaatcatcgtagtcgaggatctcggttggtcgagaactgacgccggaggagctgaggtagccatccaactcttccgtcgagactgtcccgagaggttggagtataacgccaaccttcctggatctagatcggatcggggccgaagccggagctcgcttagatcttcgagtgggagatgtcttgactgtgaagacagcggccaaatcatcaggaagtttcgtcaggattgagggataggacccgtcgtcttgatctggtcgcggaagagtagattggatctcgtccgagtggtttgaagccgagtcgggagagatgatcttggagtaggcctcggccgagttcggaataccgaacggcacggggacctggtctctccccgactggtttgaatccgagtcaaggagagagatcttgccgaagtcgttggtgatgaagttgaggctgccaaaccggaacacctgcccgggagggaaggcgaagtcgtcgatgccagaaacgaaacccatcgcacttagtcggcgagaacttgacgctacccctacctggcgcgccaactgtcgaagcaagatttcggcaataataaaagggggtggctatcaagctaggaaagtggatgggtttggagacaaggaattttatacaggttcaggccttcttattcaagaagtaataccctactcctgtctggggatgattccgcctagtgtgttattgattgtataaattggaaaaagaatcgccccccaagaggcacacggaccctccttatataggggaaggagtccgctttacaaaatacagtccatatcctaacggaatatgggattatagataaaatacaatcgtaaccgactaagatcccgggtatttccttgacatacaagtttagaacctaacccgagtcttcatagagatattccatctatatttggtaccgtatatccgactaaattacaaccgtcatatagatatggggtatccataatctccacaactttactaatttccttgttaatcaaacagggtacgtaataatgcagtgggcggagctctggcactcgcccgtggtggctgggtcttgactccgccccttaatttttcggactagagtagtacttgctatgtttgggaggagagattgaaaatattcttccatgcattgaaaacaatattatttattagcacatgattaatcaagtattagtaaaaaaacttaaaaagtagattaatataaatttttacaataactttcatatatttcttttttataaaaaatgaatcgcttagtagtccaggaagcgtatgcctagctaggaaattaaggagttgacgttgggaacctcaagaaatgaactcagatttatgggaggactgcaatcctttagtttttcacacacgagaagaattatggagggtcgattgatccccttgtgctcaagaaacaggaaacagataatccttatgcagtccatttctactaggaaccgcataagatagatcatcacaataccccaactaattaagctttggcatcttctttgtcacatgcttctcaacttctgcatcgatcttcactactgtttcagctcactgttatttaaaccactccttaggatttaggtccataatcttggtctgcagaatatgtctgctgtgcagagagcttcatcccgatgcaactcattccgatgaaaacacttgatccattaaaaagaatgatgttaattgtacatgaatggttaaaagaagacattgttaatattggctaggagaagaatgggaataaatagagcacactgctagggtctgctccaccctccagacgggtaaatggagtgaataattaggaggataaagatcttttatatatgatctttgttaggtaaggcgagttacataaagtttctacataaaagtaacaatgtgatcaggaaataaaccccaagttccctttagaactaaaataaaaccccatgttcagaaaacgtacataaagaaaaaatgggcaacgtttagcagtttccagacgattgatgaatgtcaatatatacttgaaaatataaaactattcagtcaccgagttcaagagataaatctctgagaattcgtaatcattagtacgttttgcaacctagtatatgatggtttactagctaacgtgatttcaagtgttcatacatcaaatttactaaatgaacttttctttagcaagggtaaacaatgtcaactctttttttttgttgtccattccatcattccttctcaatcaaagacacgaagacctccttcctgttcttcaaaacaacagaaaataatcatgtgaataaacagaaaatagcaaggcttcaggatcgatgaacacatcaatggagctaatatttcaacaaacctttcattcaataaaataattaaggccattgatccctctagctatatataggtacgaactaatctacgtggtgtttggtttgggtgttcaatgctgtaatgagatcacatgaaaatgggcaactttatcaactgtttttgtttgcttgctttgttatcagaaccaactattttaattcacaacagcgtcatcaggtgatagtgcagaatttaggcacagtcgcattgtattacactggcgattcttacatgcatcccttccttatctttcctgtgttttcgtgttccaaccagctggtgtttacaatgctagacctggaatctcatagcaacttgtcatgtgtagttatatgtatcatcctgtccaccccctcttatttttggttctttccttgaatccttttattttgatttctctgaatatcttacagtttttaacagaatgtaaaaggtaaccaatctggtgcgattaatcgctgcctgacattcgtgtgtctgaacctaatacttgcagaatagaacaaggtgttgatttggtgaatggtgctattgatttggatggatagatgatatatatttattttagtttctgaatatcttaattactttatagacatgcgcaattctacttgacgttacattcgacattcggccgttcggatcaacgagtacacacctcaataatcaaaggacggaccctaatcactatgagtaaaacgctgatatatcctagaaaattcgtttctaaggggagtcgaacccagaacctcagatgcttctgaggtttgaggctctggtaaccacaaggctacaggcccttccacaatttgatgcgatatgttgcttttcagtctgcactgttggacatgacaaggccgtttgattttgtttcacaagttactatcaaagggaagtggagatagcgtgtacaaccagcctattagtttgtatgatatgatcccagttccatcccagcctatcagtatattccctcctgttggaaatcaaagcaactcacgcgaacacagtggacacgaatcacaattgcacgtgaagaacacagggaagaagagaacacagtaccgagcatatttgtggcaccgcacatatacaactagtgccttttctcttgctatttcttcacaaaacaaacgattacaaggagcagctatttacaatccatgcatactactaatcgcacatacgcccacgtccggtttacttggccgcaaaactccacaagtatcgcaactgcttgactcaggccgcatctccactacggaagatgatgttgaaataaagattaagtgttcacacaaagcgagtggtaataacatgtgattaattgagttttaattattataaacttgaaaatagattaatctgaaattttagaacaactttcatatataaagtttttacacgaaacacactggttagcagtttgaaaagcgtgccacttttatccaaaattttattcacgtttttaattggattcgaacatgagtcctcccagacgtcgttgcttgcaccaaccaaataatatgcatgcatgcacatgcatctgcaactaactaacactaccagagaaagcgtttttcctctcggtttgtagccccctatactcctagttttataaccagaagtacgaatccgggactaaagataggtatctttagtcctgggtgaaatacctaggactaaacatccatctatagtcccggttggtgatacaaaccgggtctaaagatggcaacgccaatcccggttggtcaccatttctttcttttttttttcattgtttctttccaaatcgagttgtaactgcacaaatcgagttggaacggcacaaatcaagatgctccctatatccccaatcatatccccaaatcaaaatcaaagtatcaacacaaacatagattcacatcacaaattcttaaaaaaaatacatctcaaattctaaaagaaatacatcacatatccaatgaattacaacatctaaaagttctcagaccaacgaatcacaacttctaaaaattctgaaatccaatatatcacaaattcttaaaaaaaaaagaacaacaaaatcgagttgccgctgccgcctcccgcctccccttcggcagaggggagggcgccgctggccggcagctcccgccgccctcccatccgcccgccagcgcggncacgccgncacccgccgccctccgccctccgccctccgcacgggccgccgctccagtagtcgccgcctgggctcggtcgcctggagaggaggaggcggggagcgggagggggaggagagggga

SEQ ID NO: 17363 - DNA, 12186 bp, Oryza sativa
  unsure (1)..(12186): unsure at all n locations
gagcgacagaggcggcgctccccacccctccctatctccattcctactagatccggccagaggagggaagcgatggtggtggcggccaccgcaggcggcagtagaggcagcactccccttccctgccctcccctcccaccctccctcccttctagatccggctagatgggggaggacagcggcagcggcccctgccaacggctggacagaaggtgcctgtgaaaatagtgtattttcacatgtcttgaagtgtaggcggggtgaagagccgcctagaaaaatttattttaactctttgtaaaaaatatgttttctaataatgatcttttagctgtcaccagttatttgtcaaattttcaatttctaatattacttggattccctcctacgcacctaaatgggttaaaaatgttttaattcccatgccattgaaatcataaatacttaaaattttgggtcgtaaaaatactatttttttttttgacctggtaaaaaaatctttatttttgagggtagggagtaagagtagtgttgttatcattaagacacaatggtgaaacacccagcgaaaactccacgtgttgcagtggaaaagctgcatgtcacaaaagtagaggtgcaaactggaattgatttgtagcaatgaaatatggtttaatctcatctgatctgtacaattcatactttatcaatcattatataactgttcctttttggaaaatttcatatgatttgtacaattggtacaaccatacaactattttatatataggatttactaagtgttgtgagacaaattagagctattacaaccagcaagagatgttatataacgtctaaattaagtttcttaaaacctcacattttttaagataaaggaaactttattcatctaagatagtcacatcaagatttaaaaggagtctcttccatttttcttccatttcaagcataacaaaattgttttgacctcaaactttaaacccaccatcacatttcacaaataacttgtttcaatttcaaacttgtcagatttcatatgttttaagttctattaagatctttttgcttctttttatgccataacattctcctgaatttcttgaatactgaaaccaattatttaatctcacagagctttttggcctaaaccctgaaacgggctaagccggcttctgtgtcttccccaccttggtccggccagcttacgtcggcctagccgccactgtactaagcatgtagtatgtagttggcttggaacaatgtttgaatcgaacaccatttgcttcttttatagagcgtaggtcctaattaagtggcatgcttataagcctttgcgctccaatcatatcaccttgggttaaccattttacacaagatatgatgaaagtgtaaatgggataccatgcatatgttagctcgctcaatctatagaactaggctaatgcagattttggagcagatgtatcacattatatctatacaacaacgtgcatggtttctatagcaaacaattatatccctaattattgtttaacaaattatacttcatgcggccataatgcccatttccatcgcagcttttgacatgttcttcttgttcttcatgatgaacgattaccagaacgaccgttgaatgccatgacagttatcgcttgcggaaaggatataccacggggcactgcacatcacagcctatccactaggtcgactgtaatcttgcttctttaccactataatcaggttacactggcctcttgtacttcctccgtctcataaaaactaacttagtcttgaatattgacacattctactactacgattcaggacagatgcagcttctgatttatagtattataatgtatcaacgtcaatcactatgttgattttttcggtgacagggggagcacaaaaggatccgtcagacaataccatgattttttattgctgatgtctcccattccaaaacaacatcttttgatgttacgagatgggcatgttcataaagattgtgatggtcaaaatgaaagataaacatctctcatgttttctttcggtgctctcaactttatatacttttttcagcgaacggtatgtataatatattgcagccaaactgaagggaaccaaggacgacggaatggactcatatatacatagtcgagaggaaatcactcaggccccacaaaaaagaagaagaaaggaaatgcattgcagatatctactccctccgtcccaaaaaacccaacgtaaaaggtaatgtgacccctacttattcagattcgttgtactatgagggatcacatctcttcctaggtcatatcccctcctaggttagtttttttttggaaagatggagtatgaagtaacaaatggagtttgtattaacattaatgtatctacaaacctttcgttcaataatataattagggccattgtcctatcgactatatccaactaacctatgaaccccctccgttctagaatataccatctcagtatgggattagacacatgctattataggcaaattgaaagggaactgagcaatgattgagaggagttcatatgtatatatcttaaaccagaggtgagagtaatggctcagccacactattgcagtgtccatggagtgatgaatggggcttatacgtcaacaacattttctttaaaacataaaacataattaaggctcttcatcccaataggtatatacatagctaggtacatactccctccggttcagttgacattttcaataattgaacaaaaatgtacacgatctctaaaacatatttttaactctgagtttatattataatatataaaaaataagtaaatattttttttcttaaagtactttctaagacttatatacaaatcgtgtgtttattgtctccaagatgattattctgatagtcaaaagttataattatttcacgtcaaccttgttcaaaatggaacagggatgtagtagtaatcagcatgatgcctgtgcttcgggtcttcaaataattctgtaatcagatcacatgaaaatgtgcaacttttaaaaactggtattcttcgattgctttcttatcagaacccactatcagaattcaccacttcctcgggtgacaatgccaactttgggcattccattgtagatttatagtgatgattatgccaaatttgggcatccctgccttatagcttcccctttttgctcgagtaatggcaatcagcgaacgttatatatgatcctgaatttcatagcaacaaattttaggttcatcccctgttttttccattcctgatttcaatctgcactgcacactaattaataacagagaaagtatatatgcaagtctgtacatgcaaatttggaatggtgcatattatgtacttttcatcaattgttacttcaatgtctcccgcaattaatatttttatattgcctcttgggctaaaccactataccaattaagtttgagcaaagcttaaactccagcagaagctagcatttattaattgcaactgaatttggttcataactcaacatatcaaatggcgaggttgtgtggtaaatctgccaccaccgcaacaaccaatttcataatgtttgtgtaaaaaaaacaaaatttgctacggaacactcaaagattaaggtctttgctcctgggcatccgaaaaacgtgacaaggttcgtggacactctaaaaacctggtaatttattaggggacaccatcatcattattttattattattcggttaaatggagaaaaaagcatttataaaagacaagcttaccctttgggttcgtaacttgggtctgttttcaaactttcaacttttttgtcacaccaaatgttttaacacatatatggagcattaaatatggacgaaaaaaaccaattgcacagtttgtatgtaaattatgagacgaatattttgaacctaattacgccataagttaataatgtggtgctacagttgtcggtgacatgggaccgggagtatcatgacttagagacttgaggcagacacgatcacccacgtggcctaaccctctcgggggggggggggtcgggcccgagggtgatacggccgcccttctctttgtctccccgaggggtcggaccgctcccgtctcagccccgagggccgaggcgccccgaccccttgtgggtgttgcgccgcgtatatggggtaggtgagcatagcggggctcacctaaccacatttattgcggtttggacgagcgcgtcacgccgcatgtaacgcagtgcagcgcgctcgtttatccggtctgtgatcagtcacagaccagtcaaatcgtgggttaggtggcgacaggcggtctgacgcacgcctcgccccatcccgttaggacgagagcctccaagcactcgtccctagccggagccggcgtgttagctcctagagatggcacattggttccggtcagatatatgccaggcttcatcctaaccattacaagcaagacattgtatgaagaggggcgaacatgcagattgataaactaacgcgtttttgacaagaatgaccgatttgtgaccgggctgacactggtcatgtcgtctgcagacagccatgttcccacgttgcgctgcttctggcggaagtggaggtaggtgtgggccgtcccatcagaaggtcattcggacggcaaccatacaagtctccgtctgtttatgaaaagataggataagtccccacaaaagaaagagagggagagatggtgcatgtggtatccccttgagatataaaaggaggaccttgcccacttagaagaggggaggggaaaaaacgatcccagaacgatcgggggctggcccgcactttgtagcttcttcatacacagatccaccaaaacacaggagtagggtattacgcttctcagcggcccgaacctgtatacatcgcccgtgtcttgtgctttttccattctcgcgaaccttccacacacagacaaggagtttagaacctcacccagggcccccggccgaaccggcaaagggggggcctgcgcggtctcccggtgaggagccccaagctccgtcatctggcgcgccaggtaggggactctgcgtgtgttcttctaagctctcacactctttcgtgtgcgccaagctttttctgttcagcccaatggctgaacaagcaaaagcgcacaacctctctccgagtgttagcggtgacgacggggagccaaacccacgccgtcgagctcgtactccaccgccccctccacgccaaagtcctaggcaggaggaggcgctcgagagggtcgaaggatccgcgacttcgacatccacgggtgatggagaagggcgccgagatggggagcgtcgcctcctcgtctatggcgacggcagcacgccccagggcgcgctccgagctgcgggcgcgctcctacgtcacccgcccgttgtccctgacccggagtctccagcccaacgttggctggacgacgtggccaacttggtcatgacggcacggcagcgcctaggtgctggtgggcggtcctccgccaccaagacctccggcgctgctaccaccggctccgtgtcgtcaaggcggagggcgcggcgagcggcggctgttgctcgccattcggccgtcactccttcgtcagcgcctccgacccaggaagatcagcgtggggggccagatgcccgcatcgatatcgagcgccgacgtaatggtcggcgtgctccccacgcaacagagggcgcctcctcgtccggagtgtcacctcaacacggacgcggggatcagccctccgtgcccccggttggtggtgtcggctgtagagcctttgtggcgagccttcggaatgtccgttggcccccaaggttccggcccaccatcgccgaaaaatatgatgggagcgtcaaccccgccgagtttctccaggtctacacgaccgggatcgaagccgccgggggtgatgacagggtcatggcgaatttctttcccatggccctgaagggacaggcgcggggttggctaatgaacttgccacccgcgttggtccactcctgggaggatttgtgccaacagttcaccatgaactttcaaggcacatatccgcgcccaggtgaagaagcggacctgcatgcagtccagcgaagggatgatgagtcacttcgctcatacattcagcagttctgtcaagtccgcaacaccattccatgcatccctgcacacgcggtgatctacgcgttcagggggggtgtgcggcacaaccgcatgcttgaaaagatcgcctccaaagagccccagactaccgcggagctttttcagctcgcggaccgagtggctcgtaaggaggaggcatggacctggaatccctccggttccggtgtggcagcttcggccgcccccggatccgctgctcagacagggcggcgtgacaggaggaggaagaagaggtcagcccataccgacgacgaaggtcatgtcctcgccgtcgagggcgcttcgcgggccacccgaaaggggaggcctgcgggcgacaaaaagaaggaggccggcgctcccagcagggagcgcccaaccggcaagtggtgcatcgtccacaacacttcccttcacgacctcgcggactgccgcgcagtcaaaagtttggctgagcggacgaggaagtgggaggaggagaggaggcaggagcaccgagagggtaagtccccggcggttccttccggcaatcggcgaagtgaggacaagcagaaggcccccgccgaggacatcgatgacggcgatgatgacctaggtttccaagagcctggggccaccattgccactgtcgatgggggagcgtgtgctcacgtttctcgccggagcctcaaggccatgaagcgagagcttctggccgcgggcccctactcatgaggcgacgcgccgggcgcggtggtcggaggttgccctcaccttcgaccagaccgaccacccaccgtgcgttgcccgggaaggacagatcgcaatggtggtttcccccactgtttgcaacgtaaagctggggcgtgtcctcattgatggaggagcagccctcaacatcctttcccccgcagcctttgacgccatcaaggccccggggatgatgctccggccgtcccagccgattatcggtgtgacgccggggcacacttggccgctaggtcatatcgacctcccggtcaccttcggtggatccgccaacttccgcacggagcgggtgaactttgatgtggcggacctcaatctgccctacaacgcggtcttagggaggcccgtgttggtgaagttcatggcggcggtccactacgcctacctccagatgaagatgccgggccccggtggccccatctctgtccatggcgacctcaaagtcgcgcttgcttgtatggagcagcgtgcggaccacctcgccgccgcgtccaagccggagggtggcgacgagaggcttagcacatccgcccccgccgccccgaggcagcggatagtcacatgcgacgaggtcctggtcaaggaggttgccctgggcgacggcccgtccaagaccacacggatcggtggtcttctggacggcaaataggaagacgcgctcgtctctttcctgcgggcaaacgctgacgtcttcgcatggagaccggcggatatgcccggggtccccagggaggtgattgagcaccgtctcgccgtgcggtcgggcgcaaggccggtccggcagaaagtacggcggcaggccccggaacgtcaagccttcatccgcgaggaggtggcgcgacttctggaggccggattcatccgtgaggtcatccatccggagtggctggcgaacccggtggtcgttcccaaggcgaacggcaagcttcggatgtgcatcgactacaccgaccttaacaaggcatgtcctaaggacacttaccccctgcctcgcatagatcagattgtcgactccacagcggggtgcgaccttttgtgttttctagatgcatactctagttaccatcagattcgcatggctagggaggatgaggaaaaaactgcattcattacccccataggaacttattgttatacgacaatgcccttcgggttaaagaatgcaggtcctacttttcaacgtactactcgaatttctttgggtagccaaataggacgtaatgttgaggcttatgtcgatgacttggttctaaagacgcgcaaccaagagaccttactctcggatctagcggaaacttttgagagtctccgctccgcccgcataaaactgaaccccgataagtgtgtgtttggtgtacctgcgggcaagcttctcgggtttttggtctctgcccgaggcatcgaggccaaccccgagaagatacgagctatagagcggatgcgcccccccagcaaacttagggatgtgcaatgcgtcaccggttgcatggccgccctaagtcggttcatatcgagactgggagagaaggcgctacccttgtttaagctcctcaaacgctccgggccgtttacttggacggaggaagctgaacgtgctctcactcagttgaaggcgtatctcagctctcccccagttctggtcgccccggagccaaatgaacccttgctactctacttagcggcgaccccgcaagtggttagtgcggcgttggttgtggagcgcgatgaggacaatcctcattccgcgcacccccaccctgtgctggcttggcccgggagagagcagggaggagaggcccccaagccgaacggtggcccaaggcccccgacgaccggagcaggccctgtgcccgcttgtcagacggtgccaggtgcccccgacccccaggatggcccgagggccactgcgggaaggccgcacctatcgccctctgaccccgaggctaaccctgtgccgattcgacccgggagagagcagggagaagaggcccccgagccgaacggtggcctaaggcccctgacgaccggagttggccctttggccgcttgtccgacgacgccaggaacccccgacccccaggacggtcccgaggccactgtgggaaggccacccctgtcgtcctccgaccccgaggtcgtcggcacagaagacgagtgcaccccgcgaggccgcttggacaaagagcgccccagggatgtggcccctagcgaagaggatcggccccaccgaaaagtgcagcggcccgtctactttgttagtgaggccctccgggacgccaagacccgataccctcaggcccagaagatgctttacgctattctgatggcttcgaggaaactgcgccattatttcctggcgcatcgggtcacggtggttacgtcttaccccctcggccaaatcttgcaaaatcgagagggtactggacgggtggtgaaatgggcaatcgaactttctgagtttgatttgcactttgaaccacgccacgctatcaagagccaggccctcgccgattttgtggcagagtggaccccagctcccgagcccgtctcagtccccgaggccagctcgggccccccgcagctgcctcacaccgcccattgggtgatgcagttcgacgggctcctgtctcttcagggcgccggtgcgggggttacgttgacctcgccgagcggagacgtcctcagatatttggttcgccttgactttcgggcgaccaataatatggcagagtacgagggactccttgcgggactcagggtggcagctggactggggatccgccgcctcctggtgttaggcgactcccagctggtcgttaaccaggtctgtaaggagtaccggtgctctgacccgcagatggacgcttacgtgcgccaagtacggcgtatggagcgccattttgacgggatagagcttcggcacgtgcccagacgggataacacggttgccgacgaactctcacggctcgcttcctcgcgagcccagaccccaccgggcgcctttgaagaaaggcttgcccagccatcggcgcgacccgaccccttaggggagacggacgcgcctgacaggccaccgaggcccgtcggagtccaggcctcgggacccgaggggagcactcccagctcccttagattgattgcttggatcgctgagatccaagcatacctcacagataagactctacccgaggaccgcgaaaggagtgaacgcgtccagcgcatctccaaacgctacgtgctggtagaagggaccctctatcggcacgcggctaacggaatcctcctgaagtgcattcctcgggaacaaggcgtcgagcttcttgccgatatccatgaaggcgaatgcggagcccactccgcctcgcgcaccttggttggcaaagcctttcgacaaggtttctattggccgacagctctcaatgatgcggtcgacctggtccggcgatacagagcgtgtcaattccacgccaagcaaatccatcagccggcccaggccctgcagatcataccactttcatggccattttctgtctgggggctcgatatcctgggaccgtttaggcgggccccgggcgggtttgagtatctgtatgtcgcgatcgacaagttcactaagtggcccgaggcttatccggtcgtcaagatcgataagcactccgcacttaaattcattaagggcatcacagcccggtttggagtgcctaaccgtattattacggataacggcacccaattcactagtgaacttttcggcgattactgcgaagacatgggcatcaagctctgcttcgcctcacctgcccaccccagaagcaacggccaagtggagcgcgccaatgtggaaatcctcagaggccttaaaaccaagaccttcaacatcctcaagaagcacggcgattcgtggatcgaggagttgccagcggtgctctgggcgaaccgaaccacgccaagccgagcaaccggggaaacgcctttcttcctcgtctacggcgcggaagcggttctcccatccgagctcaccctgaagtcccctcgggccaccatgtactgcgaggctgatcaagatcagcttcgcagagatgacctcgattacttggaagagcgaaggcgacgcgcggccctccgagccgcacgctaccagcagagcctgcggcgctaccatcagcgccacgtccgggcccgatcactctgcgtcgacgacctcgtcctacgccgcgtccaaacgcgtgctggattgagcaagctgtcaccaatgtgggagggtccgtatcgagtgatcggcgtcccccggccgggctctgttcggctggccacgggtgacggcacagagctgcctaacccgtggaacatcgaacaccttcgtcgcttctacccctaaaggggaatcgggtgtcaggtttcgggctcgggccaaccccgcacccccctcgggtgtgcagggtcggtcgggggctaccacatatgcatattcttatttctcttatatctgtatttcaataaaagcattttcgatttcctaaaggctgtatctgtgctgttgtttccttttgaaggatcttgacttgaaataggtcactcgtgttcaatcctgccctcgggggctcgggtcggctaaaatcgccaaacggggcccagaaccgagccgtgccccggggcgtagtgaactccgggggggaatcagcaaaaacccacaatcgggtcacccataaccctcggtcaccacgctcccggcctggccagtctcgacatgtggatctccccaggcactagccccgacccgagccatttgaggactaggacctgggcacgagcccttgttcaagccaagacacaaaaggaccgtggcacagacatccttgtctcatacacacaacaaatagaattgacacaaaaaatttcctctttatttgattgcagattaaattagtctatacaagaagggggcccgaaggcctcggaagaagaaaagaagaaactatttaaagattggcgggggcctgggggctcactccgatgcacccgggtcgccagcctcgtcgccactgtcgcccactccgccgtcatcgtcctcctcgtcggagttgaaggcgaacgcgagccgaggggtcgaaccctcgaagctgtggacgatatggtcggcggggtcccggacctgcgcgcgcgcgccatacttggtcccgggagggaactcgtncagcgccgtccatggggagaaggtcggatccctggcttggtaactcgccagtatgag

SEQ ID NO: 17364 - DNA, 13212 bp, Oryza sativa
gccgccccgccgctacgcgcccttgcatccagctcccttgcctgcgcctcgagttcagcggcccgctggttcagtgcggccctctcggcgcaggcactttccagattgcgacgcgcttgttcctcttgcgcagcctcgcggagggacaggctgtccgccagccattgcgccgcggcgtcggcctcctcgagagctcgctcccgctcggtgagcgcggactattcttccgcacaggcggcttcgtgcaccgccagtgtgacctcccgaatagcaacagcggcctcgcgatccgccaggtccctctccacggcgcaggcacgctcttccagcgccatggcacgggcctcaagggcttcttcgcgccgccgggatgccacctcggtctccgccgcccgccgttctcgggcagcggcagcgtcaaggaccccccgggcggcgtcgagctttttccctagctccgcctcccagctcccgtattgaaggcggagggtgtcctgcgcctcgttcatcacggtggtggcaatgagggcagccctccgctcctcctccacctccttggcgatctcccccagcaccttccgacgggcttcgagctctgagacgtgccggcggtgtgccttgcggcccacctccaccatggcctctaccgagcgtcgcccctcttcgacacgcgcccatgcggcgtcgagctccgcccgctctgcttgcagggcctccacatgggcacttaacccgtccaacaccgtggtgtttgcgacggccaaggcctgcagaaggggttctgcgctcagtggagcaacggaaggtgtggggaagagccgcctcggtgaggatgccgcgcggctcggcccgccgatggacgtgccagactcagggatgtcccccggaccgggcttgtcctgagtgtcgcccgagggattgggcccaagcgatgcgcccgcggcctcgtcgcgagctgcctcggaagtcgtcgccgcctcggcctggcgaagtctggcctcctcccgagcggcttcttcagcttggcgagctcggacgcccacctgggcagcttcctcggcttctcgaaggcgatccgcggcctcttgccggtcagtttcacgggtcgcctcggaggatgtcgtcgcctcggcctggcggagtccggcctcctcccgaacggcttcctcggtctggcgagcccgggcggcctcccgagcagcctcctcggcttcccgaaggcgatccgcggcttctcgccggtcagattcccgcctccgggcctctgtggtcgccgggtcctcggcctcagactggctggacttggaatagcgggagggacgcgacgggatctcgctgaaacagaagaaagaccagaagacaaacaagatggatgagtgaaaactcgcattgaaggaatgaatacggccacgatgggcgtgggacgaacctgcgagggggtcggttaaacgaccaccttggaggggaaatgaggtttccccgggatggttctgtccccccccatcttgcggggccgtttcttcttccgctccccctcgggctgcgacgtcggcgtggccccctccgggcgcctgctgctggcacgcgccgccccgccccctcggggaggagatgggggaggggttccttcctacttcctcttcccccgggcgtcggcagggcggccgatccccgggcccccgacgcagggcccagaagcacgaccccctcccagggtagattgttcccccctgcggctcccgcccgcgccatcgtggcctcgaggagcccgctcctccgacgccccgaccgcctgcatgatggtcaggatggaggcgcggtctgcatcgcagcagagggggaggactccttgaggaatgagggatgcctccacggagctgagattcagcacccgttggaccactttcttgaagtcctcaggagcccagtcccatctgaccccctggtgggtcctcatacagtcctcggacccggtgtactcccaggcgccctgggcgcgccgctggagtggcgcgatccggcgacgaagatagtcgccgaacaccatggcccctgtgagcccctgggatcgcaggcccgccaggcggtcgagaacggcgtcgtagccatctcccagatctaccggcgtccgccagttggaggcctgcgctgggggctggctcggaagtcggaggcgcgcttcgtcggcgaggggggtgtagaaccagtcgctcttccagtcatcccacttcttgcgaaggacgcagggaatgtagcggttcagcaccggcccccgcggctggaagtagcaaccaccaaccaccgacggcggcgacaccggctgtacggtgaagaaccaccggaacagccgaagggatgggcgcaccccgatgaacatctcgcacaggtgcgcgaagatggccaatgtcattaccgcgttgggggtgaggtgcgccatctggagatcgtaaaactccagaacatccatgaagaaagaagaaaatagcggaaccagccctgccatagcaaaagggaggaagaagacggaccgccccgggtagcgtggcgccgggcatccctcgcccagcgagactatctcccggccggtggcagattccggcatgaagcggcgcggcagcccggcttgtctctcgctcacgatgcgggaaggcggcagcacgctaccatgacgccggaagaagagatgtttgagagcgagcgcgtgtggcgaaggtagggcacaggaaacaaggagtcagggcgcaagcggcgaagacaaggggaataatggcgaaaagaaggaagcaaatctcttcctcggtgactttatacccttgccaacgctatgcccggctcctcgtttctcgcgccctctatctgccccctcgtttctcgcgcccacacttccactaatcccattcgcccgtttgcggtgcatgaggtggatatgcggctgtggcagtcgagatggaacatctcgtgcgcgcgttaattacgctcgccgaccgaagcgccatcatcatatctccaggaaaaacgaaccggctcgtcccgattcgcgtgttactcgagtaatgtggcagtcttgaagagaccgctcattattgacagccgagtaaccattgccgatgtgcgtgatttgcgaccgttgggtttctgcccaactgtggagaccggtcccacctgtcaccaggccttaggaagtggcgtcacgcccgaccgcttccctcgaggagggcgatcgccctggcataacgccgggggctactgtcggtgacatgggaccgagagtatcatgacttagagacttgaggcagatacgatcacccacgtggcctaaccccctcggggggggggggggtcgggcccgagggtgatacggccgcccttctctttgtctccccgaggggtcggaccgctcccgtctcagccccgagggccgaggcgccccgaccccttgtgggtgttgcgccgcgtatatggggtaggtgagcatagcggggctcacctaaccacatttattgcggtttggacgagcgcgtcacgccgcatgtaacgcagtgcagcgcgctcgtttatccggtctgtgatcagtcacagaccagtcaaatcgtgggttaggtggcgacaggcggtctgacgcacgcctcgccccatcccgttaggacgagagcctccaagcactcgtccctagccggagccggcgtgttagctcctagagatggcacattggttccggtcagatatatgccaggcttcatcctaaccattacaagcaagacattgtatgaagaggggcgaacatgcagattgataaactaacgcgtggtggacaagaatgaccgatttgtgaccggtctgacactggtcatgtcgtctgcagacagccatgttcccacgttgcgcctgcttctggcggaagtggaggtaggtgtgggccgtcccatcagaaggtcattcggacggcaaccatacaagtctccgtctgtttatgaaaagataggataagtccccacaaaagaaagagagggagagatggtgcatgtggtatccccttgagatataaaaggaggaccttgcccacttagaagaggggaggggaaaaaacgatcccagaacgatcgggggctggcccgcactttgtagcttcttcatacacagatccaccaaaacacagaagtagggtattacgcttctcagcggcccgaacctgtatacatcgcccgtgtcttgtgctttttccattctcgcgaaccttccacacacagacaaggagtttagaacctcacccagggcccccggccgaaccggcaaagggggggcctgcgcggtctcccggtgaggagccccaagctccgtcaacagtaaacacttactaataacggattaattaggcttaatatatagattcgtctcgcagtttacatgcaaaatctgcaatttgttttattattaatctacgtttaatactttaaatatgcctccatatccatcaaactttctttttaccaaaacaactaaacacggcctgcatcttcctctgtcactgcggcttcctcgatgttgttgccaagtgcagcctctagctcctaggtcaaccttgccacgatcagcctgacgcgcgtcggccgcgaccacgttcagcgccgccacagggtcctgcagtgcagcgccaccgggtcgagcgaccggtgcgtctccgcgaacgcaacgtgaaccgtgtcccaatggtgtccagggccatgagcacgagcacgggcgcgcagggcgagaccgacacgtatgtgcggcgctgtgcacgacgacccagttattatttttccacttaataaatgtggctttaactgctcatcagtctatcacttgattatttgtcactcaatatatacttgctatctccattttaggcattttcctttaaacatcaactcatccatgcatggtaagaagaacatgtgggggttctgtgtttagaggaagaacagcaaattaaatggttaacaaagaaattttatggaaaaattattcaagttcctatggtttgagaaccaccggttcacagccgcacatgaaaaatttctcatgcacagacgcgatgggctggtgctgaactgctgatcaacttcgggagatacagagaggaggagaggggcaaaaactcgtcttttcaatgctatttctctctcaatttgttctgaaaataataaaataatcacaacagtgtcccttaacaaattatcagtttctaatgtgtccacgagccgtattagttttttcagatgtctagcagcaaagatcatatattttaagtgtcacgtagcaattttttttacaaaaaacagtgtgaggcctataagttcacctgttatttagaaaggcactatatgcagaaattcagtggcgccatatgtagaaaatgatgaaaaagggcttgatgattagagcaagtacataatagtgtcaagacgaaagagaggagagagaccgggtatatatgatgcccctcatagaagaggcagcttgcacatgatcgagctccaagagaaaaggagagaaaacaagtaaaataaattcttagtattggaataagtgtattagggatagtgtagggtgtcgcatatctagactcttaattaatgactagcaaaatgaacaaaattacagatagcaactactccatccgtccaaaaaaaactaacctataacccctcctaacttgagtttttcttggatggagggagtaccattcttattaaacttgatcttacacggttttagaggctttaaaataaatgagaatgttcttctttaattttccgatgcaatgcacatccagtctgcaagcaatgacaaaagaacagcatagggaaataaaaaaatggttttctcccattccattcccattaattattgagatgtatatgcctccttggtcctttccagttaaaggttaaaaaaaactatattgggttttttctatcctgacggaatttttctctgacaagctagtcctggcggaatttatttttctgacattgacacgtcatgtacaactttcctgacgtgttttttttatcctgacggtttttggccgtcataatttaagtaatctagtttctggtagtgtgttcatctttcttcttatcataattatgaaagaaaagaaactggatatcacaagatttcagtgttattaattgtaggaatttatcatctagttctcattagtgttttttacccaaaaatatatatacctgcaatttaatataacaaaagatcctggaaactaaaacgacccatagtcaaattctaattaactatcaaaacatattttatatttctattatataatataaaatatcataatgtagctagaatcatttacaataacatggaacctatgcctaggctggccatgaatcacttccagcattagaattgtttttcctgaagcattagaattgtcacggagatgatactggaagaagggcaggagtcatctggttttatgatggagttagacgaggatacgctcagattagcagccattccgggcgaccttctcaacaaatcttgcttctactgggcactcagtacattgtgttagcctcttgtacgaaaggcaccatcaggccatggcaagattctcagttgctgatgccactcattcctaaacaggaactgtttatgctctcccatggggtgttcatcaagattgcgattgagaaaaatcatgtctctaaatttttgtgtgctcttgcccctctatcgttgttgcaccgcgtatattgtatccaaattgaagcggaactgagaacaatggaaggggtttataagtgaaacagtttaagggtgatcgacatgatgacgaggacgatagtaataaaaagaggtgtttcaagtatcatgcgtctaacatcttcacttgataaggacgagagtaataaaaaacagttatgtacatcagcctgctctcgaatttaagttttgcttttacatgtcgggtggacgattttatatattcatttgttacatggatggaatgactcagtacatttttcaccaatctttttgaaaacaattatataattaaagatacagttgtagaggcacaactgattttatgtgcttgctatggtatatggaggagcctagacatcgggcgtctgatggaggagtagaaaaatcgagcggtgatgtcagcaagatgcatgtgtgcaaaaccactttaaattattttttctcttaaattatttatccaaatcatgatccgattacaccattaaattcattttaattaaatcttcaaaacaagacaacatatggatatatttcgacgaaaaaaattttagcttattattgaattatttttaaatgttgcacgttgttccaccaagtatatcggaattgtttcactaagtagatcgaaaatgtttcgatcgtttaaatcgggtgttgtttcactttatataaaaacaatatttcagcaaatagcgaaagaatgtttcagttcactgcaatattagatctatatatagtgaaacattgtgattgcactagatgaaacatttttagtggaacaaaaaataaaacgaattcccttaattgagggttttcaaaataagtgggtgatttgttgcaacgtcctgcatggtggggacacgtgacagtatggcaggggagacgtggtggggccctacgggcgcgcgcccacgcgtcggggggtgccccattttcgctgcacccccccccctccgatcctaaggattatcgttggtatattttgctctatctaggggttgttgcctacactagctaatcccgggttgatcccaaagctgccactggtgtagcttgcacggttggagaataatatccgtttcggtttttgttaggcgatgtgataggcacggtgggtgccgccctagtgattgtgcgagggcggcatgtgcgtgtgtgagtctgtgaggtgtggtgtgtgttttgtcgagaattggggatcgtcagttggcacgagataaagacttggcagtgttaaatagctaggttttgctttgtggagtacccattatgaattctagagaaataatacagagaattgccccaaaagttctctccgcctttccattgaaaattaactctgtttttgctctctctgaattttgctattcactacagtgcagttaccagggttcttcctgtataggggtcaatgttttatagttctagcttcaatgggcaatagaacactctctgaataggtagaatgcagttatagagtttagcgaactacatgctgggcgaccttctccccatgttcaatcccagaaggttacactagcctattgtaattctgaattactgatgccactcattccaaagcgaggatattgtttatgttttcccatccaatggggatgttcatgaagactgcatttaaaaaaaaaatcatctcccaaaattgttcctctgccattttgcagccaaagggtatatttagccaaactgaaggtaactgaggacaatggaagggtttgatatatagcaaagttcagatctgatcatgacaagcatgagagtaataaaaggagtatcaaatactccctctatttgtaaatatttgtagctattaatttttttaacatgtttgaccgttcgtcttattcaaataattattaattattttttatcatttgatttactgttaaatatatttttatgtatacatatagttttatatatttcacaaaagttttttaataatacgaatggtcaaacatgtgcttaaaaaaatcaatagtgtcaaacatgtgcttaaaaaatcaatgtgcttaaaaaacggagggaatatatcagacagccacctaaccacacgtaacattgaatagcaatgaaatatatataacttttcattaaatacaataattaatcaggctcttgatcccactagccatatactttctccatctagtcttgatagttatatttccaaatctgaaaaatttattttttgatagtcatatttcaatccaacaacctatcattttaatgactttctcggaattaataaatgactcttcactattccacacaagattggctacataggtattgagaaatgtaaatattaatgaatcgcttgtttacgagaaatgactagtagtatgtttaaatggatgataagtagaattgcttatccttgttctgtgtactaagatgaaatatgactatcaaaaatagatggagggagtagtataggcacgtaattaattagtgtggtgttcagttcggttattcaatgctgtgacaaaatcacatgaaaatgggtaacttcgatttagcaattgttttgtttgattgctccgttatcagaaaccactatctggcttcaccacggcgtcaccacgtgattgatgttaccatgctgtccatctcctgtttttttctttccttgatcaatcctcttaatttgatttatcagaacatattacattttcttaatgaaattataatgactaccaaaaatgtcaactgctgtggataatcgatgtctggcatgcatgtgtgtgtctaaatctagctactcttatagcatttctcacaacccaataacaactatatcattcatgttacagattcgaatctggattacattcataacataattatctttacgttctgaatgttcttaactactttggagagatgcctaattcaactgaatgttacatacggcatttggccacattgcaacatgcagatcgaactgagtagtactccctccgtttcataatgtaagtcattttagtattgttcacgtttatatagatgttaataaatctaaacatttataatatgaacattgctagaatgacttacattataaaacggaggaagtatagaatttggcgcgaccgttcgggcaaccacacctcaatatataataaggacgcatagttactaatcacttcttagataatgaaaatggtttatatctctggtctctgctaggaggcacacagccaaagtcagtggataaggcacccccaatctgatgttaatttccagtctatagcctgcactgttggacaggagtacaagaccaggctgtgattttttttctaagacccatttgttgttgtagggacatttaactttttaccacattaaagatgtggtaattaaatttatcacttgatgtctatgacttgtaggtcccgtgacaaatcttttatcaccacttgtaatagtggtaaataattaattatttccatttctacctcatgaaaagaccgtactgtctgcaacgttcaaccggcctatgagcttttagcttcccactgtcctcccagataaactgccgtaccatggagctaccaaaagaatttgaggaccagggtgcgagttaaacagacgtcgctctgaccttgtgctcatttgggccttctcggagctcagatgatccatcgagaagtcatgctaagctgagtttatgttctcctgatactgctcatttctaatcatacaggaatcaaacatataccgatattgcagatcatgttcaatttcatcctataatagatgaagagggtctagtagaagttgggagaaagaggaatgctagaagagatgaagagggatatgcaatggtacagtagttgagaggggggggggagggggtattatattcatgtggagtagaggataggtgaaatatgtattgctattaataattttgcccccctctataagttttgcttttgaggacataacacagggggaaaaatgggattagttggacagccgttggaaggtggttatgcgagcccatccaaatctagtacaactgttaaataatgtttaaaacaatatttaactagtagcaattattctaacttttcattattttaactttatttgttcctcctccatctcaattttttctagcatatgttttcttcagccgacgcgacccttcactgctcagcaagtggtctttagtcccggttttttcttttgttcattgtttttactgcttgcatattgatttccccaaatcgagttgctccctacatcctcatatcatagattcacagataacatcacagattcacaccacagatcaaatacatcacaagtttacatattcacatcacaaattctcaaaaaaaatacatcacaaaatctcgaaaaattaaaaaaagactgaacttcttcctccgtctaccgcacggccgtgctgacgtcgttgagccgttgtcgctccaccgccgcacagcctcccatcccgctgcctcccctcccgccggatctagcataggggagggcgagaccgcggcttctgccgctcggccgccgctgccacttctcgagagagcgagagagagagagagttagagagaggcgaggtgagagagagagagatagaggcaagagaggataaggacgtgtagcacatgtgggagatcgagggaggcgtggaaaagaaaggataagcacatgggagagagatatttagtcccggttggtgatatcaacaaggactaaagatcgttagggacctgacatagcctgacagttattgtattgggacacccgtgactaaagatcataaagtgccattgggcttttgaaccaggactaaagctgatctttagtgctggttcctatttgaaaccagactaatgtgatttttacatgatccggcaaaagatcacttgtccaggagtacttcttgctcactcctcccatcctctttcctccacatcaactgacatgctatggactagcacactaattaccgttgtacatgctgtaggaatagtatatttcaataaaaaaaataataggaatagcatagtacggcaccacatgccctgatgttaatataattttatatgaaatacaatattttgtgataaagttaagtagcctcgtgttgaaacatcggtatatatatatggcggagatgaccgatgagctaaatgtatgcaatgcagatttttcaccaaagatcataaccaaactagcccccaaggtacatagaacaattattcctaggtcaatgatagacaatttgtagggttctcctaccaaaatactcaaatctgttttgaaatacaaggatgacaagattatttagcaaatattgagattaagaaaaaaaagtctttctctcagcaaatatggaatagatggggtaaaataggaagaaattaaagtatatgagatgtgattgaatactatgaataatgtgctaaaaattattatattttgttatattttggaacggatagatggagcaaactcaaaacaagatagacagcggtgcggttcataattaatatggatgcatatgcgtcttctacattaaggtatttaattattggagatacaatattggattaagacgagctaatgctccctccatttcaaataaattacttgcgatgtgggtttgccggttaaacattaacatcattttcttgaatttgtatagtttgataagatgtgaattacatattgcgaaagtatttttcatgtgaatctaaagaaatttagtatgatgttaaactatataagttgttggatgatggttcgcaacttgcaagcagcttgcgtgcaacctccaacaccagcataggcaagacaagcatgcagaccaccaacaccaactggatccacgtctctgtgggccatccgatgaagccaggcccatgtccatgttattgtgtgaggataagtatgttagacctccctcacctcttgtccctgcttgaattgcttccctcaaccacaataccagatctaacgcatcttctatatttgaaaatcagagcaaatcgagtccctcggttgtttgaatagcagttttatcctaactggtgctcgtgggacccacatatcagtaagaaaaaataacaaaaataacaaccccacttgttagtcataatctttttttttctctttttactcacctctctcttttctagggatggcagtcgggtacgacgggcacgggtagtgactacccatatccatgcccgcgaggtaattcatgcccgcgggtatacccgttactatatgacgagcaaggaacactacccatgcccgttgcccacaggcgccatgtgcccacgggcatgcccgtttacccgtcacaaactcacagttcaacatttcaaccacaaatctccacaagcagagagacattatcacaatttaaagaaaggg

SEQ ID NO: 17365 - DNA, 25412 bp, Oryza sativa
  unsure (1)..(25412): unsure at all n locations
atatccatgcccgcgaggtaattcatgcccgcgggtatacccgttactatatgcgagcaaggaacactacccatgcccgttgcccacaggcgccatgtgcccacgggcatgcccgtttacccgtcacaaactcacagttcaacatttcaaccacaaatctccacaagcagagagacattatcacaatttaaagaaagggtacagttgtaccaagttcaacaatacaagcattacaagttcatcaatactagatggtggcatttatactaatttgactaagggaccacatgtcagttggtttttgcgggtaaacgagcgaagcaggcatgagtagcgactacctatgcccgtgctcgtatgcccgttaggtataggttttgacccaataaaaaacccatgggtactaaatggagaacaaacccaactctattaggatttttatccacgggtaaacggacaaacgggttaaactgccatccctactcttttccatctatcgtgcatgccaggcagcaggagcccgcgatcaaagagctcctccccgtgcgtgctgcggccggtgactcctccccgcgcgcagccgcctagcgatctcctggccgtgcaatgccattcggagcttctgcaccgacaccgctgccgctgcctttttcctgctaattgctattgctcctgctagttgatgtagagcacgccgtatcggactcgtagcccctccgcctgcttcgccatctccagctactgcagtgacggcgagatcgagagggagagcccctggccatcctccactgccaccgttgaacgctgcacaggcaccgccgaatgcatggaacgcttcgtggtgctgccatgctagtggatagccgactaggcgtccgacagcggcaccaacgtcgacaaccgaaaccgatcaatactgatgtgggatcatcgagaatgggcgcatcgctgcggccaggtcagtggcgaggccctctatggcgcctccttgttgctccggtgacaacgtctcacctaacgaacacatgctagccctatagatggccgtaaggcccgcccggcacagcccggcctaggcacggcccaccggccatcgggccagcacggcccagtcggcacttcgtgccgggccgtgccagcccatgggctgcacctttggcctaggcacagcccaccagcagtcgaaccgtgccgtgccggcccgaaagcacgggtggcccatcgtgtcttttttaaataagtctatttttcttccctcctcgttgggttgtgacatatctatagctaaaatagtctattttttctctctcctctttgggctgacatatatatatatatatatatatatatatataaaataagtctatttcacgtccttattctctgaaccatggcatataatatgtctatgtttgctccctattctttgtgtgtcgggcctagcctgctggcccatcgtgccgtgccagcccgatcatgccgtgtcgtgcttggaccgggccaaaataccataccgtgggccggccgttgagcttcgggccttatggccatctagagctagccccaccgagcaccaacccagtctggccgactgcgccgccgcggaaccaacctccggccaatctagcgacccctcttcttcttccgcagctacctgagcttatcattaccagcgaccgcgcagcttcatcagaccagaaaaaaagaaacaactccccttaaaaaccgaataatccaaccacaagaacacaacaacttgatcgaattggaggtactaccaccactgctcctgcctcctgatgctgctgattgcataagaaaaatttctacttttttaggttttttttattttctaattaagttatttaagggtgcacgttgatcgacccctgaacccacttgcacctttaaagttagtattatggattcatgatgcagaagtctaataatttatttatcttttaccaattttcaggtttttcttgttttttctcactcaattactacatgcatatggattaatcctatgaccacactacaagagaatggatttttcgtgactgcccctcactctcacgaaaagtcaaaagcctgtcacaaagatctttggttaccacatactgtcacaaaatgtcagtcacgcttgattagtcacgaaatctaatatttggtgaggggaagcagtcacaagctgttaagtgactgtcaagcagtcacgaaaaagcaattcccccaatttgcatgttttgaccatttttctaacagttttgattaaccgttgggaatactttttcgtgaaggtggtagctgtcacagaacatcaatttcttgacagacttttgccattaggaaatacctttcgtgactgggtggctgtcacgagacacgcgatgtgcacgtaattaatatgaaaattcatgtaaatcaatctcatatgctacaaagtgagttcagatataatacaacaaaatcacttattttacccaagtccaaattcaaactcacaaaagcatatattagcattgaacatcgtgagtccttacataattcatagaaaaacaatatttaattatgcactacaaatttctacacaagtcttgtatcagtccaacaattcttgaagtgacaagcccaatataatgccatagaatagagggaagcagccttcggtggccactcataaagcaagctccacgtgaaaaaaggaagtcttctgagctttccataaaagaacaattctacaattatctacaagatatgatataatatattaggaaagtttcttcaaaacaaattagtacatcaaagtgaatcatcaaattgagttgaactgtatcactggacttgaaattgttgccttaaaattcaatgaatgtcacttgaagattacagcaagctacaatttagttattagctaatattattactgaatagctccaaattcaaatgaaatcactagtcaacaccgtaaaaaagcctataaaaagcttgaatcagattaatcacatgaggtaatcaagtagatgaatcatcggtaaattgctcttatcatgcataccgattaaaacactgtactggaatgaagtcattagagccatgcaaaattacaatagttttcttggacctttagcaaatgctccaatatttttgccatgtttaggttcaataatgaatccaagataaaaagaacacacgccaggcagctgtcagataactggataagcacatttctgtgcagagtttcagcatctaagataaaatgaatacatgtataccatgtagcttcagatatctaggaaaaataatttctagatcaaagaacgcaagcatgccatgtagcttcagataacaagggagcacatttgtatgtgttaagtttcaggacatctttaagaaacagagacaatttccttaaatcttgcaagccattaggtaccttcagtatgttctagtttcttaaatacaaagctggtcattttggcataagatgactagtatcaaatcaattatgaccaattaatggtagcatataaatgagtatgataaatataaaaatgactcaccaaaattctagttctgatgcatcaaaaacagcagtcttcctctgtgtcccattcttcagactgattagaacagtctacattagatttaaaagccatctttagaaatgaaaggaaaacatattaaagatatgacacaacaagtaattaaccatagtatttttggaaaagcgaaaagatattacttccaaggcatattaaagatgtcctgttccactatttactagcaacaaatcattaaaaccacattatgcgttgcacaggcagtaaactatatagaacttaagaatggactgcagaagttcagaattaatctaattcccacaatgcattacatctagtagctgtgtaggcacaatggtaactgcatctataagctatccaactcctcctaaacatctgcatagagttagacagtgacaacaacacttgcatgatagccggtnacaagaaaagaacagaaaataattcagaaaacacttgcatggtgacaaagtaaatgaaaagaacaaatgattcttcagttttaccttgtggatgttcaacagatacttcaggtgatgtcattgatctgcagtaaactcgctgtaggatcctataaagtgtaaaattagaagaatttagaactctaacaaacaatatggaattttaactaaaagttagctgattttttcaaaagtacacaacactgacaagtatacgagaaaaatgaagtataatttcagtacacctgcaagtagtagaacaatatttgtgcattatctacatatacaggaaagggaacacaaatgtttataattgagatgaacattaaacaacttgccttaatattttactatgaattaaaatccaattcagaggatgcaaacacatgaaaaatgcagcttgtaaaatatctcactgttgtaaggaaccaaaaagctagtgtacaaaaaccaaggtcagtaaactatccataattgtttatcataaattatcctaataccactatctaatgaaatctgagaatttttgcatccatctaataaaagcattgtgacaaattactggtttaaaagcctcagacataaattcaaccaaaaatcgctgcattggcatttcatcgaacacctatgtgtcaccctatggaaaaaacagagggaactatttctggtggaaggattgagagcatagaggagaaggcaggtcgctggagtgtagagtagcgatcgcgcacctcacggcgagaagagcaatggtgacgcgacccacggacaagacacggggacggcggcgaaacccaccgtgaggagagcagcggcggcacgcccgtcagagaggagagcaagggaggcaagaccaacggtgaggtgagaatgtacgggctccttcgccggcatcactaccggcgacgaatcgacgagcagagttgcggcgtcgaggtggaggcgtggagctcactagggcaagagccatggggaacgagaagagcactctgtttttagtggttcacaatttcagacagaggcagagcagcttggcccatttaagtccatcacacagtatggtgagggctttatattactgcaccgtcaccaactctataactcggtgactggctgctcttcctagtcacgaaacacccaatttcgtgatggtgttctaatgcctgtcatgatatgtcttcttggtgactgtgtttacatcgccatcacgaaatctgtggggcagtcacaaaaaaatgattttccagtagtgccaggtcagccactttattaacacggttaagaaaaatgatagaagctatgataaataaataattaatctaataatattgcatgacaaaagataggcgaaatgataaactacactaactagatgcataggagtatatagataaatgtgatttcgtaggttccagccgtccgacaaattgaagctagaacgaacgatgaatgttgtgtaacataggggcttgcccaattagatccaaaggtatcattgtatacctaaggttttttataaaaaaaattagtatatgcgatactccctccgtcccataaaaaaccaatctactactggatatgactcattctagtactacgaatctgaacatatctctgtccagattcactgaactagaatatgtcacatctagttatagattcgtttttttaagacggagggagtatgtgattcgtttgtgtatgaaaaaaaagcctattcaaccaaagaagcaaataaatccatcttcttatgccggccggccgggctccatcctctcttctctaattaaccaatccgcacaagtttgatgatctactttggcaatttgcacatgccaagtattagactttcagttgtaaaaaaaatacggctatggattttgaatcggttttgcgatctagttgtcgaagggcaacctcaaaatcctaggtcggctccactgtatcatagtataaatttaagtttgtgaaatgctaacattatttatgaagagttccttctattttctgcaaaacaaatataatttttcatggaagtttaaacctgacacatttcacaaatattttatttctactagaaaaaatgcacgtgcgttgcaacgggtgaaggctattttaattttattattgttaaatggtttaactaaggtgaaattcattgtggcaattcgctttgatgtattttttttaaatcatgagctgtggttaggagtctgatcgttacaaataagcatacgagtttttttaaagagatttcttatacgactccttctgtattttcaaaaacgaacgaatttaaaaactgactcaaatatggacatgtattttcaaaagcgaacgaacttaaaaaccgactcatacacggatgacgtaccaaagtaccggtaaaaatatctttaatttttataacagtagagatagagatttcgaatattgcgaattccacaaaaaaaaattgtcttattcattttctcctctaattgggccaaagtcctaaaccagggcaatcctgtttcttgcctatctcggtccaggcaaccaaactccggctcaattccggcgtaggatggcccactcgccagtgtactgcgctggctagcttgcacttagcttgggatgatattcctttgaatggaaaaccatatttgcctcttgcttcaagttaacaccatcatgtacatttttatataccctctcagtcaaaaaaaaaatcaatctaaaaaagaatgtgacctctcatagtataacaaatcttaccagagaagtcttatccctttcttggttgagaattttttgtcacggagaaagttaactagtgaagacaaaataatactccttgcatgactgaccaacgtcaaatatagaaaagggcgaggattcgacggacaggacgaattatatatatcaccatttaattaccgcaacacatacacaaacacacacgcacattaattaatgccactacaagattaccagctgcgaggatcaaactagcgagtacagtagcctccaagtgtgattcactgactgattaattaatcaactagatcatagagagagagagagagagtgatgactaattaactaattaatgagagggagggacggcgcgcagacgacgcacgcgacggacgcggcgtcgtcctcctcgctgaagcagctccgcttgaaccgcgacgccttccccttgttgcacggcagccgcaccagcgctgccgacgcctccttcgtctgctgctgcggcctccctgatcccggcattgacagctgccgccgcagccgccgccgcgcgccgtccgccgccgcccggtgaaccatctccgatgatcagctgaggttgagagaattagttgagagtgatcgagagaggggatcggcttggtcgagctagtgaggtgtgggggagccatggcgatgtgttgcaagcggctatttatagagggagacggagattgtttgcccttgggtcacgaacgatattacgcatctgccatcgttaacggattggctttaattcgaattccatttggaagctactgccggcaagagagggaacgaaatagcattcaaaaaaaaaagaaagaaaacaatgggacatggtactactgcttgctagctagaaaaagaaagatgagagatgagatgcgacgtgaggattccggattgtcgttgggcgtactgaatgatttgaatccacatggaggcaacgcaagctaagctagcagagacatggcgccgttacgtggaggaagagaacatggtagggcatatgcacagagcgagcggcaacagtagtagttgatgaaccgaccggccgggaccaatgggcgatcgatcgatcgatcgcagtggatcggctgctcgtcttgccggaattttgtcgtacgtctgccaccatccgttcaatcgatcgatcgaggacgggttttgttatgttaatacaactttattacttttggcttcttttgggggtaagatttttgaacttttggtatggagggataatactttaggtctctttaattcgtaggatagaaaaagaacagaacctgaagtagtttgattctttcatcctgcgggaataaaaacacatgaaaagataaaaggtacccaagctttgagccggcaagcctcgcctccaccttgcgggggcagctgatgggcaactagccgcgtgaggatgcgcgtcagttcgaccccctctagcctctcctctctctcatctctatacgtatatatgtatgtataaacttataaagtgtgtgtgtgtatatatatatataggtaaagtatatatatgtaaagtatatatttttttatgcatatactcatttgatgtatacaagatatatacacgtatatacaaaatttatacgtacaattttttttaaaaaaagtcatgtatataaactttgtatatttatgtatacatattagaaaaacaaacaaaaagaaaaaacgagaaaaactaaaaaataatcagaaaaaacaacgaagaaactagagaaaactgacacgtgttgccttcaacgcaaccccccctcccccctctccgcgcgtgccgcatggctgtgccgtgtaggcgggagggcgcatgactgaccgctaattggcggttttgctgccttgcgccgccggcagtcggctcacactactttatatctctatcactgttggtttgttggatactaatatgtgacccctggtgttctcattccatctccctctgttttttttcccacaagaagcgcaaaggggcacacagtttaccgccaaacacatgaaaacggcgcgaacgacagacctcttccttattttcatgtaagggatataaccctaaggaatgttttctttcatttcctacgaatcaaaggcatacatatgaaaaaaaatccgtaggattgtgaatcctaaaaaaccctataccaatcctttgaatcagaggatcccttactccgcatgtacagaagggttgacacattttcttaagatactccgtctgttctaaattactcaatgttctagatttgttctatgtcagatctttgtatctccgatcttcaatttttagaaatttatgtagtttaatttcagaaataatttcataatatctaattgacggaatgttaaactacataaaattttaaaatttgacggcgtaatatagaaatgtttgatttatgataaagctagaacgacaactaatctagtaaaatggagggatcagaagtattgttgtttcccgcactgagttatttgcacatggtactgcaaaaccatatcgctagctaatagcccttacaggaaggcgaattctcagagcaagaaatttatatcaaaatcattttgcctagtcaagtaataacctttgtcgagaataatgatagttattttacatcgtgcatttgttagaaaatatatatttatatgtattattgagctagatcactcagtctaccaatcaatgttacaattaccatgctatgttggcacgcacaaattaatttacccgggagctgaaatttgaaagttttttttttctaattttctaaaaaaaggaaaaatgtttaaaatttttaaatgaaatagttcgtgccgtgcagtactaaaaaccatttaccgtgcggtccgaaagaggtttttgcgtgcggcatggcaacccgcatgcagcaaaaggtcagcgaaaatcactattttggcgtgcgggtggcgcaccctgcacgcaaaattaaaaaaccgaaaaaaattaaatccaaaaaatacgaaaccctaaccttagaagccgacaccgacgccctcgtcgtcgctgtcgccggattggccggcaccgccacacctccccacagaacgccggccaccgcgccagcccgcgcgcgagcctgcccgtcagccgccaccgacgagccggacgtccctgccgccggatccacgctaatcctggcggaggacggcccccgccgccaaatccgggcgggggcctccgtctccaccggatccaggttgggaccggtcaccatcaccttccacatgcggccaccgtcgcgcgcctgccaccgcgcgcatgccgtctgctgagatgctctcgagcccgccgccatgcctgctccagaggcagtggcaccgagccggccacctcccaccctccccccccgcgctcgatcggaggagaggagaggagagcacacgaagagaggagagaaagagagagaggagtgaaaataaaaggaaaggaagagagaggaggtgaaaattttgaagcgagtgagagggaaaagagagagaggggtatttttgcgtgtggcctacttaagaggttcgcctgcaaaaataggctcatttgtgcgtgtggtgaacttaagaggtccgcacgcggaaatcgattattctgtgcggtcctcttaagaaaccgcacacaaaaatagaggatgatttttgcagacgcgaccagttatgatccatatgcaatctaaagaggtcattgtatagaaaactcgtttatttgaagtagtgatctgtagactgctttggagtgcgggagtaggatgttcatcagtaccaatttttatttctcataagtttgagaaatttgtagcgtttcaaaggaggccagatgtacaattgaatctatctacaaaacttttaaagctttctacaaaacttttagggcgccaaaagaattgtggatttatttaatttactgaactttaaccatgacaatggctagcattcttcagttgactctgcatatcccaccatatctatccagcacatgcaacttctgaatgccgaggacacgtggcaacgcacacatggtagagtacacactaattagccagctggtcttatatatagaatgtcttcccatccagtgacagacatataactgactatacataactaactagctagctgagaccatctatcaaccccataaacagatccaaactaaatcatgaagaattcagcacaagatcacattgcaataggtgacaaaagaccagatgatgggaggcacatggctgatggctgtcatattacatggctaggacaagccatgtggctctgttgattaggattaataaggacaacagaaacttatgagtactctagctaccttgtaatcattttatttcaaatattctttgtgtgtgaacagcaaataaaatttgtatggactatcttgggtgtactgtactccgatactttcatgattagctaattcataaactcatatcatgtactacagtaaatcaaatattggctttcgaattgtaactgaaggctatgttgaaattttttgaaattgagagaacaccctgtaaccccttctcctctcactccctttatcttcaccccatatatttatattgttctgcttcttttaaatattctgtctttttttattacaatacaaacagcaggggctccctgctgtgtttctctaaaaaaaaaattgagcatatatcaatatactactaactaggtgacaaaattaagcgcatgctttaataaaacattggcaatatatttacatatacttccctggtaaatacaagaaaatgtctatatttggttcacaaatggttctcacgtggtttatttttctttctgcaactctagtgttggatatataattaatgtgttctctaatctattaaaatcatctactccctccttgctataatataagggattatattttattttaaaagttaaaaaaagcaaaaggacggggcatagtaaaggttatggtggtgaaataaagtagtagaaaacttgtaggtggaaggataaaccagtaagaaagtaatgggtaggaaggataaactagtaaaaaagtgatgggtacaataaaccagaaaactcgtaggttaagtattgtattggaattacaaaaactcttatattatgagataaatttgaagagtataatttattatattataggtgaaaagggagtctatatgtagcatagagctggttgtggttaagtgggtggttttcagtgatgtggctgctacatattcttaagcccactcatcatattagttttctaagcgacataagcgtagctaaactggttagatttcttattgtggaaccagttcacccgggttcaaatactagattttacacgggtactcgtatttatggctaattattctttcagtcatagacgatgtacacctcgacagcgaggcatccatggtgacttcgtcaatctcaaaatatactggtataatctttcggaggcgctcataggaataggatttacgtgtctacattcatatgggtgagtgtgcatgcgtcgtgggcgcttgcgtttatactgtgtttgtaaaaaataagattagctttctaaaatgcaacttaccccattctttttatcttattcattggattattgctgccgtgtgtgtctgcattcatatgggtgagtgtgcatgcatcacgtgttttaaagaaaatcagctttctaaaaatgcaatttaccccgttctttttagcttattcactggattatcgctgccgaggaggatttgttggtgtagtatgcttatcgcagcaaagcagataaggtttagcttctatgggtgtggtccaccaatacataccacacaagacacatacattgaagaacatggccggttgtctaacggcaagagcctcagtagggggccatgtatatgcattgcacttgttcctgacccaagatcatcaataattttgcattgatttggtcaaatctcctatggcatacctgagatgataattatggacgccgaatttcataaatatgtacataagacaggtcatctgatttgaaattaatggaaataattttgttttggcctagttagctttagtagtagtacatgccgataattaatttcaccgaaattaagttcacagtaaatggttcggttaacatatatatacaggaatcaggacagttggttcaattctgtcaaaatggaagcatatatctatggtggtttagtcgtggtcatgtaagactacgtactaccgaaattgttttcttaattaacgcatatatatatttatagccataatgaaaactacttcatccgttttcatccgtttcaggttataagatgttttaactttggttaaaatcaaactgctttaaatttgactaagtttagagacaaatatagtaatatttacattaccaaattagttttattaaattaataattaaatatatttttatactaaatttatcttaggtcaaaaatattactatttttttatagacttggttaaacttgaaatagtttgagtttgactaaagtcatcttgtaataacctgaaagagagggaggacgtactacagaaattgtcgagagaggtatcaaaagaagagctgtctctgctatatatgttcatgtatatattatgtacattactatagctcatttgttaggtgatctctggtacgatagtactgaataatgcatatgcccatgcatgggcttagaatggcacatgtatatatgctcgatcgtatactcacatggatgcttgaccagacaaaaacggtcatgatcaacaagacgtagagatagctgaacattcagcgatgatcaatgcatatctatagtcagcattattccctcttgttccttttgcatgactgccaaattaaaagagtattgcacatgtttaatttatttgaaattcctacacacatattaatgataatcaatggagaaacaaattaaagaaatctatctacttctaccaagtaatatactccctccgtctcaaaatataacaatatctagtactcaaaatttatacaaaaataacaacttctccacctatattctttttaaacaatcttccaccattcaaattccacacatattttctgatatccaccaatcacaacattcatacacatttaatttcacctattttttaagtacccgtattaactttagaaatctttatattttaggatggaggaagtaacaaattttggagtgagtaaaacttccaataataatacgtgtccacatgcttttttgtttttccttcaagtctgcaacaactatatcaggagtatcagctggagagctatagcaattcttgtcctgctccagatatctctgtttcaccacttccgattccagcttctgcaaattaatgcatctgatctcatccctgtttcacccaagcagagttagttggcatctctattatctggttatgttaattaagcaaagccaatcttttcacaaattgaaagatctttttgctcaatcgcgcgcctagatgcataatttggttaaaatgcttcttgcaggaactgtgttgctgaacggctcatacattttctaattgtattgtgtgtgtgtctatatatatatatatatatatatatatatatatatatatatatatatatatatatatatatatatataaacgaaaaagaggccatattcaatcaagcctgaaaaataggctattgaaaaatttactacttcaaaatttaaatacactaccttaaaatcctgagtcccactggtggaaaaaccctttgtagtcccggtttgtaaccccctttagtcccggtttccaaaccgggagtaccaatccgggactatagatcgctatctttagtcccgggtgaaataaccgggactaaagatcgatctttagtcccggttggtaacactaaccgggactaaagatggctcaaccacgtggccggctgagccatctactaaagatcgagctgaccctttttttttgcatggccctattgctgcatggtttatatatatatatatatatataaaccatgcatatatatgtttcaatacatatatatgcatacatatatatatattatatatatatatatatatgtataaatagttcagtacatatgtacatgcataatatatatgtatttatacataatatatatgttatgcaaatgcatatgtgtgtatatatatatatatatatatatgaccaaaatatatttacattatagaaaatgtgtacacatgcatatagaaacatatgtagtcatgtattaattacaatccattatatgtcctagctagctacgatttcgacgtagtagtagtactcgctgctagctcagaagctaaggaccggtgaattgtgtttccgtcgtagtagaattcacccttgggatcaaggatttcttcgttgatgaatcccatgagttgttcttgaaccgccgcgataaattccttgtgtgtggtcaggttatccctcgtgcgaataaactatatgaatgtatgaaattgattagtaattaaacaagaaatcgttacgtaataaaattttgaatttatttgtacttacatcgagctctcttgtggtgttgatttggtctgcaaggcagtggcaatactcacacacgtaatagccgcacaagttagttccctgcttttgctttgcgcactacaaataaatgacaaacaacgagagatctaattaatatacacttgtatgtatttgaatcggagaaatataaatgtagagcatgtgtactcacaggaaatttgaacttccgcctaagtctttctctccatttgccgtggaccaaatgacggaaccgataccaagccctacatggagtttaaagctatgatttgtagtagcaattaacataacaagattttcttaattaacagaggaacttatgacggtacctgtctataggttcgaaaaccttgtcaaacgtagactcttttttattcattgagtcatatacgttgacggtgcaggccgacaggtcgaagagtaaaagcacccagtggaatctgtaatgtgcgtgggatgcattacatatgaaacacttagcaagttcgtacgggaatgaaatttggtatgtaggaagacagtaaaattaaactaactctgtgttgtacggcaacagtatgaacgtcttgtaatgctgcgccttcaggagatggacgagattgtcctttgtttcttgtggatattggtcgagcattgcgacgtttactctccgagtgtcgatgaatccagtatcaaaaaccctccaccgtcgggccctttgaatctccattctacaacgataaaagggagtatattattttctatagtctacttatatacaaggacctaattaattaaaggagacgtatagtaagaaatctaactgaacgatatacttacaaaatccagcaactcataatagagacgtcgagggcgtccagctggtatagttcatagattcccttgaaattgatccagagaatgtcatctccttgcaagaactccgtgtccctgatcctcgctccgatcatctctctaccggtggcgctcatctccatgtacagctgatggaacttgtacatttgtgtgggtagggactgcagcagctcaagcttgacaagcggtttaccgagttcatacatgtatttctcttccgccttttcgattggtgcgactcctagcaattgatccgtagttagaccggtgtcagtaataaattgttctatcgtcatttctttaccagtcaccaacggctcgatctcctggtttggttgctctccaagctgagggactggtttggactttccagaagatgctttcttcagcgttcgctcatagtccgatagattgatggcctccttgacagatgcagacatacccctaaagaagttcctgacactggggtctataagaatcttcttttctggacttcgaggcttgaattgtctcttgacttctgatgcaacgtaagcgtcaagctcctcttgcgtgcaatcgtaccccgggtccttgttcttggcggcgtcaactttcgccttcttggtttcccttgtgtgggcaggcggtggagctgggggggcccttgactttgaaggtgccggaagaggagcttgcggaggagtaggtgtagaggcccgaggaggagtcggtgcaggatcctgaggaggagtcggtgctggcagatcatgaggaggagacggtgcaggatcctgaggaggagatggcggagccagaggagatggtgcacgagacgccgcttgtcgcccagggaggatgatgtaccgcctgcgccatagaataatggcatggcttgtgtctcgtagatgcgtctcaccgtctcctccagggtaatccagctcgaggtcctcgtacgcgccttcgaccaactcaacttcgaccttcgagtatcctgctggaatcggcctgcagtggtaagtacctgaagggtccgttaggatggccatgcccgacgccaccttcatgttgtgagagattatttattagtaatcaacatatataagcagcaactagcggaatggctaaatctaaaatatataaactacgagcttacctttattgataagttcttgtaaggaatatgcagctcacatggtgtccgctgagtgatgtcatcaacgagacaggtcgattcgtcctgtgtttgcatggcgtccatgctctgtgatcttacctgccccgttgaggcgcagctgctacggtttcctaacgggctcaccattgcaggaggaatggtcggctggggatcatgggaccgatgtgcggccatgcgttcatcaaccttccttgccccctcctcttgcatgctgagttcgtagctcgatacccggaactctagatctgcaatcttcgcctcggtatctctcttactcctcatccgactcctgtacgtgtggatgtcctccttgaaaccaatcttccaaggaatcacccctttccctcgtgttcgtcctgaatgctctggagtctgcagggcgagtgtcagctcgtccctatctctgtccggtcggaacgtgccctgagaggaggcttccactgcatctgttagtcgtcgtgcagcctctcgtatctgatcaccgaagaccagtgagccatcagctgggttgagcgttccaccgtgagcatagtaccagaacttcgatcgttccggccaattggcggttgcctgttcgatacccctctcaatcaagctagcctccatctcctcccacttcggcatcgcgacgctatagcctcctgaccccaagtggtgatggtacttcttcttggcggcattttctttgtttctttccatcatcgcctacccttgttcacctgtcttatatgcaacgaactcgtcccagtgatcccttagctttgggaatgtgtcaaagttcggtgtctgccccttcaggatatatttcttgtacagctctcccttgaagctctgaaactgttctgccattttcttcagagtccaccttatcactttgtcctctgtacccgcgggaagggtgaatgtctcgagcattgtggtccacagcatctctttctccgaatctgggacaaagctctcatgatctccgcatgcccttgttcttcgccagtacaccgtactgacaggcacgttatcccgcacaacccaaccgctgtgacgtacatagttcttcgtggcttcggccggggcactaggacgtccatcttcttccacttccgttatgatgtgccgaccctcaagcttcttcgctgcacctcgttgcccgcgtgccctcttctgtccaacagagggttgactaccactagcctcctcctcctggttcccctccacatccctttccacgtgcccctgctggttcccctccgcatccctctccacgttcccttcctcgttcaagtactggtttggatcctcgttcccctcttcttcattccagtactggctgcttccctccgcgattgtattgtataatatctgttcctcatcgcggtcagccatctgttgatactagaaacatctggtaagtcacgagacatttatgttttaacaatttaagtcatgtatgctaagtgtaaatgtcgtacattagaaccctacacaaccttacgtgctaagtctaattacaaatcgtgatataagctaagtctaggtgacgtatattatacaaccctagctagtaaataattatatactaagtctaattacaaataaaataatcttatattaaaactcaaataatattacatgctaagactaaaatagtcatgtatgctaagtgttccgtgcgtatatgctaagtctaattaagactacaatagtcaattgctaggagtcgcaccaattccgtactcaataattacatactaattctaattacaaataaagtaatcttatattaaaactcaaataatattacatgctaagactgaaagagtcatgtatactaagtgtaactgtcgtatatgctaagtctaattaagactaaaattgtaaattgctaggagtcgcaccaattccgtagtcaataattatatactaagtctaattacaaataaaataatcttatattaaaactcaaataatattacatgctaagactaaaatagtcatgtatgctaagtgtttcatgcgtatatgctaagtctaattaagactacaatagtcaattgctaggagtcgcaccaattccgtagtcaaaaattacatactaagtctaatttgcaataaaataatcttatattaaaactcaaataatattagaacactacacaatcttatatgctaagtataattacaagtctaatattcttaattgcattacaaatataacaatcatttatattattacgtcacttgcctgcacgaattccttctagggctagctcttccactcccagcttgagggacgactccgacaacacgtcttttctgcaagatacaaaaaatatgtattaggataaatgcaaagtaacatatatatattgcatttcacattcacgttcgttcgctcgttttcattcacgttcgttctcgttcacgttcgttgtcattctcgtcacgttaattcgttcgatcgttctcgttgtcgctctcgttcgttcgatcgttctcgttctcgttcacgttctcgcggcaacgtacgttaacgtgttcgttctcgttcatgtgttcgttaacggcggtgtgacggcatcgggccggcgcttggcatggcggcgtggtggcgacggcggcggcggcggcggtggcggcttggcgacggcggtggcagcgcggtgttgcatgccgcggcggcattgcgcggcggcgaagatgcggcatggcgtggcggcggtggcgttgcgcgcgcggcggcgaagtcggtggcgtggcgtgccagcgcctgcgtggcgtggcgtcggcgtggcgcggcgtcgtcgtggcgcggcgtctcgtggcgagcggcgcgacggagagagagatagagatcggagatcgatgaagggagaggcggcggcggctctcaccccagagatgcggcggcagcggaggagacggaggtggcggcgaggacgacgagctcgagacgacgtcgagatacggcggcgtcggcgcggggatttgccctaggcagtggcggcgaaaggagagaggccgagagagatcgatcggccgaaaatgttaactgttggtggagaagatgagggcgcgcatcaggaatatatatagccctcgatctttagtcccggttgatgagaacatccgggagtaaagatatctttactcccggttgttcccgctattttcaaattctttttaaacctggttagggttaagaaccgggactaaagattatagcactgcatattattttcgcttacatatgtgtttctaaaatagaagttaatgcattaacattatttaaagtacaaagattaatgtcaattacttcgaacaattatttttgtctgtaataaattaagtggataaatcgtaataagcaaatatatgacttaaaattaataaaaattccaataatcatatatacttagcatatgaatgatattattaaattggtaaaaactctaattaagatatgtatgtacatactgcatgatttaaaattaataaaaattgtaatcttcatatatacttagcgtaggaattatattaaattaaatgttaaaaagtctaattaacatatgtaaatgccacatgcatgatttaaaccttttaaaaattcgaatagtcatatataagtagcatatgaaagatagtaaattaaattgtgaaaaactctaattagcatatgaatgatagtaaattatgccatacatcaattgatttatatggataatcaatacatccaaaatagtttacatcgtgtacacaataattacggcattacattggcggtgacggttgaccgcacgtactttctcctcactattgttccctccttgtgatcgctgcatgagtaaggggtgtcttcatttgataggaggatgctagggtcaatcgtcaccgtgaaagggggttgcccatccaactgatcgtaatcctcgtcagtcttgtcctcaactccgatgatttttcttttgcctgggagaaccacttggcgcttaggctcgtcaggccctctgcccttctttcctttgctagacatgtccttcacgaaaaagacttgcgttacatcattggcaaggacaaaaggttcgtccgagtatccaatcttgttaaggtcaacagttgtcataccactgtcatcaatcattacgcctccaccagtcaacctaacccattggcaccggaacagaggaaccttgagaggaccatagtcaagttcccatatatcctcgatggcaccgtaatacgtggcagttgttccatcgtgtcccatggcatcgacacgaacagcgctgttttggttcgtgctcttcatgtcttgggctctcgtgtagaatgtgtacccattgatctcatatccctggaatgtcgcgattgacccagacggtcccctcgccaggaaggcaagttgttggttgatcgactcgttacccatgagatgttgtcgtagccacgtggggaaagtatcaatctgatgccgtgtaatccatgcatcggacttaccgatgttcctggcgcgaactagagccaagtgctcctcgatgcaaggagctaccaatgaagagtgttgcagaacagtgaaatgggctttacggaataaattgttgtctaccgtcattattgctttccttccgagagttccctttccccgtagtctcccttcatggcgtgattcaggtaccccgattgggcgaaggttttcgataaattctacgcaaaattcgatgacctcctctgtttcataacccttggcgatgcttgcctctggacgagcatggttacgaacatacttcttcagaacgcccatgtacctctcgaaaggaaacatgttgtgtaggtacacaggcccgagaatacagatctctttcacaaggtgacaaagcagatgcgtcattatattgaaaaatgaaggtggaaatatcaactcaaaactgacgagacattgcaccacttcattctgaagggcttctaatctatccggatcgatgaccttctacgaaattgcgttcatgaatgcacatagctttgttattgttgcccggacattgtctggaaggataccccttattacagctgttagcagttgtgtcatcaacacgtgacagtcatgagcgtacgtccaagaattcccaatatggtaactcccaaaatatagagttctttttccacatcgccgcgtgaccatcttcgctctctataggctggcttccaagcccctttccgaacactactttaagatctttaaccatagcaaacactgttttcccgctgcgatgtttaggcttcgtacggtggtcggccttatgttcgaagtgcttgcctttcttccgtaccgggtggtttgctgcaaggaatcgacgatgacccatgtatacaaccttcctacagtgcttaagatacgtactttctgtttcatccatacagtgagtgcaagccttgtaccccttgttggactgtccggataggttgctaagtgcaggccaatcgttgatggttacgaacagcagcgctcgtaggttaaactcctcctgtttgtcctcgtcccacacggggacaccttcttttttccacaactgtttaagatcttcgaccagtggtcttaggtacacatcgatgtcgttaccaggttgcttggggccttgaataataatcggcatcattatgtacttcctcttcatgcatagccaggggggaggttgtagatacacatcgtaccaggccaagtgctatggccgctgttcatctctccaaaaggattcatgccatccgtactcaaaccaaccggtatgtttcgtgcgtcctttccaaattctttaaattttctgtcgatgtttcgccactgcaaaccatcggcggggtgtctcagcatcccgtcctgttgacacttttcagcgtgccatcgcaacattaaagcattccccttgttcatgaacaaaggccttagccgtggtattatagggaaattccccatcaccttagcaggaattctcttctttggtagctgcccgtcaacttctcctggatcgtctcgtctaatcttgtatcgtagtgctttgcaaacagggcatgcttctaggttctcatactcctcaccgcgatataggatacaatcgttcggacatgcgtgaatcttatgaacttccagtcctaacgggcagactatcttcttagcctcgtacgttgtctcgggcaatttgtttccccccggaagaattttcttgatgagtttcaataaatcgccaaatgccttgtcactaaccccaatttttgccttccattgcaagaactccaaaatggtatccaactttttgtgcccctgctcccagcctggatacaacgaaattctgtgatcctccaacatcttgtccaatttatgggcctccttttcactttcgcagtcctccctggcgtcctgcaacatctgaccaagatcatccgcaacgtcgttaccatcagcagctatttcctcctcgcccgtttgattttcttcaaatccaacatactgagcaaagtccggaatattgtcgtcttccacttcatcttcttccatttcaacaccttgctctccgtgggatgtccaacaattatagcttggcatgaaccccgactcaaacaagtggaaatgaataatcctggatgtagaatactccttctgattcttacacttattgcatggacaacaaataaaacccctttgcctgttcgcttcggccactctcaaaaaatactgcatgccgtcaataaactctttggaccgccggtcagcgtacatccattgccgatccatctacatgagtcaaaaaaaaccgtacacaaataattattcttacaataatgacagtcatacaataattataagatatctttattcatacaaaaatcataaaatattacaccaaataattcttaaaaactatttttaaagttttaaactaattttaatgtgttttacttcttttaattttcattttagtttgttttctattatttaagattaactttcactagagttttccttctcaactattttataaaaccttgtttagcaaatgaactaaatttctatatattctttcttccccacacacattttctctctcatcaacttacaattaaattttggagacaaaaaaaagtgtgaaaaacataggtgcaaatgtagtatgacaaaaaaaacattggaggaataagttgcaaaccttttaggcacctccgatttgtatgtaatcaccaaaataaattcaatagaatttttggcatgacctcccctcttttttgaagaaattttgaagcttgctcgggcagctggaggaggaagaagacatatatataggggtgggacttttgtcccggttagtagcaccaaccggggctaaagatcaccaggatctttagccccggttggtaataccaactagggctaaagttacgatctttagtcccggaccgggactaaagatcccgggggggcctaacatgccctaacagcattcgaaccgggactaaagatgatctttagtcccggttggtgttaccaaccaggactaaagatcaaatatgcccgttacccttttgaaccgggactaaagatcatctttaaccctggtttttattgcatccgggactattgtggaaatcggccgaccgacgaaagatggtttctccaccagtgtccgcaccatgtaacacgtagcaaaatcaccactgcgcacaggttaattaatttcttggcaactagcttctcaattcgaaggcgaaatgagccatctatatatgagacgatgacggcatacaatgtatttaagtgtttattaggtttcggtgcatggaaagctatcaaattgaatcagttcttaatgtccatcaattgatttttttttcgataatggaatactccatcaattgagttattagttcatagaaaacatacaaaacgacgtacgtcgtcggcat

SEQ ID NO: 17366 - DNA, 3977 bp, Oryza sativa
cacgtagcaaaatcaccactgcgcacaggttaattaatttcttggcaactagcttctcaattcgaaggcgaaatgagccatctatatatgagacgatgacggcatacaatgtatttaagtgtttattaggtttcggtgcatggaaagctatcaaattgaatcagttcttaatgtccatcaattgatttttttttcgataatggaatactccatcaattgagttattagttcatagttttcatacaaaacgacgtacgtcgtcggcatgtaacctttatgagtgaaaatatggtattatgtacgtcatgaaacatatttccatgttgtttcttagtgcttcatgtgaatacaaacaatcaaatatatgcattaaaaattgtatcgatatcaccctaaagaacaaacaaaaaagaataatttgaagctgattttaattaaattctaaattttgattttataattaatttacagggccggattttcttggtcgcattcatcgcaaactcttttcatgatcgttgctaattaagatgataactaaaaaccaatctaaaatatatcgttcttaaaatccattctaaatttattaggctatagtcctaagttgtgctagctagtcagcaagttcatgcacttcactgccagttagctaattagctggatgcattgcaggcaggcaggcatgaattggcatgttgccgacaacggcaatgtatcgacggcattccacatcacacatttgatcagctcccgccactaattaaattaagctactaatagctgcatgcatgcacagtaaatgttcatgttgaacctaacacagtcaagtactgcacgtccatctgaaatggacatatcataaggtacaatttaatgatcatgcatgcatgcatgtaccctgtgtactggctcctcctgagtctgcggcaatatatgcatacatggaatgacagagaattgacctcgagaaaaatggggtgatatacagggaagcagaccacaagggatgttaattagtaagatgaatgtcgacacaatatgtacttgaaattagagcagtctcaagtgcaagatactagtaccaattactccactagagaaatggtcatctgtgtaagttacagtccaacaagaacatgacggttcagtcacccgttgcagtcaattgatcacgtactgatgatgactagtcgcatctctgactgttcatatctattgaaccatcgaaggttgtgtttagttcagcgcaaagtttggattttggttgaaattaaagatgatgtgactgaaaagttgtgtgtgtatgacaggttgatgtgatggaaaatgactgaagtttggatccaaactttggatctaaacacagccaaaatgtagtaaaaacaaatataataattaaataacttgcacgggaccagtgctcgtcatggttgtcgtcaatcgtcacccgcctcgtccaagtagccattgccacggagaggcgaaacggctacagtgcatccacgaccgacccctcaagtgccttctaccacgctatttcattccacctccaaaaaaaactgagccattgagcatccaactcaggtacagggaacaacaacttaaggtgtgtttggttgggtggataaatctggatgggagatggttctcatcgtcgtcgcactgcttcatgctgctactccacctccttgtgcctatcaccatacccgtctcagtcacaaaggattactcacaaagaggggaagccgttgagccacctagctagatccaggcgtcgtgaggtcatgggtagttagatcaggtgaccctgatcttggggaagatctgacacccctcgaggctactgcgatcgtatctagagggagcatgagctccacaggggggtggcggtgatggtgcttaggaggtggagggggaggcaccggtcgtcctttgtagagcgagaaagatgtgtcgccaaaagcctggaggggaggcactagattcacctacccagagttagggcaactggatctggtgtctctagcatcctgtgtcccctcatcatgttgtcgagaggctcacactattgcgagctacgtggaggacccgagcttcttgttgggccttatgtcgagccttgcatcatcggacggatgaaccacctggccctcgtgtcatcgcacctttgtgtggtctccactctctcgattgaggtggagaggataagggggtgaaagataggagctgagaagacgaccgagtcttctatcaagaggagccatgtaccctagagtctgggatacaaccaaattatggttatccactactacagaattgattttttctggatgatatcccctttagattgcatgtggaccataactgctcccgcctgcaaaaatcgctccatcatgatcagttcaaggcatgcggccacttaagagacctgcttaggaaaatagtcttattttcccaggtaggcctcttaaatgaccgcatactgaagtacaacttcgcaaacggacttcttaaaagtctgacctccctcctctcttttctcttagcatcttcaaaatttttcaagtctttatccttatctcctaccttctctctctcacctctcatttctccacaacctcctctttctctccccgctcatttcccccccccctctctcccacttcctccaaatgcagcccagcatcaagagcaccagctggcccgggtgcgagacagccatggggagcggcggagcaaactcgacgggtccccatgagcaggacgcaacaagggagccgcgaggcatggagcaaggctccagttaccaggtgaccactagccatgactcaggtaggcgacggtgacgacggcagcagtagggagctcgtggtgggagcgacgccagcgagcggatccgccgtcattgccctctggagcaacaccggcatgcagatttgacagcctccatcctcaggaatagcggcggtgggattaggaggcgggagcaagcaggcatgacgacggtggcaatggcggtgacgacgttagtggcagttctgacgacgatgacaagctagggtttcggtgtttttttgggatttttatttttttccaccaaaattattttttttcacgcggtcggtataggtgaccgcatgcgaaaatcctgtttttcatgtgattaggctgcccgcatggaacaatattaattttcacatacacctaggtgcaggcgggccgtctagctacatgtagaaaccggttttggctgtcttgaaaaatgatttttgtactagcgatctatataatgattttggaacatagacccatcatgtagatgatgcaaatcatcgatctataacggttcatgaagaatgccgacccatttgaaatgactaatcacctgtaatatggtttatacttacgaggccttaagatgtggtgcatgataataagggagatacattttttaaactgtacgtaatgaactaccctaaccatgtgtctagaacgaatatgtgcatcacactggtgattaattagtcatcttgatcaacttttagcaaagcacaaatttatataaagtacactcctgtgctaactaaatatagcatattatcgtgcatgttactgtcgctacatgtgcatatatgcatgtacagcactagctaggaagaaatttatgaatttcaacttaatgattggcagcaggtacgcttgggcacatgagaattaatcatgaattggtcctattaaattaatttcgttgtgtggtcgtttggaggtctatgtcacaaatctaatttggaagtaagtcgacacatggattcaagggactctcccaaagaaagcgagatttcctttggaatatatatcatatgacatgcatggattatcaaaattaattatgggtttattgaatttattgacaagagcctatattgtccctctagttcgaccttccactgtcctttctctctcaagcaagtaggatc

SEQ ID NO: 17367 - DNA, 2185 bp, Oryza sativa
cgggcataaatagaagcccgacacccataagagtcatcggtgacgggctccaaagaaggcccgattgagatggccttaatgcccgtcaccgatgactcttataggtgtcgggcttctatttatgcccgttagagattagtgtgcgcccgttagagatgacatttttttttggcccgattgagatatactttgcacactatatatactccagcagtccgttgtctgtagtttatcccgctcttcactattttggtgggaggtttaagggggcgaatttttgtattttttttgcaaccaaaaacaggaaagtcataaaagtaagtaaaagagtactaaacatttcctattaatttagtagtacttatgttatgagatgttaactaatattttgttcattgttcagtgatggatagaagttggatgtacacgactggcttgaggtgtcagtacaaagagtatagagatggcgtattaagttttatgaaagccgcagaggaggataggataagaagaaccgacaagtacatgtgttgtccatgtagcgattgcaggaaagagattttgtgggaagatgaaaaggaagtacacgctcacttgatacgccggggattcatggagagatacacatgttgggtgatgcatggagagcaagatctgggtactgatggtgcagctgcagacggaagtggtgcagacagtcatgaagaaggagatgaagaagagcatgacatgtttgtcccatctccattgggcggtgaaatggttgatgtggaccgtgatatgctgcaagacatgttacgtgacgttgatgacccagctatgaatgagagagattccatgaagttcagcaggttggtcagtgactcggagactcctctatacgcaggatgcaagccaaagcacaccaaattatcagcaacattagacctaatgaagttgaaggctagtagtggatggtcagacgagttttacagaacttttgggaatactgaaggacatgcttccttacttaggagaacacattgcccgagacgacatattgcatattgtaccacaagcaatacgcggacttagatgcttgtcctgtctgcaaggcttctcgatacaagcgaaagaagagcgcaggcgagggaaagaagttaaagcggggtggtccggcgaaggttgtgtggtatctaccaatcattgatcgtttcaagagaatatttgccaaccccaatgaagcaaagttagtacgttggcatgccacagagagaaggaatgacggtttgctaagacaccctgcggattcgattcaatggaggaatatcgatcgaaagcacaaagactttgctgccgaccccagaaacatgaggatatgtttgtgtacagatggcatgaatcctttcagagacatgagtagttctcacagcacttggccagttctcattgcgaactttaacctcccgccatggttgtgcttaaaagaaaatatattatgttgtgcttgttaatccaaggtccgagacaacccggcaatgacatcgatgtgttcttggagcctgttatcgatgaccttgagattctgtggaaagagagtgtggaaacttgggatgcatatggtcaggagaatttcacactacgagttctattattctgcaccattaatgattatcccgcgctgggtaatctttctggacaaaccgtgaaaggaaagaaggcatgctctgactgtatggaacatacacgcagtaggtggctgaagaaatcaagaaaaatggtttacatgggtcataggagatggctccccctacggcacgtctttagaagaaagaagaaaattttcaatggtaagaaagaacttgggtctgcccctgcagatttgtctagagatcaggtacacgatatggtgaaggacattactaatgagtttgggaagaaaagaaaacgtagcagggaggacaagaagaggatgtggaagaaaaaatccatattttggcggctaccttattgggaagatcttgaggtccgtcattgcattgatctgatgcacgtagagaagaatgtgtgcgatagcttgctggggctattgttaatatgcctggcaagacaaaggatgggttgaatgtgcgtctcgatctacaggagatgaacattcgcagtgaacttcagcctgttacagatgagaagacgggaagagtgtacc

SEQ ID NO: 17368 - DNA, 705 bp, Oryza sativa
agcgcacgctcatctgaatggttagaagacatgaaagatgaaatgaaatcaatgaaactaaccgatgtctgggatttagaagagattcctaaaggagccaaaacattaggctgtaaatgggtctacaaaaccaaatatgactccagagggaatattgaaaagtttaaagcgcgacttgtggcaaaaggcttcacgcaaagagaagggattgattacaatgagacattttctccagtctcttgtaaagattccttcaggataataatggcactggtggcacattatgatttggaattacattagatggatgtaaaaacggtatttctaaatggagatttggaggaaaaagtatacatggcacaactgaaaggttttgtcgtgaaaggaaacgataatatggggtgtcgtctaaagagatgcatttatggattaaagtaagcttcgagacagtggtacttgaagtttgatgggacaataaagaaatttgggtttcaagagaatattgaggacaattgtatttatacaaagtttaagaatgggaaattcattttcctaattctgtatgtagatgacattctactggctagtagtgatatcattctactagctagtagtgatgtcagtctactgcaggaaacaaagaaattcttgtcctcaaactttgacatgaaagacctcggtgaggcttcatatgttttgggcata

SEQ ID NO: 17369 - DNA, 1386 bp, Oryza sativa
atttataattatctccgcccgatttaaaattgctatcacatttgatttatcacatataataaccaaatgtttatttacatagttcaaaattcctattaattttttaaaatcatataattgacaattgcctttctcacatatagtttaaaattcctattaattttttaaaatcatataattaacaattggctctctgacatatagtttaaaattcctattaattttttaaaaccacataattaacaaatccatttcttcaaagagttttaactggaatggcatgaaacatatgcaattcattcattaaggctccaatacaaattaaatacatcattcacagtgatatgccttccgaatggtctaaacaaacgtaagccacttcgtcttcgggatcatcgtcaaggtcgatctgaggtctgacataaagattcttgttgtattcttcttcatcgacaacgttgtccacccccacaattcttcgcttgccatccctaacgacgtgcatcttcttttttgcggggtcttttatgtagaaaatctgttcgacctgcttcgctagtacgaatggttcgtctgcgtatccaaccttggccaggtccactaatgtgaagccttccttgtcgaccatgacacctgtgcggatattcacccaactgcaacgaaacaaagggactttgaagttcagatagtgcagctcccatatctgctctatgcggccatagtatgtgctcgatccaacctgatcctgatatgcatctatacggactccactgttttgcactgtgcttttctcatcttgtgtgacggtgtaaaatgtgtatccattgatatcgtacccttgccatgtgtcaacatcccaagatggaccccttgccaacctttgtaatatctcacttgggccatcggtcgaccgtgctacacgatccttgaaccattcgttgaagcgagcaccatgttctctgttgatcaaaatatctgatggaccaatattgtcctgtcggaccttcgctaaatgctcctcaaagtatggggttacttcagccatatgttgcagcactgcaaaatgagcctgcgcgtaggaagcttgatcgggaacaattctttttctgtcagttgtgccgacacctgccaacctttcttcgtggcgagacgtaggaacttcgataggatcagtctcggccatgtaatcgatacaaaactcaatggcttcctcggtcgtgtaaccttcaatgatgctcccctctggttttgctctgttccgaacgtaggacttcagaattcccatgtacctctcgaatggccacatttctctcataaaagctggcccacatatttttgtttgctttcagtaggtgaacagtgagatgaaccatgatatcgaagaaa

SEQ ID NO: 17370 - DNA, 2561 bp, Oryza sativa
  unsure (1)..(2561): unsure at all n locations
aagttatttttgtctagcgtcaataaagaaaacatcggtccaatagatccagaaaattcacacctgagcagaaaaaagagtttaaagaaatgttgcagcaagcacgggatcagttcttgaactcattcatgcagacccgcaaggggacacttgttcaaaagtacaaaataaaagtggttagtgatgatcctgggaccagttcttctaaggatggagatgggaaacaagctcgagacggctcggctcaaccgagtgacaaaaggtgctaccgacggttctttaggaaatcaaggcgacaattctcaaggagtccatggagtgcaagatcacggagtgcatggagtttaaggtgatggtgcccaggggttccatgtagtcctttcttaatcagaatagtcggcgtcctcaacgttgtgtcaataattccggagggggggtgcccgccaccttggcataagggtggggtccatcagtcatcccttacctccaaccgctcctgccgcctcgtcagtgccctagcgcagcgtccgccgcgaatccagcggcctcaggccgtctctgcgcgcaataaagagggggaaagcactccccgtgattccctctccctttccccccacttttccctctctctctccccggaattagtacgaaaagtttccccctaacttcgacggcgcatcaatggcggccggatcttccgcaggcgattcccctcatccggctctcttctccccctccggaccctatataaacgctccccgtgcctcctnccaccatttccgccactcgccgctctctctcccgtcggaatagagctcgcgccgtcgcccctctctttccgcggtcgccgccgagctccggtccgccgccgtcgtcgccccggactttctcccgcttcggcgtcgctttcttcgggttcgccgcaacctcgccgacctcgtccacctctccgtttcggtcgccgaccgccggaacgccgccgtcctcttctacccgagccgcgccgccgccttcctccgctccggtcgccgtttccgccgtcgccgtcgaaccggggtgagccgtgaaccgcccatttcgtttccctctcccctcccctctctcggccgccgctccgccgtgcctatggccgccgccggcgaccataggggcgcgggcgcgccgcctcccgtcggctgtgccggcgaggccgccttcgggcgcgccccgcggctgccatgtggggcccggccgtcagccgcccgagccctcgggtgcggctgacgcgtgggacccacggcgccggccggtgtgagccgcgtgcacccggtccaccgtggaccgagaggctgctgcgtgggccccactcccgtggacccggtccgcgcgctcctcccctcggctgacgcaataaatccgattttaaattaaaatttaaatgaagaaattcgcaaatatccatttaaagagcatataaacttcaaatggccataacttggccatttaaactcggaattggaccgttcaagtctctaatttttccttaagaagtcaagaacccatttttgtgctttgtttctgcttgttatatggagtttgttagagtaaaagccttttcttttccgttggtcgtgtagacgctgcagcttcggaagatccgctcttcgtggaagttgaagccggcgtttgggaaagcgagcaaggcaagtcacatgatctttgaacatattgaatcccagtttataaaattatgttgatttaaattattgcattatcgctttatttaaattcccgcgttatcactgttttatttagccatgcctatttacctttgttacgaccttattattattgttattgttattatttccttgttcacactagaataaacaaaaccccaactagtggacactctactcatggtatcactagtatgattttaggtagatgcttcgcttttaattaggtaacattaggcggttttacaactctagactttgggaatgttcgtatcacctggacactatggaatggtttggttattgtgaaattggcttcacaccgctccttctattcaaaatccccaaaatggttttaggctgggctcggggtgcatggttttgatagtagcacctcggccatataaggaccggtcttcgggcctctgttgcaaagcactaccgtactttcacatgtctagtgggtaaggcttagtttgtgactcagtctagttataaacaaaagtacacggatggagatggaagaagtcgggggtcgatggacatctctaggacaaatgaaggctatacgagctgcggcccggtagtcgagatgtcatggcacaaggccggtgtcctgctgctaggggttcagtcctgcctgcctgtcccgggggttcccgccgtaggtgggattgggtcggtactcttgtctatggctaggatgggttggaaactatgtcacgtctttcgtctgtatacccgggaggtatgtggcacgtggttacacctgaggaagatgtgtctttgtgggtaaaatgtacacctttggtagagtttatctattcgaatagcgcgccttcg

SEQ ID NO: 17371 - DNA, 813 bp, Oryza sativa
aagtagcgttaatccatattgatcaggaagtgctccaagtgagtgttcttaaactttccaccattgtcatttcgcacgctcttgatagtgagattatagaggcttagggctggcttttaaaagcgcttgaagacatcttgagcttagcttttgtcatggagaaagtacacccaagtgaagcatgaaaaatcatcgacaatgacgaatctatacttgtaacttccaatgcttatgtaggccacgggcccaaataaatccatatgaagaagctagagtggtcgtggtgtagtcatgatgttttttataggatgtgaactcccaacttgcttcccggcttggcaagcactacacacacgatctttctcaaaagaaaaattagatagccaaagaatgtgttccccttttagaacagatgccaaattcgtcattccaacatgggctagcatacggtgccatagccaacccatagaggatttagcaatcaagcatggtttgggattcactctatctatgtcgaaatcagtgagatagagatcaccctttaacacaccgttgaatgctacggaagagtcatctcgcgtaaacacggtcacatccacatcggtaaccaagcaattaaatcctaacttacacaattgagacacggataataaattgtagcttaatgaattgacaaggaggacattagatagagattgattcttggaaatgacaatcttaccgagacccattacctttcctttaccatcatctccaaagaccatattttccatgatgaactactgcagtcgagttactaaaacgggaaccacg

SEQ ID NO: 17372 - DNA, 2077 bp, Oryza sativa
agaaacataagtgctcaaaactgtttttgtaacccgattctagacctatccaattattaatcaggccggtgaacccacacgaacctcccttacccaaaggcctacgatgattcagcccgaactgacaacccgaccatgggtcccagctcgtcccaagccaccccaggccaaccattccacattttagttgttaagcaggttttaagaattaaaacactaacttgggtacattgcacggcttgcccataaccgagggcgcggctattcgaatagattatactctgatcagaggtgtacatctttacccacaagacacatcttcctcacgtgtaaccacgtgccacataccaccacggtatacagacgaaagacgtgacatagtttccaacccatcctagccatagacaagagtaccgacccaatcccacctacggccggaacccccgggacaggcaggcaggactgaacccctagcagcaggacaccggccctgtgccatgacatctcgactaccgggccgcagctcgtatagccttcatttgtcctagagatgtccatcgacccccgacttcttccatctccatccgtgtacttttgtttataactagactgagtcacaaactaagccttacccactagacatgtggaagtacggtagtgctttgcaacagaggcccgaagaccggtccttatatggccgaggtgctactatcaaaaccatgcaccccgagcccagcctaaaaccattttggggattttgaatagaaggagcggtgtgaagccaatttcacaataaccaaaccattccatagtgtccaggtgatacgaacattcccaaagtctagagttgtaaaaccgcctaatgttacctaattaaaagcgaagcatctacctaaaatcatactagtgataccatgagtagagtgtccactagttggggttttgtttattctagtgtgaacaaggaaataataacaataacaataataataaggtcgtaacaaaggtaaataggcatggctaaataaaacagtgataacgcgggaatttaaataaagcgataatgcaataatttaaatcaacataattttataaactgggattcaatatgttcaaagatcatgtgacttgccttgctcgctttcccaaacgccggcttcaacttccacgaagagcggatcttccgaagctgcagcgtctacacgaccaacggaaaagaaaaggcttttactctaacaaactccatataacaagcagaaacaaagcacaaaaatgggttcttgacttcttaaggaaaaattagagacttggacggtccaattccgagtttaaatggccaagttatggccatttgaagtttatatgctctttaaatggatatttgcgaatttcttcatttaaattttaatttaaaatcggatttattgcgtcagccgaagggaggagcgcgcggaccgggtccacgggagtggggcccacgcagcagactctcggtccacggtggaccgggtgcacgcggattacaccggccggcgccgtgggtcccacgcgtcaaccgcacccgaaggctcgggcggctgacggccgggccccacatggcagccgcggggcgcgcccgaaagcggtcttgccggcacagccgacgggaggcggcgcgcccgcgcccctatggtcgccggcggcggacataggcacggaggaacggcggccgaaaaaagggaggggagagggaaacgaaatgggcgggccacggctcaccccggttcgacggcgaccgcggaaaccggcaaccgagctgatgaaggcggctggaccggcttgggtagaagaggacggcggggttccgccgttcggcgacccaaaccgaaaggtggaccaggtctgctagggttctgtaaaccccaagaaggcgaaccccaaacgggagaaggtcccgggcgaacaccggggggggacctggacttcgtggcaacggcagaaagaaaagggccactgccccagctttttttccacggggaaagagagcctgcaatggccggaaatggtggagggaggcaccgggagcgttttttttggc

SEQ ID NO: 17373 - DNA, 833 bp, Oryza sativa
aagaacaaagaacaaagggacttaccaccggcaatatccgattcgaaatagcccaaaagctcaaagccacaacccttagaataacacaagccatgattaggagtgtgaactaaatatcttagaattctcttgacgacaatcaaatgacactctttaggctccacttgaaagcgagcacacatgcaaacactaagcatgatatccggacgagatgcacataagtaaagcaaagatcctatcatggagcgatataccttttggtccacacatttaccattatcatcgaggtctaggtggccattagtaggcatgggtgtcttgataggtttggcatcctccatcccaaacttcttgagtatgtctttcacgtacttggtttgagagatgaaggtgccctcttgtgcttgcttcacttgaagcccgaggaagaaggtcaacttgcccatcatagacatctcgaaccttttagtcatgatactactaaattcttcacaaaaagaggcattagtagaaccaaatattatgtcatcgacataaatttggcatatgtataaatcactcttaaattttttagtgaagagagtagtatccgcctttccaatttcaaagccatttttcaaaagaaaatctcggagacattcataccaagctctaggggcttgtttgagcccgtagagtgccttgtggagcttgtacacatgtttggcaactttggatactagaccccgggggttgctcacataactaactcccagaaggtccattgagaaaggacttttgacatcatttggaatacctgaaatatgaaaaccggcttggctaaaagattttat

SEQ ID NO: 17374 - DNA, 855 bp, Oryza sativa
tcctttagtctcatgatctctcaagaagtggtggcgaatatctatgtgcttggttcttgagtgttgaacgggattattgcctatgttgatggcactctcattgtcacatagaagtgggatcttggtgaagttgtagcaaaagtcttttagagtttgttatccaaaggaattttgcttcttggaggaccaaaaaacaagggaccgcccaagaaattggcaagtcccagttgtgctttttctatcaaccttacacttggcataatccgaatcagaatagcccaaaagctcaaagccacaacccttaggataccacaagcaaagattaggagtatgaactaaatatcttagaattctcttgacggcaatcaaatgacactctttaggctccgcttgaaaacaggcacacatgcaaacactaagcatgatatcgggacgagatgcacataagtaaagcaaggatcctctcatggagcgatataccttttggtccacacatttaccattatcgtcgaggtctaggtggccattagtaggcatgggcgtcttgataggtttgacatcctccatcccaaacttcttgagtatgtctttcacgtacttggtttgagagatgaaggtgccctcttgtgcttgcttcacttgtagcccaagaaagaaggtcaactcacccatcatagacatctcgaaccttttagtcatgatactactaaattcttcacaaaaagaggcattcgtagaaccaaatattatgtcatcgacataaatttggcaaatgaatgaatcactcttaaatttttttgtgaagatagttgtatccgccttcccaatttcaaaaccatttttcaaaagaaaatt

SEQ ID NO: 17375 - DNA, 2043 bp, Oryza sativa
  unsure (1)..(2043): unsure at all n locations
gatgcgtgtcatgcgtaccgcaagtagttcatcaccggatcttccgcaggcgattccccctcatccggcctctctctccccctcccgaccctatataaacgctccccgtgcctccctccaccatttccgccactcgccgctctctctccccgtcggaatcgagctcgcgccgtcgcccctctctctccgccgtcgccgccgagctccggtccgccgccgtcgtcgccccggaccttctcccgcttcggcgtcgccttcttcgggttcgccgcaacctcgccgacctcgtccacctattcgtttcggtcgccgaccgccggaacgccgncgtcctcctctacccgagccgcgccgncgccttccttcgctccggtcgccgttttcgccgtcgccgtcgaaccggggtgagccgtggaccgcccatttcgtttccctctcccctcccctatttcggccgccgttccgccgtgcctatggcccgccgccggcgaccataggggcgcgggcgcgccgcctcccgtcgactgtgccggcgaggccgccttcgggcgcgccccgcggctgccatgtggggcccggccgtcagccgcccgagccctcgggtgcggctgacgcgtgggacccacggcgccggcccgtgtgagccgcgtgcacccggtccaccgtggacccagaggctgctgcgtgggccccactcccgtggacccggtccgcgcgctcctcccctcggctgacgcaataaatccgattttaaattaaaatttaaatgaagaaattcgcaaatatccatttaaagagcatataaacttcaaatggccataacttggccatttaaactcggaattggaccgttcaagtctctaatttttccttaagaagtcaagaacccatttttgtgctttgtttctgcttgttatatggagtttgttagagtaaaagccttttcttttccgttggtcgtgtagacgctgcagcttcggaagatccgctcttcgtggaagttgaagccggcgtttgggaaagcgagcaaggcaagtcacatgatctttgaacatattgaatcccagtttataaaattatgttgatttaaattattgcattatcgctttatttaaattcccgcgttatcactgttttatttagccatgcctatttacctttgttacgaccttattattattgttattgttattatttccttgttcacactagaataaacaaaaccccaactagtggacactctactcatggtatcactagtatgattttaggtagatgcttcgcttttaattaggtaacattaggcggttttacaactctagactttgggaatgttcgtatcacctggacactatggaatggtttggttattgtgaaattggcttcacaccgctccttctattcaaaatccccaaaatggttttaggctgggctcggggtgcatggttttgatagtagcacctcggccatataaggaccggtcttcgggcctctgttgcaaagcactaccgtacttccacatgtctagtgggtaaggcttagtttgtgactcagtctagttataaacaaaagtacacggatggagatggaagaagtcgggggtcgatggacatctctaggacaaatgaaggctatacgagctgcggcccggtagtcgagatgtcatggcacagggccggtgtcctgctgctaggggttcagtcctgcctgcctgtcccgggggttccggccgtaggtgggattgggtcggtactcttgtctatggctaggatgggttggaaactatgtcacgtctttcgtctgtataccgcggtggtatgaggcacttcgggagcttgatagtgtaaagagttttatgggtaaagatgtacacctctgaacagagggtaactcattttgaatagcccgcgcctctggggaatggggcaaagcccaaaaggtgtctcctaaaactaaggggggtgaacttttttttagagcaggttttaccaaccaaaaaatgttttacatggcctggtttcttggggggtgggctcttggaaa

SEQ ID NO: 17376 - DNA, 7868 bp, Oryza sativa
  unsure (1)..(7868): unsure at all n locations
tgggagcacataggttcgagcagaatattagtaattagttcagttgtgcattttttgaaaaattttctgattcgattgtatttttgaaggtttgttctgtccccatttactgagagcattcgtgcatgttcaagttgagaagattcctcatacatatgtactgcgtcgttactcaaaggaagcaaagagtgatgtcaattttgaccggcgtgatcgtccaatatcggggccagacggtgttaaattatcatacaggacaaaggtgttgtcattggatgcacaacagctagtaaagtgggggaggaggtcgtcggttgctttcgaaagggcaacctcagtgatgaaagtgctgagaaagcagctggaagagattccggcagatgtccatgggttagatgtagatgatggtgtgagtgagcatgaggctgatgttggcgatggagctgggccatcgatccatcggggtggaagtgttggtgatgaaattagcaggcgtccaccgccaaagtcaatgacaaaagggaggggaagcgaccccaatgagacggtccgtctaggtgctcccgaacctaaaaaatgcaccggggctgcagttggtgtggtacatgccctaaaaacccggcgaatttcgaacgtttagcagcagctagcagcaggggcaaagggaagaggggtcgaccaaggggaagtggtagtggtggtagtcgtgggcaaaaagacgtccggaggacaccgatggacgagtgggagggtggacaggaggaggagggctgtagcgttcaaggagacgaaggtgacggcatcagcgcgccaaacgatggtgattgggagggtgaatcagagtgactaaaagaaatttatgttaaatcttgtgtttaagtgcatatttgaactaaatgattgtaactggatgacatggactatgttttgatgaattgtggtcggatatgtgttgacaaacattgtaaggtgatatgttcagtttgtttctattaatattggtagttgtttaattttggtaactaaataaatggtctatgatatactgtgggaaacatttgtgcaataatgggcgcaataaattaaagaagttacaatactggtgccatggagaaacagtactgtaaaaagggggctcaggtcagaattcgtagttagtagatgatttacttaatgtgttcataaggtggatggcttacagtagcaccattcgtagtgtaattgctggcaactataggaacggtgaaagttaagtacgggcgatagtaccggcaggggagtggatggttggaatggatgggttggtgtagataataatgtaactggttcagttgtagtaataaaaaaataaatgaatagcgaaatagcgaccgcatgcattcaacgcttctttggatgtagagtgatgattggaaatgtgtttactttgaattttgagactgtggcgggggtatgattagattatatgtaaataatttctggtgtgtttgtatggatggggtgatgtccatgggagatattggcgccaagatggtggataacaattaggatgaaatggtcaagcgcatggttgggatgctatctttagctaagtcaatatgtatgcgttatatatagtacaccaacgggctgcacagttgcacatcaatatccaggtgggaaagcataggcgcataggctgtctaagctacccgatggctcgccggcctcaccctcaatacatggtgattcatccggctcgcattcaccagagaggttgactccatctccggtgatgcgtgaggtggatctacctcctgagttttgtgttagggggtcgccaacgccagactggccaccaccacctacagaatcagatgaagagaggtttcgagaagatctggagcaatactacaatgatgggtacgtgtccactccatgcccgtcaccaccatctgatctgttcgattgcgaagaaaatttggaggatggagatgtggaagatgataatttgaggcatggggatgtgctgcctaaggataatcaatcaaaggatacagcgtcaccaccgagcaagcgcaagaaggtttaggatagtaccgataagatttgtcgtatttaaattgattattgaattgtcgttttaaataattgctactttttcttagtggctgtgcttaaatttgttagttgtgaatttgtgagttttgatctaatttcatgggcatgaaataaataagtttataagtgtagtgtagatgtcagtgtcgctatcatgatgtattcagaagagatatattcatgtgatttgttaaaacaccatatgatgtgtgctgttagagttatcactgcatggctgtggtgctcgtttggtgtacatgccgtcaagctgccagaaagtagagcagttacttagggaacccaaatgatgttctcactccttcgggatggttatttgccttccagtaaatggtttactatcggctaaattttgcttggggatgacatttcagtgatcacatatgaaaacgaaacggcagtatgaatgcacaatatttttacaagaagatacccacattaacattaacaaaatgaagtagtctcatccacatcggttccattagtacatgtcctaaagttcgcaagcagtggtaactatcaacaaagacttaacagcggtgtcactagtgggagcttccttcaccgttgtcaagaggacgaaggtcctttatggcagagtggatgcatggtgctaggttgaagcgatggaaaatcagttggtgcagcatctgtgcccgaagaacacgtgattcaggctagcaaaaaagaagaaatggcataatcagtttgaaagttgtagcaagtgataacaagagattgcagatggcaatactgtaatgaaatgtgttgtgataaatattaccggttgaaaatcatcagcaagcttgtcaggattcccctggtaccgctccatgtacctcatgacatagaacgcacagtcatttgagcatggcaccatcttggggcatttaacgaactcacgatggtagttgccaaactttttaaatactttgggtataaaggattggaacccattgctgagacgcttgaggaccctctaggccaatgggtagtgatgctggctctcctttcctcctatttggtcgtagtcattggagtccaatatatcaaaactcccttggttcaggtatacgatgtggagtgtccagtggtcattgttgatgattggcagtaaaagctgaacagatgaaacagaagtaaaattagataatatataaagcatggcagtatatatattaacaattggtgtactgaatcctgacctgctcggcctttgaaaggttgacacccttcagacatttagacaggtgttcggctagagcgcgtgggctgaagttgtccttactgccaactctagtaacattctcaatgttgaggagaccctgcagttatatgttaatgagaagcttgttggaaggaatgtgaaataatggatagaaaacgctaaaaacaaatcatgcagtaccgttacagaggtgggtatgaagatcttcttgccaaatgtttctggattatctctcatttcatccttaaaaagcaaagatgcaaaagcatctatgaaaatcccttctgtcatgcttcctgccttgaatgatgcggctatgtccgtggctttagcactgtaacaatccacctcgattaagggagggttgtgaggtaagatgtttgattgggttagtaagtgcggtaggattgaaataaagcagttatggagttgcagtgtacatgaaatgggtaaaaatggaacaaagctcccaaattgagttgggtctcacagtatcaagtcaaggagctgtacggcgacgttgtcatctttgggtacggattggctagctgggggcacgtacctcgctgccctcttgacacaacgtttcacggggctagcatgttgtctagccccgtcgtcagcctctttgttgacctgcatatgatacacatagctagggctcggtggtctgatgggataattaatgccgtgtacaagtgaaagatgggacaggagaagcaggtggtaacctcagtactatcatgataggcaccttccataatgcaaatctgatcaattttcgctgctggctgggagtcagtcaataattcatctgggggcagtgagtgtgacaagttgtcatcatcgtcgtgagaagaatcacctgttcatgttgcttggaagagagccatgattagacatttgaactaatggaatgatgaccatattaatagatgtgctggttgtatgtgattaaggagatggggtcactaaccttgcgtgttatgttcagcggtttcgtcttgtacatatgccgtcagtgctagaagggtattaggaacaccgaagtctggtagtgcaggttcaacggcgggagcagtgggctgaataatacctgcaacagtaaatcatatagtaaagaccaagtgtgcttgcgaaatgatcagtctgtaagcaaacactagctctctaattaaacactagctcccggaccaacagtaagctgcactgtgacagattgtatatttaaaggggtaaccatattgtgaatgcaaaccagtaaacctattactagtatttgctgcacttgggtgcagcgggataggggtcgaactattactgatacataagagtgtagtagaaaataatgaaacagagttaagtacattggtaagccggttggaaaagagaatccttagtaaaattattacttaagagtattagtgatgcaaattactagaagtaaatggtaagcaaaatattggtaatgaggtgacagtaactgggttactggcaaagcatggtattccagcaaggtaggggtccggtgtgtgtattgtgatggtagtgagtgtcttactatgtggccagtttgttgaatggcaaatagaacaagtggtagtaattgaattactttgaatacaaagcagaactatgacatcactgaatataagaagtttaattttgcaaaaaatgagaacaatgacacattatcacaaaaattaggaagtaagaaatgaagctagtgagataaaagccgctatgaaaaccatagttgttgcgtcccaaaacgactctaaaatacatcctcaaaattatgcatagaataagtaaaatccatgtgaaagcctccaacaattaaaatgtgcaaagttaaaagtcaaataaggcttggaggatttttgtatatttcctaaaagcctaaaatgcgtaaataaattttagtggaattttcagagcacaaataataattattaagaaataaacaaagttaaaaaggttttataaaaagaaaaaccctaaaaagtccctttttccccccttcccctcttgggccggctcggcccacctccctccctctctctcctctcccccgcggcccaatcggcctcctccccgcgcgcgtgccgctgacgggcgggcccgcccgccaccctcgctgacgggtggggcccacccgtcatcccctacctcccgccgctcccgccgcctcgcccgtgccctagcgccgccgccgccgcgaatcccgccgcctcccgccgtccccgcgcgcaataaagagggggaaatcactccccgcgattccctctccctttccccccacttttccctctctctctccctcggattcattcggaaagtttccccctaacttcgccggcgcatcaatggcggccggatcttccgcggccgattccccctcatccggcctctctctccccctcccgaccctatataaacgctccccgtgcctccctccaccgtttccgccactcgccgctctctctccccgtcggaatcgagctcgcgccgtcgcccctctctctccgccgtcgccgccgagctccggtccgccgccgtcgtcgccccggaccttctcccgcttcggcgtcgccttcttcgggttcgccgcaacctcgccgacctcgtccacctctccgtttcggtcgccgaccgccggaacgccgccgtcctcgtctacccgagccgcgccgctgccttcctccgctccggtcgccgtttccgccgtcgccgtcgaaccggggtgagccgtggaccgcccatttagtttccccctcccctcccctctctcggccgccgctccgccgtgcctatggccgccgccggcgaccataggggcgcgggcgcgccgcctcccgtcggctgtgccggcgaggccgccttcgggcgcgccccgcggctgccatgtggggcccggccgtcagccgcccgagccctcgggtgcggctgacgcgtgggacccacggcgccggccggtgtgagccgcgtgcacccggtccaccgtggaccgagaggctgccgcgtgggccccactcccgtggacccggtccgcgcgctcctcccctcggctgacgcaataaatccgattttaaattaaaatttaaatgaagaaattcgcaaatatccatttaaagagcatataaacttcaaatggccataacttggccatttgaactcggaattggaccgttcaagtctctaatttttccttaagaagtcaagaacccatttttgtgctttgtttctgcttgttatatggagtttattagagtaaaagccttttcttttccgttggtcgtgtagacgctgcagcttcggaagatctgctcttcgtggaagttgaagccggcgtttgggaaagcgagcaaggcaagtcacatcatctttgaacatattgaatcccactttataaaattatgttgatttaaattattgcattatcgctttatttaaattcccgcgttatcactgttttatttagccatgcctatttacctttgttacgaccttattattattgttattgttattatttccttgttcaccctagaataaacaaaaccccaactagtggacactctactcatggtatcactagtatgatttttggtagatgcttcgcttttaattaggtaacattaggcggttttacaactctagactttgggaatgttcgtatcacctggacactatggaatggtttggttattgtgaaattggcttcacaccgctccttctattcaaaatccccaaaatggttttaggctgggctcggggtgcatggttttgatagtagcacctcggccatataaggaccggtcttcgggcctctgttgcaaagcactaccgtacttccacatgtctaatgggtaaggcttagtttgtggctcagtctagttataaacaaaagtacacggatggagatggaagaagtcgggggtcgatggacatctctaggacaaatgaaggctacacgagctgcggcccggtagtcgagatgtcatggcacagggccggtgtcctgctgctaggggctcagtcctgcctgcctgtcccgggggttccggccgtaggtgggattgggtcggtactcttgtctatggctaggatgggttggaaactatgtcacgtctttcgtctgtataccgtggtggtatgtggcacgtggttacacgtgaggaagatgtgtcttgtgggtaaagatgtacacctctgatcagagtataatctattcgaatagccgcgccctcggttatgggcaagccgagcaatgtacccaagttagtgttttaattcttaaaacctgcttaacaactaaaatgtggaatggttggcttgggttggcttgggacgacctgggacccagggtcgggtgcccagttcggtatgaatcatcgtaggccttgggttaaggcaggttagagtgggttcacggccttgattaataagtgtatagttctagaatcgaatgtctcacaaatttgatggncccggtatgacatgaggtcaannnacccac

SEQ ID NO: 17377 - DNA, 74134 bp, Oryza sativa
  unsure (1)..(74134): unsure at all n locations
ggagagttttttgttcctccagctgtttcagtgacacattagaatgctcaagcttgcatgctgaacaggctgacacactaagtggggcaaaccaccccgctgcctccatggggccttgctgctcgattcattaatccacatgctgccacaagggcgcctgctggaaagcgtgcaaaaaccgccacgcaagtgacgtgagctaaactacttattcagcaccgcaggctttacactgtatgctgaatcctctgcacaacctactgccttggcggtgtttgctgaaacaatcggggattaattaattggcctggagccgaaggtggtacagcaggtgcgggagccgatactggtgccgttggctgagccgatggtgcattaagagggattgactggacgaattgttgattatcggtgattaatggccgataattcgggaatactcctcctggtaggtaaattggtcctgtagcttgatactcggccattgaaccatcaaccattgaaccatcaaagcatggtgtacagcatagtcaacctgatcttgaaagttgttgaactgcaactgtgctgtattgccgtcttgattagggccttcaccttgaaccccctgagtaccatcaccatgaactctaaacgcgttgatgaagcctaggggggtgaacaggctgtccctgaaaacttaaaaacaaatcgcagcggtcaaattcaatcagacacggaacttcctggtaaggaactccagaacttccggcctcccaggcccggaacttccggtgttctaagacaggaacttccgggtaatagaagagagatgaaatttaaatttcaaaacaagagactaagccaatcttcacaagatggtgcacaggtattctaagccgaggatatatcacaaaatcatccacagaaacatcatagaaagagacaagagcgattttttcccaaagttcggatcttgtgatcctactctccgttgaggagctccaagagctgggtctcgattaaccccttgcctcacttgtgcagaaaccccagaggaaatccacagcctttaaccccaaacacccctaggcaaatttctagaattgagtgaccaccaagatccaactcaacctacttctagaaatccaccacaagtgtgggttgctctacttggaaaggctctagaatctcagcacaagaacttcactaacttacctcgttccctttcggaggagaggaaatccttcacaaacttacccgggacatccacaatatgcaatggattctcgcgggtgacacctaaccgtctaggagatcatctccaagagtaataagcaccaagatgacagcccacgagatattccaagtgctcacccaagatcctagtcttcacacctctccaaatcttcttctctccctctcaatctctctttcacacaagaattaggctctagattcagtgtaaagacaagaaacacttcggagaggctagcaatagctcttggttcgaaaagtgaaagtggaatggccaaggaacgagctggaaacgagctgcatatgtataacggctaggtgacgtcatctagccgttactcacaaatttgaactggaaacaagacaggaagttccggacctggaagactggaacttccggactacacttaggaaaatctttttcacaagaccggaacttccggacctggaagacaggaagttccggacttgcatttttgggcagatggagtatttgcaaaaaaaaaagaactcctagggaaacttgatacttggttcacactaagagcgcttgatatatctcagagcatcacctggaacccctcttaatagtacggtttttcctaaaaactcgatttcagaaaataaactatcctatgcacttctcgagttccggtcctctttgattttgtactttttggggggtctccaagcatccatcttccacatcttggactaatgcacctgaaagctactcaatgagctcattagtcccttaaccacatttgtcattaatcacgaaaacccactaggaggattaatgcactttcaatctccccctttttggtgattgatgacaacatggttaaaccttacaaaagattgataagaattttgttttgaatggtccacttcacaaaatcaagccccttcttggtgaatgaaactcccccttaatgtatgcatatggaagatatgagtggagctcatatgcatatatataagggagcaaccgaggagagtttccttcatccctactcattcgtgagatgcaaaaagcagtaagaatagatattatatgcaaaagatacgacacggtgagcactcaaaaagataaaatcaacatcacatcacaaacaacaaataagacactcatagcataaatgaagagcagtataaataaaggcagctaagagcatctaacagacattacattcacacaaatagagaattagaacatgtccatgagttcttaagaataggggccaaaggattgccaggtccggaacttcccgataaaataccaggaacttccggacaagctgacatgacaataaggcgagggagctgccaggtccggaacttccggataagaggatccggaacttccggattaaacagacagcaggcagtaagcatcaaaaacaaaattttgacccccttcgattgcaattttctcccctttggtatcaaagcaccaaaaagagacaaaatcataaggaaagaagaggatcaagcctcatcaatatcgccatcagaaggaatgatctcagtgtcgccggagtgaggagagtcgatgtcttgcccggcggcgtccactgcctcatcgggatctgtaggaacattctcggtaggggcatctgactcctcatcatcactgctctcctcggagtgacaggactcctcattgaagaaacgagaagtgccagagggaccctcaccactaccaatgtcttgagcagtctcataagcagcaaaaggatcaacaaactcctcatcatcagaaatgtcagagacatccttgcctactgcaatccaatcttccttttgacgcctctctatcttctttaccttcttagctgtcttggcacacatgcaaaagatagccttgagagccttctttatgggagaagaagactcagaacgctgaggtgcagcagagaaagaaggagcagctgaggtggaagcacttgtcactctggtggtaggagtagctgaagtagtgggagcatgtggacggaaaggcttgtattgattgtccttgaaataacaaatcccagtcttggcctcaatcatcttcatgatataaggagcatagatgcaacccctctttggctcacacactgtctcatagatctcactccagataagcttcatgatgctgaaatcgggcttgttgtagcgcatgcgactgaggaggagcgcatgcctacctggaagagctgtagcatctcccactttggggagcaaagaccacctgaagatagagtatagcactctataatatggatgcaaccctcgagtagtccccaaacaatccttgggagcatccttctcatacataaaggtagtgctggtcggtgacagagcatcctctacaaagatatgtggacgactcaggtcatcatcatctaaccccaaagctgcaacaaattgtgccatagaaaccctatactgctgcccctgaatggtccacttcacaaaatcaagccccttcttggtggtgccaaagaaagcagtggagtagaactgtccaatcacttcctcattccaggaatactgcaaggccaacaaatctgccgcgtgcttgtgctcacacaccttgcgtacctcattgaagactatgttgttctttgaggacatgtacttccagtctagccacttcatctctaccactggatgagatcttcccatgatcacagagttataccaatcaacctgcaccaaggtcctgaatctgtcatcctgagagtcagctggcagagtatcaggactaaccattctgtcctttccacacttgagtagattcttcagatagttcactcttgggcgtttaggatcaggatcaacagcccttgtcttgtacagcctcaaaggattgctttcagaacctggctcatcctcattgccaccatcatctgactcagatgcagttggggagggagagcggggtgcatcacgaatgacaatgctaccagccctcctggaatggatcggaatctgactcccactgtaaaatctctaactttttctttgcccaatctccccctaggaccacgaaccggggggctcgagtcagcaggaatatcttgagaaagcttttgtctcttctcacgaggcataatgactactgcaacaagaatcaacaaggttggagtgcaatggttaaaagaaacagtattagaatcaaggttactggctgactggacagagaccggaagttccgggccaaaaacaccccggccagcaaaacgtaagaacagaggatttaaccaggccagtgcatgtgacaaaaaaaacctatagatcggcaatccacaaggtagcaggaacaattctatccaaaaggttttctccctaggttcacatatttagagatcggtgcagaaacatgatgaaccaaaagagaagatcaaaagtgctaccttgagagggaaaatcgcaaatcgatcatgggatgaacctcctagccaccaatgtggttgattccacggagaggaatcaaatttccaatgttggaagagaaaatcgctgagaggagcactctagcggcggctagggtttgggaatcggggagaagaagaagtgaggagagagataccaggctcaggctccccctgggtatttataccccccgacccccggaagttccggactggggtgaccggaacttccagcctgacagaacagagggcagtcaggcccaagttcaatggaatagatgagaattcaatgatttggaaatgaaaacctatggacataaggagacttatgatgtatatgaccagccaacagtcaacattacataacaatggtcaatatacatcacaagaagggataaaaaccaaattttcgcaataaaaacacaaacaaaatttttcacataaggtttttttttggataatagagggaatgtttgagctttattcctggtatcaagaccttcttctccacaagaagtgatctcaagacacaaaacctcaatttttttttaatttacgttttagtgacacatgtttggctatgaattagccaaccacccatcacctaatgttacgagagtctaagatattgagctcactcctcagctcgcaaaatcttttctcatctaaaggcttggtgaaaatgtcggctaattgactttcggttgtcacatgggtaaggcatatgtctcctttagtctcatgatctctcaagaagtggtggcgaatgtctatgtgcttggttcttgagtgttggacgggattgttggctattttgatggcactctcattatcacataggagtgggatcttggtgaagttgtagccaaagtcttttagggtttgtctcatccaaaggagttgggcacaacaagaatcggcggcaacatattcggcttcggcagttgataaggcaatggaattttgcttcttagaggaccaagaaacaagggaccacccaaggaattgacaagtcccggttgtactttttctatcaaccttacacccggcataatccgaatcggaatagcccaaaagctcaaagccacaacccttaggataccacaagccaagattaggagtgtgaactaaatatcttagaattctcttgacggcaatcaaatggcactctttaggctccgcttgaaaacgggcacacatgcaaacactaagcatgatgtcgagacgagatgcacataagtaaagcaaagatcctatcatggagcgatataccttttggtctacacatttaccattatggtcgaggtctaggtgtccattagtaggcatgggcgtcttgataggtttggcatcctccatcccaaacttcttgagtatgtctttcacgtacttggtttgagagatgaaggtgccctcttgtgcttgcttcacttgtagcccaagaaagaaggtcaactcacccatcatagacatctcgaaccttttagtcatgatactactaaattcttcacaaaaagaggcattcgtagaaccaaatattatgtcatcgacataaatttggcaaatgaatgaatcactcttaaatttttttgtgaagatagttgtatccgccttcccaatttcaaaaccatttttcaaaagaaaatctcggagacattcataccaagctctaggggcttgtttgagcccatagagcgccttgtggagcttgtacacatggtttggcaactttggatcctcgaaccccggtggttgctccacatagactaactccgagataggtccattgagaaaggcactcttgacatccatttggaataacctgaaatcatgatgagcggcataggctaaaagaattctaattgactcaaggcgagcgacaggtgcgaaggtttcaccaaaatcgagaccctcgacttgggtgaatccttgcgcaactaaccgggctttgttccttacaaccaccccatgttcatcttgcttgttgcgaaagatccacttggtggcgataacattttgcttgggtctctccaccaaagtccatacttgattgcgagtgaagttattcaactcctcttgcatagccatcacccaatccggatcaccaagcacatcttccaccctggttggttccaaagaagagacaaacgagaagtgttgacaaaaacttgtgatacgagagcgagtagttaccccttttcttatgtcaccaagtatgttgtcaacaggatgttctctttggacagtgtgatgtatccttggatggtgcactggggggacctgagcctgatcagaatgctctaaagtgccctcagcatcgatcccatccacttgtgccgttggcatgtcttcactgccactgatccaaaggttccggactatagaacccggaacttccgggcctagagatgtccggaggttccggtcaataggacccggaatttccgactcagcagacacaacacttgtagggctgttggatgccggtgacggaggttgatccctatcttcttggtcatcctgcgtctcgactggtcgtatgtctccaatagccttagtaccaatagcttgatttggatccacaccccctacaacatgtacaacaacttgctctccttgggagccattagattcatcaaatgtcacatccctagtgacttcaacaataccagaggttttgttgaagacacaataggcatgtgcattagattcatagctaagtaagaatccctcatccaccttaggtgaaaacttagatgagcgaggcctcttacttaaaataaaacatttgctcccaaagacacgaaaatatgaaacattaggcttcttaccactcaagagctcatatgaggttttctttaggatcttgtggaggtacaagcggttgatggcatgacatgcggtactcacggcttccgcccaaaagacattcgaagtcttgtactcatcaagcattgcccttgtggcttcaatgagggttcggttcttcctctcaacaatgccgttttggggaggatcatagggggcagagaactcgtgcttgattccttcttcatcaagaaattcctccatttgagtgttcttgaattctcctccattgtcgctttgcaccctcttgatagtgagatcgtagaggttttgggcttgctttgcgaagcgcttgaagacatcttgatcttcgcttttgtcatggagaaagtacacccaagtgaagcgtgaaaaatcatcaacaatgacgaaaccatacttgttacctccaatgcttatgtaggccacgggcccaaataaatccatatgaagaagctcgagtggtcttgttgtagtcatgatgttttttataggatgtggactcccaacttgcttcccggcttggcaagcactacacacacaatctttctcaaaagaaacattatatagaccaagaatgtgttccccttttagaagagatgccaaattcctcattccaacatgggctagcctacggtgccatagccaacccatagaggatttagcaatcaagcatgcctccggattcactctattcacgtcgaaatcaacgagatagagatcaccctttaacacacccggaatgctatggaagagtcatctcgcctaaaaatggtcacatccacatcggtaaacaagcaattaaattctaacttacacaattgagacacggataataaattgtaccttaatgaattgacaaggaggacattagatagagattgattcttggaaatggcaatcttaccgagatccattacctttcctttaccatcatctccaaagacaatattttcacgacttccagccccctcatcaagacttgtaaacatactcctctctcccgtcatatgattggtgcagccactgtccacaacccaacttgagccaccggaggagtatgcctacaaaagagatcaagcttcgatttaggaacccaaacttgtctaagtttgggtcccttgatgttagtcaccaaagcctttggcacccacacacaagtgcggtactcatctttgtaattcccattaaaataagcaactactttgccctctgaatttttggaaattacatatgaatcatagtaaagaccctctggccggaacttcctggcattatacccggaacttccggtcagccccttcggcctattagaagcccggaacttcttgaaaaaacgtccggaacttcctatcttacagggcagaaacttccggtcattttgcccagaacttccgggtgtctgaccagtgaggggacaagtcacctcacttgcttgtggagcttttccttctcatacaaacatcaagcattctttcccatttaccatcacacgcttagacacaggacttccaccagaaaacccgagcccgtgtccatccatgttaagatgattgattgtcttgtaaagggcatcttttgaatggtatgtcttcatgcatccatatttcaccaatgtgcccaacctttcattctctttcttaagagcttgcatagcatcaacattagtagtatgagagttcaaatcaatattgtaacacctagcacaaccattgcttgtagatgggttggaagaattagaaaccacatttggttgagaagtgctattccaaagagtgtcaaattgaacttcaagatctttatgacttttgtctaaactagcaaacttctcttgaagagtttcattgacatcactaaggctagctagagaaccattagccaaattaagctcattagccagttgttcatttttagcacattctttagctaggctctcctctaaggcaaggtttcttttcttctcaagaataagtaattcttcttgcctttcgagcgattgttctttactatccaaagctctcattaacttagccaaatgttgcatagcgggttttctaaagctcttaagcacatcatctaattcattatcactttcctcatcactagaatcaacatcaagagaggtgtgagagcgcttttgagtcatcaccttgcggccttgggccatgaaacaagagtagtggtagaagtcgtcgtcgtcatcactcaagttgttgaagagacgcttcttgcttgaagaagatgacttgaaggcgacggtagcaacaccaccttctccttcaaccttgtctttcggcttgggcttgggcttgacctcgggatcttcttcatctccggagtaaaacacctccgccatgtgtgcctccgccacatgagcatgctctggcttcttcttgcctcccttagccttagcttcatttgacttgggacaattggctacgaagtggccatattcgccacaattgaagcaagccctctttgattgcctctttcccttgtcatcatccttcctccctttgccatagccactgttgcgaagaaagtgcttgaatctcttgacaataaaagccatctcttcatcttcactttcttcacaacttgactcttcttattgttttgccttcaaagcaacttcttgatttttgatcatgacggcattcttcactatttgcctcacttcacgagcttcctcttcttgcatctcatgagacacaattcttccaagaatgtcacttggggtgagtctcttgaagtctttcctttcccgtatcattgatacaagagtgggatttcttggaccaagtgcacggagaagtctcttgagcacaaaatgatttgtcatgtcctcactcccaagtcctttaatcttgttgacaagaatcatcgtcctatcatacttctcttgtggtgtctccttgtcatccatcacaaatcttccaagccttccttccaataagtcaatcttggcctcacgaacggcgggtgatccctcatgagccaattgcaaagtatcccatatctccttggcctcctcaagcccatcaaccttgttgaactcctccggactcaaggcggagagaattgcattggaagcttgagcattgcggtggatgagttgctcttgctccgaagtgagctccatgtcatcatggggtacatcaacacctttacaaacaactttccaaatacttagatacaaagagattagatgcaacttcatcttgtgcttccaagcggcgtaatgtgtcccatcaaattgaggagcacgcccggaaggcacggagacaaagttgtgagggggaatggtatgtttcctgtaaccaaaaggtatagtagctcccttgggtgatggagtttccttgctgctcgctccatcttcatttccattttctccgttctttccccctaagtctgacatcatggatcactcaaagcggtgaagcttgaatcaagagcaccttgctctgataccaattgaacgcgctgatgaagcctagagggggggtgaaaattcaatcagacccggaacttcctggtaaggaactccggaacttccggcctcccaggcccggaacttccggtgttctaagacaggaacttccaggtaaaagaacagagataaaatttaaatttcgaaacaagagactaagccaatcttcacaagatggtgcacaggtattctaagcagaggatagatcacagaatcatccacagaaacatcacagaaagagacaagagcgattttttcccgaagttcggatcttgtgatcctactctccgttgaggagctccaagagctgggtctcgattaaccccttgcctcacttgtgcaaaaaccccagaggaaatccacagccttcaaccccaaacacccctaggcaaatttctagaattgagtgaccaccaagatccaactcaacctacttctagaaatccaccacaagtgtgggttgctctacttggaaagcctctagaatctcagcacaagaacttcactaacttaccattttccctttcgaaggaaaggaaatccttcacaaacttactccggacatccacaatatgtaatggattctagtgggtgacacctaaccatctaggagatcatctccaagagtaataagcaccaagatgacagcccacgagatattcctagtgctcacccaagattctagtcttcacacctctccaaatcttcttctctccctctcaatctctttttcacgcaagaattaggctctagattcagtggaaagacaagaaacacttcggagaggctaccaatagctctaggtttgaaaagtgaaagtggaatggccaagcaacgagctggaaacgagctgtatatgtataacgactatgtgacgtcatctagccgttactcacaaatttgaactggaaacaagacagggagttcgggacctggaagaccggaacttccggactacacttaggaaaatctttttcacaagaccggaactttcggacctagaagacaggaagttccggacttgcatttttggacagatggagtatttgcaaaaaaaaaaagaactcctagggaaacttgacacttggttcacactaagagcatttgatatatctcagagcatcacctggaacccctcttaatagtatagttttacctaaaaagttgatttcagaagataaactatcctatacacttctcgagttccagtccgatttgattttgtactttttggggggtctccaagcatccatcttccacaccttggactaatgcacttgaaagctactcaatgagctcattagtcccttaaccacatttgtcattaatcaccaaaacccactaggaggattaatgcactttcaatgttaagaatcaagctcctgtagccaatgaagccacagcctatgaagcaagaaggttggctaaagggaaaagtgttgtaattgcttcggtcaacatggttttcacgttgcctgctgaatttgggatcaagcaagccaatgtcgatgaagtggaagcagaatcagctaaattaattttatcactgtagaaggcaattttcgagaagccagagggtacagaaaattggcatctcaagtcattatatataaatggctatgtcaatgggaagccgatgtccatgatgatggtcgatggtggggctacagtgaatttgatgccttacactacattcaggaagccgggtagaaacgccgaagatctcatcaagacaaacatggtgctcaaggactttggcggcaatccatcggaaaccaagggagttttgaatgtggagctgacagtcggcaacaaaaccatccctacaacgttctttgtcattgataggaagggttcttacagcttgttgcttagaagggattggattcatgctaattattgtatcccttcaactatgcatcagtgcttgattcagtggcaaggcgacaagattgaaattgtgccagccgacaagtcagtcaatgttgccggtgccgatttagctctttgggagatggatggtcttgattgtttatctggaaaagtttgggatggagattttctaaaagtgtccgattctgatatacagccagttgaagatggagaacccaagctattattttgagggtgtcgtggagggttcaaacgtctacaccaaggacacagtagatgatctcgatgacaaacaaggacagggtttcatgtcggctgatgatttggaagaatttgatataggtccaggtggtcgaccaaggctgacatttatcagtaagaatttgtcttcggaattcagaaccaagttaatagagctgttgaaagaattcagagattgcttcgcttgggagtattatgaaatgcctggtctcagccgatcgattgttgaacatcggctacctattaaaccaggggttaggccacaccagcaacctctgagaagatgtaaagccgatatgcttgaacctgtcaaggctgagattaaacgattatatgatgttggttttattcgtccttgccgatatgctgagtgggtttctagcatagtccctgttatcaagaagaacggtaaggtaagggtgtgcatcgatttccgaaacatgaataaagctaccccaaaggatgaatatccaatgccagtagccgatcaactggttgatgctgcatcaggacacaagattttgagttttatggatggtaatgcacgatataatcagatctttttggccgaagaagatatccataagacagcttttaggtgtcctggtgcaatcggcttatttgagtgggttgtgatgactttcggcttgaagagtgctggagctacatatcaaagagccatgaattacatatatcatgatctaatcggctggttggttgaggtctacattgatgatgtggttgttaagtctaaagagatagaagaccacatagccgatttgaggaaggtttttgagagaaccaggaaatatggcttgaagatgaacccgacaaaatgtgcttttggcatatcggctagctagtttttgggatttcttgttcatgagagggggattgaggtgactcaaaggagtgttaatgcaatcaagaagattcaacctccggagaacaagacagaactgcaagagatgatcggcaagatcaattttgttagaaggtttatttctaatttatccggaaggttagagccttttacaccattgttgagattgaaagctgatcaacagtttacttggggggcagagcaacagaaagctttggatagtatcaaggaatatcttagctctcctctagttttgattcctccacagaaggggataccttttcggttatatctgtcggccgatgataagtcaatcggctcggttttgatttaggagcttgaagggaaagagagagttgtgttttatctaagtcgtcggctcttggatgcagaaactagatattcccctgtggagaagttatgcttgtgcttatatttttcatgtacaaggttaaggcattatctattgtccagtgaatgcaatgtcatatgcaaagccgatgtggttaaatacatgttgtcggctccgattttgaaaggaagggttggaaagtggatattttccttaactgagtttgatcttcggtatgagtcgccgaaggcgattaaaggacaagctatagccgattttattgtagaacatcgtgatgattcaatcggctcggtcgagattatgccatggactttattctttgatggatcggtgtgtactgatggttgtggtatcggcttagttataatttcccctagggggcatgttttgagtttgcttatactatcaaaccttatgcaaccaataatcaagctgagtatgagacagtgctcaaagggttgcaattactcaaggaagttgaagccgatgctattgaaataatgggagattctctgctagtaatcagtcaattggcaggggaatatgagtgcaaaaatgatacattaatggtttataatgagaagtgccaagaactaatgaaagcatttcggctggttactttaaagcatgtatgacgtgagcaaaatattgaagctaatgatttggcccaaggggcatcgggatataagccgatgatcaaagatattaaggtcgaaattgtagcaataacagccgatgattggagatattatgtgcatcagtatttacagaatccatctcaatcagcttcttggaaattaagatataaagtgttgaagtatactttactggatgatgaactttattatcggacaattgatggagtgttgcttaagtgtttgagtgccgatcaggctaaagttgcaatcggcgaagctcatgaagggatttgtggtactcattaatcggctcataaaatgaagtggttgcttcggtgtgcaggtatttttggccgacaatgctggaagattgtttcaggtattacaaaggatgtcaagattgtcagaaatttggagcaattcagcaagcgccggcgtcggctataaatcctatcattaaaccatggccattcagaggttggggaattgatatgatcggcatgattaatcctccatcgagtaaaggacataagtttatattggtggcgaccgattatttcaccaaatcggtagaggcggttcctttgaagaaggttgattttggggatgcgatacagtttgttcaagagcatataatctaccgatttggtattcctcaaaccattacaactgatcagggttcaattttcgtgtccgatgagtttgttcaatttgccaatagtatgggaatcaaactgttaaattcttcaccatattatgcacaagctaatgggcaagctgaggcatctaacaaaagcttgatcaagttaattaagaggaagatttctgattatcctcggcagtggcatactcggctggccgaagcgttgtggtcttatcgaatggcttgtcatggatcaatccaggtccctcctcataaacttgtttatggccatgaggctgttctgccatgggaagtgagaatcggctccaggagaacggaattacaaaatgatttaacaaatgatgagtattataaccttatggccgatgagagggaagatttggttcaatcatggttacgagcccttgcaaaggttactagggataaggagcgaattgctcgacactataacaagaaagtggtgcccaaggatttttcggaaggtgaacttgtatggttgttgatttggccgattgtggagattatgggtaccccatacccacacggcatggttatccgactagtcataggggatagcttatatatatggaatatgtaaccgatcatgacttgggtattacgtttccttttatattatggagcggcttaaagtcttgatttgataatattgtaaaatagatttaggaaaccaataccgtattggtgaaggtttctatcttgtaatcctgccccccatcctatataaggtgggcaggaggccctctagggggcatgacacaaactgatcatcagatcaatatacacccggcggattcaaatcaccaaacaggagtagggtattacctctcatcgagagggcctgaacctgtctaaatcctttgtctccgcatctatccacttttaggtatcgtgcgctacccccttttcatattgccgaaaatttgtttcgacagttggcacgccaggtaggggtgcgtcgagtttctatcaacaagtgcgatggaataatttttagaggtcgccggtatcgtcttggcttctgtagcatgagatccacttccgtcgacatcgccttcatcttcggactggttcttctcttctggagtctgcctttcattgccattgccaaaatttccaactggaccaaaccagtcaaccgggcgtcactcatccccgatcaattcaatctataaccagaagcagctgtttccatcaaatcgactttactcgtgagatcaaattggatgtcttcatgtccgtcgaaatcatcgaagaaagtaactcgccgagattgatcacgaattggcgtcaacggctgcgctgatcttttcaagaaaaaacactagttacagcacctcatcaattaattttcctcgagattgagtcttttgcacttgaagtccgaagcggagtctactaacaacagatcgatctggagccatacatagcagagtaaaatctacttcaacggcagcagggcacatcaagcgatcaggaaagaattatctagccactgctcttgatggtgcattacttatttaattggcctatagctgtgctgtacgtgcgcccaatcatgagggctgtcaactagttgacaatcttcattcatctatctacaatgcaagcatgcagcaagcgacatagtcttgcatcaagacaacaaccaaggtctcgatccggctattccgagttgattcatctctgttacaaaaattccggccgccacgacttggatcatcaacaattatcagtcgattgctttcgctgccgccgactggtgtcctcgcctatacggttggttggtcacaccactgtttatgggcgaccacgtcttcaccgatcggcttgccttcgccgccgccgactggtgtctccgcctacacggctggtgtcacgaccggaaataacccaacgggcgttccttacgtgcgtgtattattccttgtcccaggaggcaaggtacaccaaaagttgatacaattcagagtttaacaagcggaagcgtaaataattaatttattacatgggcggcgaaggcccagcacacacaaagacaaacgggaaacagcggaagactagggcgacgaccacaggcgctagacggcaggcacgagctagacaccaaagccttcatcttccaggaactcctctcctgggtttgggaaaaattgagcaagactgagtacaaccaccgtactcaacaagacacacccacaagtgcagaataaatgtaagggagtacaagggggttatcatataaggggttagggtttgcagtaaacagcattaaaagacacttagttgctcaaagctattttgtaaatacgatcctagcgctatacaagattattagtcaaggccgtgaacccacacgaacctgccttaacccaaggcctacgatgattcggaccgaactggcaacccgaccctgggtcccagctcgtcccaagccaacccaggccaaccattccacattttagttgttaagcaggttttaagaatcaaaacactaacttgggtacattgctcggcttgcccataatcgagggcgcggctattcgaataggttatactctgatcagaggtgtacatctttacccacaagacacatcttcctcacgtgtaaccacgtgccacataccaccacggtatacggacggaagacgtgacatagtttctaacccatcctagccatagacaagagtaccgacccaaccccacctacggccggaacctccgggacaggtaggcaggactgagcccctagcagcaggacaccggccttgtgccatgacatctcgactaccgggccgtagctcgtgtagccttcatttgccctagagatgtccatcgacccccgactttgtccatctccatccgtgtacttttgtttataaccagactgagccacaaactaagccttacccactagacatgtggaagtacggtagtgctttgcaacagaggcccgaagaccggtccttatatggccgaggtgctaccatcaaaaccatgcacctcgagcccagcctaaaaccattttgaggattttgaatagagggggaggtgtgaatccaattccacaataatccaaccattccatagtgtccaaatgatatgaatattcccaaagtctagagttataaaaccacctaatgttgcctaattaatcagcgaaccatctacctaaattcatactagtggaaccatgaataaagtgtccactagttggggttttgtttattctagggtgaacaaggtaataataacaataacaataataaggtcataacaaaggtaaataggtatggctagataaaacagtgataacgcgggaatttaaataaagtgataatgcaataatttaaatcaaaataattttgtaaactgggattcaatatgttcaaggatgatgtgacttgccttgctcgctttcccaaacgtcggcttcaacctccacgaagagcggatcttccgaagctgcagcgtctacacgaccaacggaaaagaaaaaggcttttactctaataaactgcatataacaagcaggaacaaagcacaaaaatgggtttttgacttcttaaggaaaaattagagacttgaacggtccaattctgagttcaaatggccaagttatggccatttgaagtttatatgctctttaaatgaatatttgcgaatttcttcatttaaattttaatttaaaaagggtttattgcgtcagccaaggggggaggggcgcgcggaccgggtccacgggagtggggcccacgcggcagcctcacggtccatggtggaccgggtgcacacgggctcacaccggccggcaccgtgggccccacgcgtcagccgcacccgagggcgcgggcggctgacggccaggccccacgcggcagccactcggcacgcccgagggcggccatgccgacgcagtcggcaggaggcagcgtgcccacgccccgatggtcgccgccggcgaccaccggcgcggcggagcggcggccgagagagggaagggaagggagaaaggaggcgacggtccacggctcaccccggggcgacggcagcgacgggggaggcggtggcgcggctcgggtcgacggggacgacggcgctccggcggtcggcgaccgaaacggagaggtggacgaggtcggcgaggatgcggcgaagccgaaggaggcggcgccgaggtggaaggcggtccgaggcgacgacggcggcggaccggagctcggcggcgatggtggagagagagagcgacgtcgtgagctcgaatccggcgaggaggaagggcggcgagaggcggaaacggacggaggaggtgcggggagggtttaaatagggttggaagggggagagggcggccggaggggaatgaaaccggcgcggcattctcgggctccatcaatggcaccggcgggattaggggagggtttccaaacgaatccaagggagagagggagggaaaaatggggggaaagggagaggggatcacggggagtatttccccccactttattgcacgcggggacggcgggatgcggcggatttggcggcggcggcggcgcttggcgcgggcggagcagcgggagcggcgggaggtcggggatgacgggtggtcccgacccgtcagcgagggtggcgggcgggcccgcccgtcagcggcgcgcgcgtggggaggggccgaatggcccacgggggagaagagagagagagagagagggggaagagcgagatgggccgagccggcccaagggagggaagggggactttttagggtttttctttttataaaaccttttcaactttgtttatttcttaataattattatttgtactctgaaaattccactaaaatttatttacacattttaggcttttaggaaatatacaaaaatcctctaaggcttatttgacttttactttgcacattttaatttttggaggctttcacatggattttaattattctaggcataatttaaaggatatattttagggtcgttttgggacgtgacagctggcctattatgccgccgttgttgggcgtcttcgctttcaccatcgaccgccttcgttgccgccaactggtttcttcattgttatttatggacgactttgttcccacattggccacctctgccatcaccaaggggaataatgcaaagctaagtcatcatttatttcattctttatatgatattttccttttcctctgcgtcactatgtcaactggttcgccgttgactagtgagtcaggggctagagatgttatatcatattttttaaacattttttataatatttatcttgattgcttgcgacatattctgagtacaaaagtgtctatcgagttatggagttccatcttcctatgctttctgtttgttttgccaatggatagttgcctttgggccgattcctagcacccgggggcttgttggatggaccgaataacgcaaggtgctaagtatgattcgaaataaattaaaagcatagagataagttaatttattttctgctcttaataattgcaaaagtacccgagtagtaaactctgacccgtgaaactttgttccattaatgacaaactcatgtcactcatatgcatgtttgggaagtgcttaggccgactcctggtgcttggtggctatgactagtcagacagagtgtttaaacgtaatgagtcatctgctcggggaaaatcaaaattgacaagagaagaaatacatatttataaatattttaaaatacttgaatttttctcgagtattatatttatatcagatactactcatcctatatgtttgttctacaggatgcaaatccagatatgcataaacgagattcatggctttaagcttatctcttacgctccaggaatggatcagtcagaacatcaccgccggtttgctttcgccgccaccgactggtgttaccgcctgcacagctggcctattatgccactgttgttgagcgtctacgtcttcaccgaccggtcgcctcgtccgccgccgactggtgtttccgcctgcatggctggcctattatgccgccgttgttgggcgtctacatcctcaccgaccggctgcctcgtccgccgccgactagttaatgaagacattcctagcattcactcatctccaaatgaagctacacttgatatagctggtccaattacaaggagtagagctaaacaattggagaaggaaattcattctcaggtgaacgctaaccttatgcttaataatcagattacattgaatgaacctatgcttttgagtacttgtttcaatgttcttaggaatgatggagtgcacgaacaagcatgggatgatgatggattctgcccgccaaatatatgcaaggaacctggacgtgcatgagagaggaaagaccattcagctaccatgaatatcagccattgaagtgcaagcaaataattcgggagttaggaatgcatgcaaccagcaactgggttgctgtccacacacgctccagcatgcatgcagagaataccaaccagccaggcgtcctactaggcttggtttttaataaaagtagtgctgcaacttcccactacatgttctcaattattttccaccaagctgaaactccactagtgctatatatccctgtaatggatgacgtgaacagtaactcgtgattgcaatttcagaataccaactcttggaattcttgttccagcgtgagtcttgagaggcttgcaaacttgttcttttgattcctgagggagttgtcgaacgccgaactgtggttcacccagtttgtgccttcacgtctatacggcgtgattgcgtgggctgttcgtcggtacgtggaagggtgattgtctcggtagttcgtcgcgtggacagcctcgcggtgcattgcctcttcaccaggtcacgcaacgacaatttatcaagttcgcagatcctacgagaagatcgggccacaacaacttgctacacgtgctgcatagacatgtgcatatcatctggtatcagagccaccgtttcctcagtaggattgttcttgtttttggtaggatagagtttaaatacctactgtccactgatagccaaaaagaaaacctacagcccaaattcatacgtgctactgattttgtagtttgctttatcgagttttaatcctttaagatttgtctagttgctgaattttcttttccacatcgttctagttgttatctttgttctaatcatcaaatcgcttgctgcacgtacccaaccatcccacccttgatctgatcgtccttgcttgctgcatatatataaacagaaaaaaaaaatatatacccacccatcccacccttgttttcttcccgccacatattccccaaccgagtttcttgtttttgtgctgcgccatccatcttagtgatccttatgagcccctttagttgaaagttgtgctgtgtttgtcacaaaggttaaaagaaaagatgtctatgggtcaaaagaaggactgaaaacaacgagttcttgaaaaaaacaagaaaaaaaaaaggaaagaaaagaaataaaagagaattgtgttcagcacaccaaaaggggtttgggcagcaacaagttacggttggtgcaaattggtgttcatctatccacttcctgcatcttgttcctttctttgtacatcttttcctttatattcagcaacttagacttgtgttcttggattattattcggttttgcatccctacatttcagtgcattccacttacatattaccccaccaagctccacttaaaagcaccgtgagttgttgcaccgtcgtcgctgttacaatcacttttccactacagattgcagccacggttcttgctcttttcagggagagaaagaacttgttttgtaagtggtgagggagtgattccacatatattccacatctatattgtcctatttttttcccctctactaatattgcaggacgtggagatggtgccgctgtttcggtggatgaatttcaggagttgcgtacacaaatgaatgatttggtgcagcagctccaaactctccaattgaacatgccacatagagaaccgccaccaaatgaggatgatgacattgaggaggaggatgaggtagggcgtcgtcccgctggccgtggacgtggcgggcgcggtcgtggttttgctaattttggtcgtgctcggcgcgttcctattggaggtggaggagattatgatggtgatgatcatatgttgtccgacatggatgatcatcgacatggtggccatcatggttatcgtgaccgccatcgtcgtcataatgatgatggtttaagacacgtgaaagtgtctattccccctttcagcggacaggagaatgctgatgcttattttgaatgagagaccaaggtggaacaaatatttgatttgtatgaatactctgctgaaaagaaggcaaagcttgcagccattgagtttaaaggctatgccataacttggtggaatcaggtccgtactgaatatcagagagttgggcatgttcgtataacttgggaagacatgaagagagaaatgcgacgtcgtttttttcctgcatattactctcgtgatctacatttgaagctgaaacgtcttgtgcaaggtactcgtactgttgatgaatattttcaagaattggaaatgtgtttacttcgtacagggataactgaagatgaggaatccacaatggctcggtttctggttggcctcaataaacccattgctgataaagtggatatgacaaactacacatgtctcactgagttggttcattttgcaaagagggctgaaaggcaaattgctacgtcttacaaatacaatgcttcatggcgtcattcccaacagcaaggggatgtcatgcctcaattccaacagcaagtagctgcaacgcccaaatcctcatctcgtggagcaaatagatctcttccaacttcttccaaacaactggatgtgaaaggtaaagctgtgagttcaagtcagcccacttcttctactgcagccacccaacgcaagacaagcaagattgagtgttttaagtgtggtggtcatgggcataagcaagctgaatgtcccaatcgtcgtactattattgcacttgctgatggttcttatgattcacaaagtgaagaggaggacgagtttaacaatgtatttgcagatcttaatcttgacacttgtgagtattcagcagaggatggtacatttgagctaggtctaaattgtttagccattcaacctattccaacttttgctcacaatgacatattacaagatgttgtttctccatctttcagcgagattactagtgatgattttgatgagttgcttgctgattttcctgatttgacgccttctataatgaacacaccatctacttctttggtggtgaggcgagttctttccactcaatttgttgctgctgaacaaggccaacgccataatttgtttcaatccagatgcaaagtgaaaggacaagtgtgccgtttcatcatagatggtgggagctgcaataatattgttagtgctttgcttgttgagaagcttggtttgcagccacgtcgccatccacatccataccatatgcaatggttgaataattctgggacagttaaggtttcagccatgattcgtttgtcattttccattggtgattatcatggagaggtggattgtgatattgtccccatgcaagcatgccatttgctgcttggtcggccctggcaatttgatgtggactcggtgcattttggacggtctaacaaacacactttcattcacaatgacaagaaggtggttcttgttccattatctccagaggagatacatgcttcagatatggctcgcaagaaacgagaggaatctgacaaaagaaaattgagtgagatccccaacacaagtaagggagagagttctaacccatccagccacatacagcctcatgccaatcctaaacagccacgccacactaagtgtctctttgtgagcaagagtgatatgtgtcgcgtcccaaaacgactctaaaatacatcctcaaaattatgcatagaataagtaaaatccatgtgaaagcctccaacaattaaaatgtgcaaagttaaaagtcaaataaggcttggaggatttttgtatatttcctaaaagcctaaaatgcgtaaataaattttagtggaattttcagagcacaaataataattattaagaaataaacaaagttaaaaaggttttataaaaagaaaaaccctaaaaagtccctttttcccccccccccttcccctcttgggccggctcggcccacctccctccctttctctcctctcccccgcggcccaatcggcctcctccccgcgcgcgtgccgctgacgggcgggcccgcccgccaccctcgctgacgggtggggcccacccgtcatcccctacctcccgccgctcccgccgcctagcccgtgccctagcgccgccgccgccgcgaattccgccgcctcccgccgtccccgcgcgcaataaagagggggaaagcactccccgtgattccctctccctttccccccacttttccctctctctctccctcggattcgttcggaaagtttccccctaacttcgccggcgcatcaatggcggccggatcttccgcaggcgattccccctcatccggcctctctctccccctcccgaccctatataaacgctccccgtgcctccctccaccatttccgccactcgccgctctctctccccgtcggaatcgagctcgcgccgtcgcccctctctctccgccgtcgccgccgagctccggtccgccgccgtcgtcgccccggaccttctcccgcttcggcgtcgccttcttcgggttcgccgcaacctcgccgacctcgtccacctctccgtttcggtcgccgaccgccggaacgccgccgtcctcgtctacccgagccgcgccgccgccttcctccgctccggtcgccgtttccgccgtcgccgtcgaaccggggtgagccgtggaccgcccatttcgtttccctctcccctcccctctctcggccgccgctccgccgtgcctatggccgccgccggcgaccataggggcgcgggcgcgccgcctcccgtcggctgtgccggcgaggccgccttcgggcgcgccccgcggctgccatgtggggcccggccgtcagccgcccgagccctcgggtgcggctgacgcgtgggacccacggcgccggccggtgtgagccgcgtgcacccggtccaccgtggaccgagaggctgctgcgtgggccccactcccgtggacccggtccgcgcgctcctcccctcggctgacgcaataaatccgattttaaattaaaatttaaatgaagaaattcgcaaatatccatttaaagagcatataaacttcaaatggccataacttggccatttaaactcggaattggaccgttcaagtctctaatttttccttaagaagtcaagaacccatttttgtgctttgtttctgcttgttatatggagtttgttagagtaaaagccttttcttttccgttggtcgtgtagacgctgcagcttcggaagatccgctcttcgtggaagttgaagccggcgtttgggaaagcgagcaaggcaagtcacatgatctttgaacatattgaatcccagtttataaaattatgttgatttaaattattgcattatcgctttatttaaattcccgcgttatcactgttttatttagccatgcctatttacctttgttacgaccttattattattgttattgttattatttccttgttcacactagaataaacaaaaccccaactagtggacactctactcatggtatcactagtatgattttaggtagatgcttcgcttttaattaggtaacattaggcggttttacaactctagactttgggaatgttcgtatcacctggacactatggaatggtttggttattgtgaaattggcttcacaccgctccttctattcaaaatccccaaaatggttttaggctgggctcggggtgcatggttttgatagtagcacctcggccatataaggaccggtcttcgggcctctgttgcaaagcactaccgtacttccacatgtctagtgggtaaggcttagtttgtgactcagtctagttataaacaaaagtacacggatggagatggaagaagtcgggggtcgatggacatctctaggacaaatgaaggctatacgagctgcggcccggtagtcgagatgtcatggcacagggccggtgtcctgctgctaggggttcagtcctgcctgcctgtcccgggggttccggccgtaggtgggattgggtcggtactcttgtctatggctaggatgggttggaaactatgtcacgtctttcgtctgtataccgtggtggtatgtggcacgtggttacacgtgaggaagatgtgtcttgtgggtaaagatgtacacctctgatcagagtataatctattcgaatagccgcgccctcggttatgggcaagccgagcaatgtacccaagttagtgttttaattcttaaaacctgcttaacaactaaaatgtggaatggttggcctgggttggcttgggacgagctgggacccagggtcgggttgccagttcggtctgaatcatcgtaggccttgggttaaggcaggttcgtgtgggttcacggccttgattaataattgtatagttctagaatcgtgtttacaaaacagctttgagcaactaatgtctttaaatgctgtttactgcaaccctaaccctttatagtataactcctttgtactcccttgcattcgagacccctcgtgctgagcccgcgcccgtggttccccaggagggggaagcctccggcgttggtagcacggaggatgcgctgttgctcaccttccgtcctggcccgtcgtagcggtagacgagcagttagtaggcttgcgcgtgtgttctttctcgtttgtcttcttgttggagttgtgtggggcatggttatgccggtgtgtggcataactgtgtcggagcctgtctttattttatttgcctaagcaacttgaactttaatgaaccaatttaatagcagtaataaattcaagaattatggtagtcgtgggtggttagctttaattgtcagctctctctgtttgctggttctgtgtggggttttcagatgttgacgaccaggagaagtgctgctaccggtgatggcaaccaacccgaaggcagcaaccaccaccaccagggcaggccaccttcacctcctcctacgcctccaccaccaccaccagacaccaacgccattctcacccaaatcctcgcccagcaggccaacatgatgactgctttcctccaccacctccaaaattcgccacaacataatgctccaccaccacctccccaacactctaaactcgccgagttcctccgcatccgcccacctaccttctctagctccaacaaccccgtggatgcgttggattggttgcatgccgtggggaaaaagctagacactgtgcagtgcagcgatgaggagaaagtcatcttcgccgcccaccagctgtaggggcccgcatctttatggtgggaccatttccaggctacgcagccagaggggcaacctattacttgggctcgcttcaccgccgctttccggagaacccatgtgcccgccggagtcatggcccttaagaaaagggaattccgagagttgaagcaaggcaaccgctccgtgatggagtatttgcatgagttcaacaacctggcccgttacgccccggaggatgtgcgggaagatgaggagaagcaagagaagttcttggcaggaatggaccctgagctgtccgtccgtctagtctccggggactatccggatttccaacgtctggtggacaagagcatccgcttggaagccaagcacaaggaactggagtcgcacaagcgccgcttggcgaatttccgcaatcaacagggtgctaaccaaagggtccgctacaccaatccctatccagggggatcctcctcgcagcagcaacaacagcagcagcaacctcgctccgcgcctcgacctcaattcgtggtgcgcgtcccacagccgcagcagcagcagaatcaacaagggactcgtgcgccccgtcctcctacgccaactgtgcagcctggtcaaggccgcagggacgctcaaggtccgcagcgtctgtgcttcaactgcttcgagcccgggcactttgcggataaatgcccaaagccgaggcgtcagcaaggccaagcgcctccccgctccaacaacggtgggaaggatgtcattcggggtcgggtgaaccacgtgacggccgaggacgtgctgacaactccagacgtcatcgttggtacgttcctcattcattccatccctgctaccattctgttcgactctggagcttcccactcgtttatatctgtgccattcgtggggagaaatcagttgggggtagaaaggcttaggaaccctctgctcatcaccacccctggaggggttatgacagcaaagtattatagccctgccgtccccatagaaattcaggggattccttttccctcggatctgattctgctagacaccaagaacttggatgtgatccttgggatgaattggttggctcaattccaaggagtagtggattgtgcgagacgcactgtcactctgtaccgagggccggaacaaccggttgttttctttgcacccccaacctctgtcagtagttccgaacttcatcagataggactgtcagaaatccccattgtcagagagttcggagacgtgtttccggaagaactacccggtatgccgcccaaacgacagattgagttccggatagatcttgctccaggaaccacacctctgtacaagcgaccctaccgtatggcagcaaatgaactggctgaagttaagaaacagttggaagagttgaaagaaaaggggtatatacgtccgagtacttccccctggggtgctcctgtgatttttgtggagaagaaagacaagacgaagaggatgtgcgttgactacagagctctcaatgaagtcaccatcaaaaacaagtaccctcttccccggatcgatgatctgttcgatcagcttaaaggtgccactgtattctccaagatcgatcttcgttccggatatcaccaattacgtattcgtgatgaagatattccgaagaccgcattcaccacgcgatacggactgtatgaattcacggtgatgtcgttcggtttaaccaatgcacctgcctttttcatgaacttaatgaacaaagtgttcatggaatacttggataagtttgttgtggttttcattgatgacattctggtatactcacaatcagaggaagaccatcagcaccatctccgtctggtattgggaaagttgcgggaacatcaattgtatgccaaacttagcaagtgtgagttctggttgtccgaagtcaaattcttagggcacgtgatatctgctaaaggagttgctgtggaccccgaaacagtgaccgccgtcattgattggaaacaacccaagatagtcactcaagtccgcagtttcttaggtttggcaggatactaccggaggttcatcgagaacttctccaaaatcgctcgacccatgacacagttgttgaagaaagaagagaaatttgtgtggagcccgcaatgcgagaaggcgttcaaaactctcaaagaatggctggtttcctcgccagtgttaatcttgccggatactcgcaaggacttcatggtgtattgtgacgcttcgcgccaaggattggggtgcgtgctcatgcaggatggtcatgtggtggcctatgcctcacgccagctacggcctcatgaaggcaactaccctacccatgatttggagttagctgcggtggttcatgctctaaaaatctggcggcactatctcattgggaatcgctgtgaaatatatactgatcataagagtttgaaatacatcttcactcagtcggacctgaatcttcggcaaaggagatggttagaactcatcaaggattacgatgtgggaattcactatcatcctggtaaggccaacgtggtcgctgacgccctaagtcgaaagagccattgcaacactcttaacgtccgcggcattccacccgaacttaatcaacagatggaagccctgaacctaagcatagttggtcgcggattcttggctgcgttggaagccaagcctaccttgctcgatcgaatccgcgaggctcagaagaacgatccggacatgcatggactcctcaagaatatgaaacagggtaaagccgctggtttcacagaggatgaacacggaaccctatggaacggaaatcgagtatgcgttccagataacagagaacttaaacagctgatacttcaggaagcccacgaaagtccttattccatccaccctggcagtacgaagatgtacttagacttgaaggagaaatactggtgggttagtatgaagcgggaaattgcagagttcgtggccctttgtgatgtgtgccagcgtgtcaaggcagagcaccaacgaccggccggacttctccaacctctccaagtacctgaatggaaatgggatgaaattgggatggattttatcaccggacttccaaagacccaaggtggatatgattctatatgggtagtggtggatcgattaaccaaggtagctcgattcattcctgtgaagaccacctatggagggaacaaactagccgagctctacttcgcaaggatcgtgagtctccatggcgttcccaagaaaatcgtatctgataggggaagccaattcacctctcacttttggaagaagctccaagaagagctgggtacccgattaaacttcagcaccgcataccacccgcagacagatgggcagaccgagcgtctaaatcagatcctagaagatatgcttcgcgcatgtgtcctggatttcgggaagacctgggataagagtctcccctatgccgagttctcctacaataacagctatcaagccagcatacaaatggcaccttatgaagcgttgtatgggcgcaaatgccggacaccgctcttgtgggatcaagttggggaaagccaagtattcgggactgatatcctgagagaagctgaagctaaagtcagaaccattcgggataatctaaaggtggcacagtcccggcagaaaagttatgcagataaccgtcgccgtaacctggaattcgcagtggacgattttgtgtaccttcgggtcacgccattgcggggtgtacacaggtttcagacaaaagggaagctcgcacctcggtatgtgggtcctttccgtatcgttgcccgacgcggagaagtcgcttaccaattggacctgcccgcctccttgggcaacgtgcatgatgtgttccatgtgtcgcaactcaagaaatgccttcgagtgccatctgcgcaggccgactcagagcaaattgaagttcgcgaagacttgacctacgtggagaggccagtgaaaatcctggacaccatggagcgcaggaccaggaaccgggtaatccgtttttgcaaggtccagtggagcaaccacgccgaagaagaagctacctgggagcgtgaagacgagctgaaggcagcccatcctgatctcttcgccagttcttccgaatctcggggtcgagattccgtttaaggggggtaggtttgtcgcgtcccaaaacgactctaaaatacatcctcaaaattatgcatagaataagtaaaatccatgtgaaagcctccaacaattaaaatgtgcaaagttaaaagtcaaataaggcttggaggatttttgtatatttcctaaaagcctaaaatgcgtaaataaattttagtggaattttcagagcacaaataataattattaagaaataaacaaagttaaaaaggttttataaaaagaaaaaccctaaaaagtccctttttcccccccccccttcccctcttgggccagctcggcccacctccctccctctttctcctctcccccgcggcccaatcggcctcctccccgcgcgcgtgccgctgacgggcgggcccgcccgccaccctcgctgacgggtggggcccacccgtcatcccctaccttccgccgttcccgccgcctcgcccgtgccctagcgccgacgtcgccgcgaatcccgccgtcttccgccgtccccgcgcgcaataaagagggggaaatcactccccgcgattccctctccctttccccccacttttccctctctctctccctcggattcattcggaaagtttccccctaacttcgccggcgcatcaatggcggccggatcttccgcggccgattccccctcatccggcctctctctccccctcccgaccctatataaacgctccccgtgcctccctccaccgtttccgccactcgccgctctctctccccgtcggaatcgagctcgcgccgtcgcccctctctctccgccgtcgccgccgagctccggtccgccgccgtcgtcgccccggaccttttcccgcttcggcgtcgccttcttcgggttcgccgcaacctcgccgacctcgtccacctctccatttcggtcgccgaccgccggaacgccgccgtcctcatctacccgagccgcgccgccgcctttctccgctccggtcgccgtttccgccgtcgccgtcgaaccggggtgagccgtggaccgcccatttcgtttccccctcccctcccctctctcggccgccgctccgccgtgcctatggccgccgccggcgaccataggggcgcgggcgcgccgcctcccgtcggctgtgccagcgaggccgccttcgggcgcgccccgcggctgccatgtggggcctggccgtcagccgcccgagccctcgggtgcggctgacgcgtgggacccacggcgccggccggtgtgagccgcgtgaacccggtccaccgtggaccgagaggctgccgcgtgggccccactcccgtggacccggtccgcgcgctcctcccctcggctgacgcaataaatccgattttaaattaaaatttaaatgaagaaattcgcaaatatccatttaaagagcacataaacttcaaatggccataacttggccatttgaactcggaattggaccgttcaagtctctaatttttccttaagaagtcaagaacccatttttgtgctttgtttctgcttgttatatggagtttattagagtaaaagccttttattttccattggtcgtgtagacgctgcagcttcggaagatccgctcttcgtggaagttgaagccggcgtttgggaaagcgagcaaggcaagtcacatcatctttgaacatattgaatcccagtttataaaattatgttgatttaaattattgcattatcgctttatttaaattcccgcgttatcactgttttatttagccatgcctatttacctttgttacgaccttattattgttgttattgttattatttccttgttcaccctagaataaacaaaaccccaactagtggacactctactcatggtatcactagtatgattttaggtagatgcttcgcttttaattaggtaacattaggcggttttacaactctagactttgggaatgttcgtatcacctggacactatggaatggtttggttattgtgaaattggcttcacaccgctccttctattcaaaatccccaaaatggttttaggctgggctcgaggtgcatggttttgatagtagcacctcggccatataaggaccggtcttcgggcctctgttgcaaagcactaccgtacttccacatgtctagtgggtaaggcttagtttgtggctcagtctagttataaacaaaagtacacggatggagatggaagaagtcgggggtcgatggacatctctaggacaaatgaaggctacacgagctgcggcccggtagtcgagatgtcatggcacagggccggtgtcctgctgctaggggttcagtcctgcctgcctgtcccgggggttccggccgtaggtgggattgggtcggtactcttgtctatggctaggatgggttggaaactatgtcacgtctttcgtctgtataccgtggtggtatgtggcacgtggttacacgtgaggaagatgtgtcttgtgggtaaagatgtacacctctgatcagagtataatctattcgaatagccgcgccctcggttatgggcaagccgagcaatgtacccaagttagtgttttaattcttaaaacctgcttaacaactaaaatgtggaatggttggcctgggttggcttgggacgagctgggacccagggtcgggttgccagttcggtctgaatcatcgtaggcctttggttaaggcaggttcgtgtgggttcacggccttgattaataattgtatagttctagaatcgtgtttacaaaatagctttgagcaactaatgtctttaaatgctgtttactgcaaccctaaccctttatagtataactcctttgtactcccttgcatttattctgcacttgtgggtgtgtcttgttgagtacggtggttgtactcagtcttgctcaatttttcccaaacccagaagaggagttcctggaggatgaaggctttggtgtctagctcgtgcctgccgtcaagtgcttatggtcgtcgccctagtcttccgctgtttctcgtttgtcttcgtgtgtgctgggccttcgctgcccatgtaataaattaactatttacgcttccgcttgttaaactctgaattgtatcaacttttggtgtaccttgcctcctgggacaaggattaatgcacgcacgtaaggaacgcccgttgggttatttccggtcgtgacaatatgagagaagtgagaaacaccacagccccattctttgtgctcttgcacaaggaggtcctactttcaactaacgatttaccttcatcgctgcctagtgttgttcttgatctcttacaggacttcgaagatgtttttcccgatgagataccagctggacttcctccactccgtggaattgagcatcaaattgatttggtaccaggtgcttctcttccaaatcgtccagcctaccgcaccaatcctgcagagacaaaggaaattcagcgacaggtaaaagagcttttggacaaagggtatgttcgtgaatccttatcaccatgtgctgttcccgttcttttagttccaaagaaagatggctcttggcgcatgtgtgttgattgtcgtgctctcaatgctataactgttcgatatcgccatcccattccacgacttgatgacatgttagatgaattgagtggttccatcattttcaccaagattgatttgcgtagtggctatcatcaaatccgcatgaaacttggtgatgaatggaaaacagcgtttaaaactaaaattggtctctatgaatggcttgtgatgccatttggcttgacaaatgctccttcaacttttatgcgcttaatgaaccatgttttacgagctttcattggcaagtttgtagttgtttattttgatgatattctgatctatagcaaatcatttgatgaacatcttgatcatatccgtcaagtacttgctgttttgagggaagagaaattgtatggcaacattgctaagtgcaccttttgcacagaccgtgttgttttccttggctttgttgtttccgcagatggtattcaggttgatgaagagaaggttaaagcaataaaggattggcctacaccggtaaatgtgagccaagttcgaagctttcatggtcttgcaagtttctataggcgttttgtcaaaaatttcagcaccctcgctgcaccccttaacaatctcacaaagaaggatgttccattcacgtggggccatgaccaagaccaagcatttcacacactgaaaacaaagctttgtgaagcaccgctgctacaacttcctgattttggtaagacatttgagatcgaatgtgatgcaagtggtattggcataggaggtgtactgctgcaagaaggtaaacctgttgcctacttttctgaaaagctaaatggtccacatctgaattactcggtttatgacaaagagctttatgccttagttcgcgttttggaagtttggcaacattacttgttccctaaagaatttgtaattcattctgatcatgaagctttgaaatatcttaaaagccaaggcaagctgaaccgtcgacatgctaaatggattgaattcattgaaacatttccctatgttgtccaacataagcgtggtaaagataacattgttgccgatgccttgtctagaagatgtgcattgattacacaactagatacgaaagtgcttggtttggaatccattaaaacactttatgctgttgatgctgattttaacgaacctttctctcgttgcattgatggaaaaggttgggataaatattatgtgcatgatggcttcttgtttcggactaacaaaatatgcattccagcttgttcgattcgtcaagtccttttgcaggaagcacatgccggtggactggctggtcattttggtgtcaaaaagacattggacatgccctctgatcatttcttttggccacatatgcgacgtgatgtccagcggcacgttgggtgctgcatcgtttgcttgaaagctaagtcccgcctcaatccccatggtttatatactccattacctattccacatgtaccttgggaagatatatctatggactttgttctggggttacctcggtctcagagggggagggattctatttttgttgttgtagatcgcttttctaaaatggcacattttatcccatgtcataagagcgatgatgcttcacacgttgctgatttgtttttcagggagatcgttcgtttacatggagttccaaagactattgtttcagaccgggatacaaaatttctcagctacttttggaagacattgtgggctaagcttggcacaaagttgttattttcaaccacttgtcatccacaaacggatggacaaacagaagttgtcaaccgtaccttgtcaaccatgttgcgtgctgtgttgaaaaagaatttgaagctatgggaagactgccttccacatgttgaatttgcttataacagggcagtccattctacaacaaactcttgtccatttgaaattgtttatgggtttataccgcatactcccatggatcttttgcctttaccattacaggaacaagttaacttggatgctacgaaaagatcagactttatcaagcggttacatgcggagacaagaaagaatattgagaagaaatcagcacaatatgcaaagcaagcaaacaaaggtaagaagaaggttacattccagccaggagatcttgtatggttgcatctatgcaaggatcgctttccccaacagtgtaagagtaagttatcccctaggggtgatggtccgttcaaggttctccaacagataaatgataatgcttacaaacttgagctgccacctgaatattccaatgtgagtaccacattcaatgtcaaggacttgcttccatttcctggtgagcctgagtcgaggacgactccttcccaagagggggaggctaatgaagacattcctagcattcactcatctccaaatgaagctacacttgatatagctggtccaattacaaggagtagagctaaacaattggagaaggaaattcattctcaggtgaacgctaaccttatgcttaataatcagattacattgaatgaacctatgcttttgagtacttgtttcaatgttcttaggaatgatggagtgcacgaacaagcatgggatgatgatggattctgcccgccaaatatatgcaaggaacctggacgtgcatgagagaggaaagaccattcagctaccatgaatatcagccattgaagtgcaagcaaataattcgggagttaggaatgcatgcaaccagcaactgggttgctgtccacacacgctccagcatgcatgcagagaataccaaccagccaggtgtcctactaggcttggtttttaataaaagtagtgctgcaacttcccactacatgttctcaattattttccaccaagctgaaactccactagtgctatatatccctgtaatggatgacgtgaacagtaactcgtgattgcaatttcagaataccaactcttggaattcttgttccagcgtgagtcttgagaggcttgcaaacttgttctttcgattcctgagggagttgtagaacgccgaactgtggttcacccagtttgtgccttcacgtctatacggcgtaattgcgtgggctgttcgtcggtacgtggaagggtgattgtctcggtagttcgtcgcgtggacagcctcgcggtgcattgcctcttcaccaggtcacgcaacgacaatttatcaagttcgcagatcctacgagaagatcgggccacaacaacttgctacacatgctgcatagacgtgtgcatatcactagtgtttccgcttgcatggccggcctatcatgccgccgttgttgggcgtctacatcctcaccgaacggccgcctcgtccaccgccgactggtgtttccgcttgcacagcaggcctattatgccgccgttgttgggcgtctccgtcttcaccgaccggccgccttccccgccgccactggtgtcctcgcctgcacgactggcctattatgtcgtcgttgctgggcgtctacgtcatcatcgatcggccgcctcgtctgccgccgactggtgtcctcgcctgcacgaccggcctattatgccgccgttggtgggcgtctccgtcttcaccgaccggccgccttcgccgcagccgactggtgtcctcgcctgcacgacaggcctattatgccgtcgttgctgggcgtctatgtcttcaccgaccggccgcctcgtctgccgccgactggtgtctccgcctgcacggctggcctattatgccgccgttgttgggcgtctacgtcttgaccgaccggccgcctcgtctgccgccgactagtgtctccgcctgcacggctggcctattatgccgccgttgttgcgcgtctacgtcttcaccgaccggccgcctcgtccgccgccgactggtgtttccgcctgcacggctggcctattatgccgccgttgttggccgtctacgtcttcaccgaccggccgcctcgtctgcggccgactggtgtcttcgcctgcatggctggcctattatgccgccgttgttaggcgtctacgtcttcaccgaccggccgcctcgtccgccgccgactgatgtttctgcctgcacggctagcctattatgctgccattgttgggcatctacgtcttcaccgaccggccgcctcgtccgctgccgactggtgtttgcgcctgcacggctggcctattatgccactgttgttgggcgtctatgtcttcaccgaccggccgcttggtctgccgccgactggtgtctccgcctgcacggctggcctattatgccgccgttgttgggcgtctacgtcttcaccgaccggccgcctcgtccgccgccgactggtgtgtccgcctacacggctggcctattatgccgccgttgttgggcgtctacgtcttcaccgaccggccgcctcatccgccgccgactggtgtcaccacctgcacggctggcctgttatgacgccaactgatgctatcttcttcacggctggctacatcgccgtcaccgctaataggcgtcagcatcttcaacacaagctgcctacgtctgctgaccgactggtttcttcacttccatggctgcatgattctctaccactactgatggacatcatcgtcttccatcgccgactggttatgccgctgccgactggtgcttttatcttcacaactgcacgtcttcactaccggtttgcttctgttgccaccgactcgtgttcacttcatcacggcaatgcaactttgtcatcatggtagagtgacttcatctttattatcttcggcaccggcaaactctattgctgctacttcgcaagttttgctactgcaccaaccacgacatctttgtgaacctcgacatctcgtgatgcagcaacgggggttcccgatctttcgatgagaggaggataaacttcgatttggggaaggatacgacgttggcggtccgactacaactaccacaggggtgctgcgccttagcaaccggtacaccgactccacgttgttgctgttcttgccgtgccaagaacaaccttgaacctgcaagcaatcgaagaacaagcaagaacaagttgacaaggaaacagctcacggcacttgtcaaatgatcaaacttaaacaaaccaaaatggggttctgaatacaagtatccgggtggtctagccgacacacgcgagtacaaggaagtagctgcagctaaacttatatcaaaacaaaacccaaagtgcaaaatggtggctgctaggagtttatataggtggaggaatgaccacgagaggaggtgggagcaaaccctaggttttgtggacccctaatgggctgtaatgatacaaggcccaagcccaagtttctgatgtaaagaactattttcgtcattctgagcagcctgggtcaaagttgatggtgaggccacacatagctgaaagtagacgacgagatctttccaacaagtactcatttgccccgtttgtcctccggagtgaagagcattgacttcatcaaatcagcgctgctagtgctgcttgcgatttggttcctctcccatattcctaacaacaagtagatcacaacaaccatttagtagcacccaattctgagaagaacttgtatgattagctaggaatgactttacctgataattaagttcacgagctcgagctctagtcattggtccttgctgtgcaataggcgtggttgtatcgttggaagggatgtcctcatcatctcggcatgcgatgccgtgttattttactacaacaagtggctctccaatattcaggatttctacttggacatcttcaacgcatatcttcaatcaagcaatgactactcgatgacaagaagttacagttctcgactctatgttcagttgtttcccaactaaccaaagagtcgggggctacacaaatacaagactctcaaaattcgacaagctgaagtaatcaattaatcagccaacgagtcaattccaggagtcattatcttcgtcttcgttttagagcagagttatcaaccaatcagctcagtttcgacgagttggacaacatcatctattttcctccaagtgaagcatctgcaacagctataccaccaatttgatggattattgtcactgacatcatcaccagcacctctgcttcatcggccctgacatcaactctgttgctaatggatgactatgtcttcgccggcttattatttcactttcacggttactatcgactggatcaccgacatcgttatcttcatcaacatcctatcaagcctcttcaacatagcccactctactgctattgatgggcaacttcgtcattatacttgatcatctatgattgctgcttatcatcattactgtcggttgcgtttgtcgtcgccgactattttcttcatcttcataattggtggatttcgtcatcgcttttgatgcgtatctacatcttcaccgtcggctagctttcgtcaccaccgaccgatatactcgccttcatggatggcttattatgtcaccactaatgggcatcttcatctacttcaccagctgcatcgtctgtcaccgactgattattttgctgctatggctacacaactttatcgctggacgccttcatattcattgctggctgacctgactgttgccgactggtttcttcacctccacggctatgcaacttcatcacttttgattggtatcactatcttcactactaccaatatttttgccacttctggtgggcaatattatctctatattggtcgtcttgtctctatgccaactacgccagctactatcaatggaccattgtaactacgacagaaggacaagctatatgatcaggggcttactatctcaaacacaagtatcataccttcaatttggacttgttccggatacatgcaacatgaattcatgatcatgggtctattttctatgctcaaagactggactatttattattccccgtaagggttatcaaccgaatacttgcgccagtcgggattcaattattatatattttgcagtatctcataagggataatcactcagatcagaagctattcatatgagctacacttggtctatatcacccagaagatttattactcgggagcatattacatgcgtcatactttaaagggtgtcgaaggcatattttttggcctaggcctaatatgtctgcagcccatattttcaggtgtggcctgtcacgttcttttagggacttaggcactttttgcttaggccaaagtgcgcgtgatctagtgcccaataccttaaaatccttttataccgcagttactcaactttttaggagttggtacaatgcatcttaaaatgtgtcaaacagtaaagctttatatagctgccccggtgacttttttatatagtcatggcgctgtttgggtttatcaagcaattgattggatacaatatcattgctttttgccacgtaagtgtgcatttttattgaccaatattatggcttaggctgattatatattttggtcattttccggacgattgataaatccttatgagtttatttactcggattttataccacatatgccatatatttccaggtgtggtgaaaccatgtgtcttttagggactcaagcacatctgttaaagcagtgtgcacatggtgtatgcccaatactttggaaatttatttattcacaacatacaagcttctttatagctgttttgctatgtgtattcaatgatgtagtcagctttaggttgcacacatcatattttacaaagcagtcggtatatcactcggatcatgttattcagggattcacaccgcatatgccatatattaatattaagtcacttggttgactacaattatcaaaaccactcagttggtgcatctattaggtacatctattcgatgcacctgactttatttttcagccctccataatcttcatatttggtaaaagtactcgggagatcatggcgaagatgattgaagcactcggctttggagtaatctagttcgagagaagattatctttccgactgtgaaggtctcaggggctactgtggagattatgggtaccccatacccacacggcatggttagccgactagtcataggggatagcttatatatatggaatatgtaaccgatcatgtcttgggtattacgtttccttttatattatggagcggcctaaagtcttgatttgataatattgtaaaatagatttaggaaaccgataccgtattggttaaggtttctatcttgtaatcctgccccccatcctatataaggtgagcaggaggccctctagggggcatgacacaaactgatagtcagatcaatatacacccggcggattcaaatccccaaacaggagtagagtattacctctcatcgagagggcctgaatgtcacgcccggaaattcactagtaatttccgaacttatttgtgcataaaatcctcgtccaggaatcagccgaggtacacaaactgacaatttaatatacaaatccatcataataataacgttacacacttacaaaagaaaagaaaacagcagcggaattacggtctagagaagctccggctccactcccacaggcagctcaactggggtataagccaaacgtcttctccttctggatcctttttcttcaactgaggttgattgattattgcaagaataagcatatgacatactgcacaagccacacagcaaatatgcaagtgcacaaggataccaaaggatggcataatataggctcatttgcaaaagcagcatttagcaaaacatttaagaggagtaaaacagtggagtaattaatcagaaattttaatcaacactgaacagcacacccatgctgcacaggcccaaccatcctgaacaaccatacccggctgtacagatctaactccaaaccaggagctaagcaaattattaccagatataacatccataattattgtgagaggtgtgagactaatcacgaaaaacattgctcaacccgcccataaccgcgggcacggctattcgaatagttttactctggccagaggtgtaccactgtacccacaagacacaaccccacatcatgtcaccatgtgcctcaataccaccacggtacctcggaaaggagttgtgacaataccccttgcacaacataatccattacagcgcacctttcctggatcataatcacccccttataaacaaggcatggactccccagcgacccccgtggacttctcgccacttctcagtctggcgcactataatgaatcacgctacacaaaagataaagccgttgcccacgctggcttgtggttggcacgataaatgtttcacaacagtagctcgcgaaccggtccttaattgtcatgagcacgactctcaaaaccatgtgctcacaacccaccattatcaagttttagttggcaagtaattaattaaccaatcacgattaaccatcgtgaactatcattaagccatccttaaataatagtgagtcataagttatcccaatagtgtgctaatgtttctaagcatggctaagcaatcataactaatatctagctgaaccaatatataaagcccaactagtcaagttataataacccaaggtatcaaggaataaagtaatcaatgcaaattggccataacaaaggaataagttcacaccacccggtgacattcgaaaataaatgcacagctgaaataaatagagaatttaaatataggatcaacatgctcaaaggattgtgtttaggatctgtgtgacttgccttgcaataatcgatcttcaattaatcttcttgaatacttccggtgcactcacgaaccttcgcaacgacggaaacgacaagctaacacgcaaaacgaagaaaaagactaataaaaaccaaataaacagtacatataaagtaaacaaacatgtagatcctgattttagatgaatttagcaacttgaaccactcaaaaccgagttacgatgatttagttatgaatttccgaagatttaatctattagaaaaacaggaaaaagaaaaaaacgatgatgacgtcatgatgatgacctcatcaatggccggaccaagatggcgacctcgccggagatttgatggtcggcctgcgactttggaggacatgaacacgtagaggacgacgagacgaacccaacggtacccaccctcgaaccaaacgacgaacgacgacggccggcgacgaggtctagcggcggcgcagcttcggtcgacggcggcgacggggctgcggtggtaggcggcttcggggagatagcggccgagcttgcccacacctcggcgcaccttacggcgatgacggcgaccggcgacgacgacggaggcggcggcgcgacgcgaatggagctcggccggcgacgacggcggggtggagcacgtggcggcggcgctacgaggcacgggagaccacgggagagggggcaaacgaaagaggaggactagggggtcctatttatagccttggattgaagagatcggactcctcccgcaagaaatcgatccgggaaatcaaaaactcggttttggagataaactcgaaaacgagttcgattcggacaagatactcaacgatttgctccgatttttgggggtaaagatagaggaggataagaggaatatttcccctcaactaaattttagaaaaacacaaggggaaaggtcagatttggaggagaaaaaccgagccaaatcggtctcagttcggctgctagaggtagaagataaacagtgtcgagggaggcaaattagacttttcgtcttgggctggctgaaaacaaagcaaagaaagaaagagaagggggaagctcggctgggccgacttgggctgcacggccgtgcagacaaaagagggagatgggctggaaagggcccaagactaggaagaggattattattacttttccaattaaattaatcaatgaaatgatctttgaattgttaaaaatacttcctatgctcaaataattccaagaaaaatcttgaacatacttgtacacccaaagtatttaaaaatattaaaaacagaccatttaatgattaatttaatatgtgggtaattactgaaatgctctttgtatgattaaaaattaagaattgagctccgaaacatctgagaaaatttcagagagtgtaattaatcatggagaatttaatgaaaattaaatccatccatgctttatatttaggaaattttatttcccacatttaacttcacttgtaaattaatgaacatttaatataaattctaataataatttattaaataatttataaatcctgaaacaaaaatcaggatgtgacactgaacctgtctaaatcctttgtctccacatccatccacttttaggtctcgtgcgctacccccttttctatattgccgaaaatttgtttcgacaccgattgggacttgggatagcaaattcggcaagtggtcgccgaattgggaaggaccgttccaaattcataaagtagtgtctaaaggggcttacatgttgcaaggactcgatggagaagtctatggaagagcattgaatggcaaatacttgaagaaatattatccaagtgtttgggttaattcatgatcggctgatgttgccgatacatgatagccgatgtatttgcatcgcctcgagatgaccgatattgcccttagttgtttttctattgtaatcggttgtggtttgccgatttacaatggccgatattattatatcacccttagttgtttttctactgtaatcggttgtggtttgccgatgtacaatggccgatattgttatatcgcccttagttatttttctatcgtaatcggttgtggtttgccgatgtacaaatggccgatatcattgtgtcgcccttagtcgttcttttaattttatcaatgcttttgacattgtaaaattagggggcacatatatggaaaattgcaaatttttgagcaaaatatggagttaaattgaatcggcatgacagttattgagataagttacataaagagttagaggtccttagccgattacaaaaatttctaagacctattacataggatgtcactgagacaaatatcgctggatagccgaaatagctctttgcctaatttgctctacttcttcaatggctttggtgtcttgagcatcggttccaaggatgattttcaaagacttggttagatcagcaacattcttgatagccgatttgagtcttaccttctgttcttcgatagattttgggagatcagctagctttttatgttccatgtccagttcagcatcacattcttcaagttgtgccaagagctcaatcttgcgagcttcgagccgatcaatattggacctaatcggaccctcagatagctgatcaagtttggccttttcttcatgaacaagctgccgattggtttggattgtagcttcgatatcttcacgctcccgacgttcggctagtcttagcttggctttttccaacttgaattgatgctgctcgagataaatagctagagtaaggatatcggctagctcatctgggattagagcttggatctcatgtagccgagtcctaattggcacacagtttaccaccaagttatccagtgattatgcttccagccgatgagagatgtctttgagggttttcttcacatcatcggacaggggaactaaaggtttgctggtggtatcttcttctatttcttcgtcaagataatctttaatattgaaagaaaaaagattgactaaagcctacaaaagagaaatttgaagatagttagatattaaataaatatagccgatctaggatttggtgttcgaaaggatacttactgggatagcaggagcagttggttgtatttcctcctcaatatgatgactccccacagccgatggagttcggtcacttgacgattgctgtacagaaggagaaggaggtggaggaggctgtaaaaagggacaagtgttatatagaatcggctgagatcaactagtaaaagaattgagaatatcttactggtggagccggtttgagaattgttgctgctggtttctttttctcggcagctttcttcttctgcgactatagaatcagtgggtaatcggctataagtaaataaatagaaagaattgaaagaagttggttacccttgaaaaatgagctggagcagaaggaatcggaggagtttgcttgggcgaagccgatggtgtttcctcagtgtcacttacattagctgcagcctagtcaacatcctcgccaatttcttcttcatccagagcttgctcgatggatggatccaaggcaggcagctgttgacagaaaacacgaggcctgggagatcggcttaactccagtgcaggtccaaaactcaccttcgggtgtgttagcgtgccagttgatttgatcctgcaattaataagaaatagagacaaagaaaccgcagttaaatctataaatgatagccgatcggctaggtgccgatgacatatcatttatctttgagccgatgtcatatgtgaatcgatcggcggttgtaaatagacaataaagaactaaatctattcgatcagctgtagatattaacaacatatagttcctatatcaatatatacttaaatcaagtgattggggtagatcggttgccatgccgagacagtataaatcacttagattgaaatatatattaataacagccttatatatgtttaaagcatagctgatcagatagatctagcatgtatcggctaatactccgatactactctatatcaggatattgaaacaagtataatgtatcaaacaaaagcttaatatacttaaatgcaaataagatcttgacataaaggacagatttaacatatcgctgaagcatatagagcaaatacaattaaatcaggtaagatcagctgaaactccgacgctaccctaatcggcgaccagaaggcaggctagagattgatattctaagcacgacttaatagatcaaactcaactgatgcagcattaagtatgaaaagaggaacaatatctagacaatcaagccgctggaagtttcatagagtggtagatatcttatataatctaggtcaacgtcactatttaatccaatcggttgccttctgttgacagatgttagccgattataggttagatgacgatattgtcgaagattatgtaagatatacgataatttgacgaattacatagacaagattagagtatcataaagatggaagcactaatcccgaggacagaatccatcataacaagttttacctcttgttgaagatcgaaactgatgcagctcaacttgaaagcaagaactcatcgaaataaaactaaagcaacaaggtggtgatgcgccgagattgtattgaacgtgtgtgttcttcaagttacatagggctcgggtctatttatacccgagaattacaagatatgtccataacggacacgactatgatctctaacaaactctaagataccataagtctttgcagcagacttttgcccaagcatatctataaggaaattacataaaatatcctaattaatagatacaattgccttctcaaacctctatccatgtgtggcaatcatcttgaagtgcctcaattcaacccgacgtcatacatcaagttgtattgtcggaatcgactgcatcggcttacctagtccgactcagacctagccgatcctaatcgtagccgatctggactccagccgattcctgctctgttttcgaactcgatctctgccttcgacttcacttcgatctaatcttctttcccgatgccgatattaccaattttggatgttaacacatgccccccaagtctagaatatttggtaatgtttcggatttgctgtaaatcgactctgagcaagtttcgcactttgccgttttccgaccgttactgccgtgctttaaatactaaccgttaccctcgagaagtctcacacagtcctcctccgttttcaccgctgaaaccaactttgttctctctctctctctctccggcgatctccccgacgtacaaagcaatccccaggcgatttcgttcctgatcaaatctccacctgcggcgatgtcgtcttgtaatgccctagaaaaaaaatagaataccgtagaggatatattggaagttcctaaggttttggtgtttgaaattagaagaaaaacaaaaggtatatgctagctaggctagcttttggccagcccaaggcccagctgccccctggacatcctcaaaacactaggagatcccctccccacctccccctagccgtcttttggtacccctgggcgcccacctctccctctggtcgacctccccatgggtgccctactgcagacctaggaagaagaagggaagaagaagaaagggaaagaaggaagcggagggaattgagatgaagaaggaaatgaggggttttggttgccgctgcccatggaggcctaggtatctaatacatgatcctttccccctgttttggttttctattagggtttagatcaagtgttggaagcgagtaagtttgggatcaaccgatttattcctcaactgggtttttttgctgatctgccaccctacgtagttctgccttggctgccttttcggccaacataatgggatttcctgtgaaaagtctctatacaaaagttgtagataacgtgtagatctatcttctgaccaaatggcatgagtttatatcaagtggtttaggaggtatcaatttctgaatttggctgtctgaatatcgatgcatttttctgtagtccaggtttagagggattttagaggatcttaatgatggaatcagagaatcttgtgtttacagaagttgtagcatatgttttgatatacctcctacataaaaattgttagctttcatcttgtagtttgttgtcagtgctcttttgaatggttgttgcacagttttctggtctgcacttctctgttttgtgccatgttttaggcccgctaaatggaagaattcaaatttgttctgtagatgtcagaaatgatatattttgctgtgttatgtgatgtagaattggaggtatcgaattgttaatctatgctgcttttatcggaagattatcggtgatttgctttatgttgtttggggtgggatcccagcgtaggaagcgtatgtgtgattcttgaatgattatgcatgttgtttgagtctgagccggtgtttattctaggtgatgccacttcggaatgcaactagagttcatctcatcatcggtgaaggcaagtaaacgtagcagtggtttgctacaactttgacttgttatttgattctacctccacgttgaaagtatatatcatcaaccaagattattatatgttacaccgaggattttcctatctgaatcatacttattgtttttacgctgtttatggttatactttatgctcttggttataataaccttatactgatctcaatcgaaggaatgtcgttctgttgttatactctggaattcatactgcatttgcatgacatgcattgcatttgaagttatgtcgtgaacctatggttgcgactgtaccggtatagcatcgtatattgccgtaatatgatgcagcttcacgccttgttgggtgtgaagccaggagtacatatcattgcattgcatatgcacatattgtaggatgttatgagaattatcgatcgatgatatctttgagaagtgttttcttctctgggatttgtgagtatatggatctgattggtgacgctatgaggttttagtccttggatattgaacttgtctttatgtgaatcataacttggtatttaattagttatataataaacatgtggtttaaatagcttgttaaagccgtttgcttgctgagtttattctcaccccccttagtcttttcaggtacttgctgtgacatgtttgtatgaagggatgggattagctacacagtcacacgacatgatctcacttagacatgagtattgtaatatgctgataagattacttgtgtttatatataatgggctaattaattactagagttgttgaccattggtaaactacttttttcaagcctatccctacatgtcagtcaattgttgtatcataactttaatctatatgttgctgcttccgcgacgttttcttgtctaaggtagttgttgccgaaatttgattgttttggcacttatgtatggttgtttagtggcatctcaggattatgaggttttctggggtgttacacgtcttccaccagcccttctattgtgccatcggccgagtacgctgaggtaagttctcactggctagatcccttttcctcgcatcaaatcgatttctccttttctcatcatgttttctgcttcccgattcttttggatttgcagcacctttccaacctagtcgcgattaccagcctttcgcacaagaaccactattttcttggcccaatcggcaatcttgacccctctgatttcatcatcggtgaaaccaacatgatcccctttggactagccaaccctaacctgggtcactggaagaataccttcaagtcttggccatctctcgaaaaacctactcctgataagagctggaccacctggtaccaacgcgtatcggctagtaagaaagttcactcggatgagattgagatcagccaagcgctcgctctcacgatagccaattctgctaaggatgaacctatgatggctgccgccacctatttctggtccaacaccatcaataccttcttattcaaccaagggccgatgactccaactttgatcgacatcatcatgattactggattagatgtaacttcatcagctaaccctatgagtatgaacaccaagaaccaatttgacttcaagaccaaaagcataggtggctggtctggctatgtggcggcatatatgggccaaggatctgttacccctcgagagcatgtagctttcttgctcatgtggctggaaaagtttctcttctgtggatccagttgtggccctataaccaactggcaatttgtagccgaagccttagaatcaaagaaaagatttccattgggcaaaatccttctcggctatctgtaccaaatgttgaacaatgcatcggctaaaatagccgtcggctcaatagtcggagcaggtggaccattgtggctgctacaaacttggttaaacctgatagtcatgaaggttgtcaatcggccctatgtgacaagataaattcccattgccagagccgattgtagaagacgacggagaagagcgcacccatcgcagatgcatgtcatatggagaatatgcatccacaccaaccgatgctgaagcaaagctatcggctgagctgctcaaggaatggttctgtagcttctacgaaggttttatgaaagatgcacggatcaggtttccttatgaagactcagcagaccttgaacttccatcagactttagatttgaagacattaatcatgaaaaattccaaaaatccagagaagttcttatagctgcaatcagcccatgcatccttcctgtcggcattcaccaagggagaaacatccaagtctcctacgagttttatcacccaatgagctcggccaaacaacttggattgggccaactcccaatcggcttattctttgccgacaagattcagtaccgaggacaaatcacatccactctaatgatggatcggctacttaacctactaggaccccctctaggcagcattgataatattgagttggcaggatttagaagcaaaaactttgacagatggtggggtgaatggaagttgcatctatttcatcaattggcttcaatgtatttgacagatctattccctgacgtcataccccaggtaaactttgtcattactaaattgcataatcggttagccgattcattacatgactaatcttttgctcctattttgcagacaacagagtcctccccttcacatcaaagtaacagtggcaaaaacattgaatatgctccaggtctaattccgaatggaggtggactatctccccccattatcggctaccatgcccccaagacttcaactctccttcacggcctaaccagggatccagccgatgcaggcaagaaaaggaaaaccagatcatcggccgtgagtaccttggccttagctccaaagaaaaagaccaaattcaagaaaactcaaccgactgataagccgactgatgatttgcccgccttggatccatctattgtacaagctttaaatgaagaggaaattggtgaagatgttgaccaggctgtagccgaaatgagtgacacagaaagaacaccatcggcttcacccaagcaaacgcctccaactccttctgcccccgttcattttacaagagtaagtatctctctttgacttcttctgaaattacttccctcttcggctaattactcatagactttgtggttgcagaaaaagaaaactgctgtgaagaaaaagccagcagcaacgattgtcaagtcagccccaccagtaagatgtctttaattcttttacttaatcaaactcaacctgctctatataacacttgtctattctacagcctcctcctccttctccttctgtacagcaattgtcaagtgaccagactgcatcagctgtgtggtgtcatcacatcgaggaggaagaacaaccagctgctcctgctatcccagtaagttttcctttgtctcaacaattagatcggctacattttacccagctcttactctttccgaaattgtctctgttggttctagccggtctcttctcttttgacatcagagattaccttgatgaggcagaagaagacacttcaagcaaagctctagctcccctatctgatgatgtgagaagaacacttgaagatatctctcatcggctagaagcctcttctttagatagtttggtagttgactgtgggtcaattaggacacggctacatgaagttcaagctctgattcccgaagatttggccgatgtccgaactccagccgcttatctcgagcaacatcagttcaagcgggaaaaagccaagctaagactagccgaacgccgtgagcgcaaagagattgaggccacaattcaagctaatcggcagcttgtgcgtgaagagaagaccaaacttgatcagctatctgaaggtctgatcaaatccaatattgatcggctcgaagctcacaagattgagctcttggcgcaacttgaagaatgcaatgccgagctagatatggaacacaaaaagctagccgatctcccaaaatcaattgaagaacaaagggcaaggctcaaatcggctatcaagaatgttgctgacctaaccaagtccctgaaagtcatctgtggaactgatgcacaagatgcccaagctattgaagaagtagaacaaattaggcaaagggctattttggctatccagtgatacttgtctcaataacttttgtgtgataggacttagaaatctttgtaatcagctaagatactctagtactttactgtcttgacaatcctttgtgccgattaatatgacttcaaaattcgctcaaaaaatttgcattttgatatatatgtgcccccctaattttataatgtcaaaagcattgataaaattataaaaacaactaagggcgatataacaatatcggccattgtacatcggcaaacctcaaccgattacaacatgaaaaaacaacgaaaggcaatataactatatcggccatctcaaggcgatggaaacacatcggctatcatgcatcggcaacactagccgatcatgcgttaacccaaacacttgggtaatatttgttcaagtacttgccattgagcgcccgtccatagacttcaccatcaagcccttgcaacatatatgctcccttagacacaaccttataaatttggaacggtccttcccaattcggcgaccacttgccgaatttactatcacgagtcccaattggtaaaatcaattttcatacaagttcaccttccgaaaaatcttttggcaccactttcttattgtattgccgagcaacatgttccttatccttggtaatctttgcaggtgctcgcaatcgtgactgaacatgatcctccctctcatcggccataaggttgtaatactcatcagctgttaaatcagtttgtaactccgttcttcgagagccgattctaacttcccacggcaaaacagcctcatgcccataaacaagtttgtaaggagggacttggatcgatccatgacaagccatcctataagaccacaacgcttcagccaaccgagtatgccattgccgaggataatcagaaattttctgcttaatcaatttgatcaaacttttattagatgcctcggcttgcccattagcttgtgcataataaggtgaagaattcaataatttgatacccatgctatcggcaaactgaacaaactcgtcggacacgaagattgaaccctgatcagttgtaatagcttgaggaataccaaatcggtagattatatgttcttcaacgaattgaattgcatctctagaatcaactttcttcaaaggaatcgcctccacccacttgatgaaataatcagtcgtcaccaatataaacttatgtcctttacttgatggtgggtttctcataccgatcatatcaattccccaacctctgaatggccatggcttaataataagattcatagccaacgtcggcgctcgctaaattgccctaaacttctgacaatcttgacaccgcttataatatctgaaacaatcctccagcattgtcggccaaaaataccctgcacgccgaagtaaccacttcatcttatgagccgattgatgagtgccacaaattctttcatgaacttcgccgactgcaactttaacctgatcggcactcaaacacttaagtaatactccatcaatcgttcgataataaagctcatcatccaacagtgtatattttaatgccttatatcttaatttcctagaagccgattaagatggattatgcaaatactgatgcacatcatacctccaatcatcggctgtcattgctgcaacttcaaccttaacatctttgatcatcgacttataccccgatgccccttgggccaaatcgttagcttcaatattttgttctcgagacacatgcttcaaagtaaccgaccgaaattccttcatcaattcttgtcacttcttattataaaccattaacgtatcattcttacattcatattctcctgccaattgactgattaccagtaaagaatcccccatgatttcaatagcatcggcttcaacttccttgagtaattgcaaccctttgagcactgcctcatactcagcttgattattagtcacatacggtttaatagtataagcaaactcgaaacatgcccccctaggggaaagtataactaggccgataccacaaccatgagtacacaccgatccatcaaagaataaagtccatggcactaattcaaccgagtcgattgaatcatcacggtgttccacaataaaatcggctatagcttgtcccttaattgccttcggcgactcataccgaagatcaaactcggttaatgaaaatatccactttccaacccttcctttcaatattggagccgataacatgtatttgacaacgtcggccttgcatataacagtacactcgttggatagtagataatgcctcaaccctgtacacgaaaaatacagacacaagcataacttctccacaggggaatatctagtttcagcatccaagagccgacgactgagataaaatacaactcgttcttttccatccaactcctgaatcaagactgagccgattgacttctcaccggccgacagatacaatctaaaaggtatcccttgctgtggaggaatcaaaacaggaggagagttgagatattctttgatattatctaaagctttctgttgttctgccccccaagtaaattgctgatcggccttcaatctcaacaatggtgtaaaaggttctaactttccagataaattagaaataaaccttcgaacaaaattaatcttgccgatcatctcctgcaattcggtcttgttttccgggggctgaatcttcttgatcgcattagcattaacactcctttgagtcacctcaatccccctctcatgaacaagaaatcccaaaaactggccagccgatacaccaaaagcacattttgtcggattcatcttcaggccatattttctggttctctcgaaaactttcctcaaatcggctatatggtcctcaacttctttagacttaacaaccacatcattgatgtagacttcaaccaaccagccgattagatcatgatatatgtaattcatggctctttgatatgtagccccagcactcttcaagccgaaagtcatgacaacccattcaaataagccgattgcaccagggcatctaaaagctgtcttatgaatatcttcttcagccacaaagatttgattatatcctgcgttaccatccataaaactcaaaattttgttccctgacgcagcatcaaccagctgatcgactactggcattaggtattcatccttcggtgtggctttatttagatctcggaaatcaatgcacaccctgaccttgccattcttcttaataactggaactatactagaaacccattcagcgtatcggcaaggacgaataaaaccagcatcatacaatcgtttaattttagctttgacatgttcaagcatatcggcttgataggtaaccgatgttctacaatcgatcggctgagtcctggcatctcaaaatactcccaagcgaagcagtctctaaactctttcaagagctctatcagcttagttctaaattctggagataagttcttactaatatatgtcggtcttggccgatcgctaggacctatatctatttcttccaaatcatcagccgacatgaaaccttgaccttgcttgtcatcgagatcatctaccgtatccttagtgtagacatttgaaccctccacgacgccctcaaaataatagcttgggttctccatcttcaattggctgtatatcagaatcagacacttttagaaaatctccatcccaaacttttccagataaacaatcaaggtcatccatctcccaaagagctaaatcggcactggcaacattaactgacctgtcggctggaacgatctctatcttgtcgccttgccactgaatcaaacattgatgcatagttgaaggaatgcaacaattggcgtgaatccaatcccttccaagcaacaagctgtaagaacccttcccatcgatgacaaaaaacgaggtaggaatagtcttactgccgactgtcagctccacatttagaacacctttggtctccgatggattaccaccaaagtctttgagcaccatatttgtcttgatgagatcttcagcatatctacccaacttcctgaacatagcaaaaggcatcaaatttaccgcggccccaccatcaaccatcattttagacatcggcttccattgacatagccgtttatatacaatggtttaagatgctgattctctgtcccctcaggtttctcaaacactgcctgttccggtgacagaaccaacttagctgattcctcttccacctcgtcgacatcgggttgatcgatcccgaattcggctagcaaggtaaagaccatgttaaccggtgcagtcacaacactcttcccttttgccaacctctttgcctcatcggctgcaacattatcggctacaggaacctgatttttaacatgccactcctgccttggctttgctttcttcagccgatgattaatttcttgttcaacctcctgaaggtgctccctgttcctcaatctctgaacccttctcttctgattcttcgtgaaaatactagaaggacaccattgattcttcctgattacattgtcctcttggccatgatcttgatttactggacccaatctttgatgaacagaaactcttgtctgccttagccgattgcacccagggcagttttcaatagatggcaacctcataccttcattccagcagaatctagagaactcacaaccccaatgaggatcaaaaccatcatcgtattcttcatgatgcttctcctgctgcttgtcatacttcctctgatatttgttgataatcttagccgaattcacctgaaaaccccttgcacgggccctatcggctgtttggccagctgtatgcaccatattaacaggaaaagggttaccatcgaccttcatcggctttttggaatcatcaaacctaatcttgcatccctcaatggccacctgaatctgctgtctaaaaaccttgcaatcgttagtagaatgggacccagaattatgccatttgcaatacctctttttgcctaattcctcatccgatgggattgtatgaccagcaggaatttgaatttgcttctctcggagtagcagatcaaagatcttgtcagctttagtaatatcaaaatcatacttctcctcatttccagaactttttacccattgacacggtatgacctttttactcctcacccattcggctgcagctatttcagaatcgtcctcgtcatcatccgacccatacatgtaaggacaaacatgattaaccttcttagagcttttcctgacttccacagacctatgctcatgcaaggttaccttctgtatcagatgtgacaagctatcaaagtcttcagacgagaatttctctctaatcggagcaatcataccctaaaaggccagatcagctaactgggcatcagttaaactcaagctgaagcatttgttcctcatctccctgaatctctgaatatactcgtgcacaggttcatcatgccgctgcttaatcgccatcaagtcagataatttcatctcatgaaccccactgtagaaatagctgtggaattgcttctccaaatcggcccaactattgatcgacccatatggcaaagaggaaaaccaagtaaaagccaatctagacaaagataaccggaacaacataaccttcagagcatctacagccgatgcttcaccacactgagctaagaatcggctaatgtgctcataagttgacacaccatcttgtcccgaaaatttggagaaatctgggactttgaaccgattgggaagaggaactctctcaaaccactcagggtaaggctgccgatacaagcttccagtctcttttggtttaagcccaaactgttccctcattacgtcagcaatcacatcggcccacggtcgtttctgagctgctccctgcgactgttgttgcatgggctcgaactaaccgtattgagatgcaaactgaggttgagccagtccccctggctgatattgggcttgcggggaaggagcctgatattgataattcaagttgcccccttggtaattatgaaggttcggctggatattacgtactaagtgttaaggaacaacttgaggcattactgtgccatccggctgtacgtggtgaacaagtgttctgggacaacttgatttaaaaattgttgtacaggctgaccactaggcgttgcaaacccggccgatgcgctcattgaaccttggtgctgaatcggctgaaccatctgctgtcttaatggcgtctgctgaatcggttgtagaggctgttgctgagctggttgcatgacctattgttggattggttgcacagcctgttgaattgggagtgtttgttgaattggctgctgctgtattggatcaacaacaggttgaggtggcagaaacgtggcagcaacctgatcttgggccagccgattcgcaacctacccactatgctgtggccgctctctcactaacaactgagggttcaccggctggcctggcaccaccgctgacagagcaagtagggtagttgatgccgacgtcatcggctgagctgttggtgcaacggagggaaccgcctgaatagatggctgaacatcggtgatcaaagaccgataatttggaaagacacctccttgcaaataaaccgggcctgcagcctgatgctcagctattgaaccatcggctattgacttcatcatgtttgataaggtattgactaacaccccggactgattgatcaaagcatgatgcagagcgtagtcaacccggtcttgggaattattgaaaaaatcttgtgccgcgtcactattctgattaagatgtcctccctgcaacccctgagcaccatcaccttaaactccatgcactccgtgatcttgcactccatggactccttgagaattgtcgccttgatttcctaaagaaccgtcggtagcacctttgtcactcggttgagccgagccgtctcgagcttgtttcccatctccatccttagaagaactggtcccaggatcatcagcaaccacttttattttgtacttctgaacaagtgtccccttgcgggtctgcatgaatgagttcaagaactgatcccgtgcttgctgcaacattgcttcaaactctttcttctgctcaggtgtgaatttttctggatcgattggcacgatgtttccttcattgacgtcagtcaataataacttctgcatcttttccttaacagagccagggctagctggggatgctgatggtggtggtttctcggccatgaggaagaattgttggctgacttcttaaaggtcccactggacgtgccaaaagcgtgttgactgaaaacatgaggcctgcgagatctgcttaactccagtgcaggtccaaaactcgccttcgggtgtgttagcgtgccagttgatttgatcctgcaatcaacaagaaatagagacaaagaaaccgcggttaaatctacaaatgatagctgatcggctaggtgccgatgacatatcatttatctttgagccgatgtcatatgtgaatcgatcggcggttgtaaatagacaataaagaactaaatctattcaatcggctgtagatattaacaacatatagttcctatatcaatatatacttaaatcaagtgattgggatagatcggttgccatgccgagacagtataaatcacttagattgaaatatatattaataacagccttatatatgtttatagcatggccgatcagatagatctagcgtgtatcggctaatactccaatactactctatatcaggatattgaaacaagtataatgtatcaaacaaaagcctaatatacttaaatgcaaataagatcttgacataaaggacagatttaacatatcgctgaagcatatagagcaaatacaattaaatcaggtaagatcggctgaaactccgacactacccaaattggcgaccagaaggcaggctagagattgatattctaagcatgacttaatagatcaaactcaactgatgcagcattaagtatgaaaagaagaacaatatctagacaatcaagccgctggaaatttcatagagtggtagatatcttatataatctaggtcaacgtcactatttaacctaattggctaccttctgttgacagatgttagccgattgtaggttagatgacgatattgtcaaagattatgtaagatatacgataacttgacgaattacatagacaagattagagtatcataaagatggaagcactaatcccgcggacactatccatcataacatgttttacctcttgttgaagatcgaaaccgatgcagctcaacctgaaagcaagaactcatcgaaataaaactaaagcaaaaaggtggcgatgcgccgagattgtattgaacgtgtgtattcttcaagttacatagggctcgggtctatttatacccgagaattacaagatatgtccataacggacacgactattatctctaacaaactctaagataccataagtctttgcggcaaatttttgcccaagcatatctctaagaaaattacataaaatatcctaattaatagatacaattgccttctcaggactctatccatgtgcggcaatcatcttgaagtgcctcaattcaacccgacgtcatacatcaagttgtattatcggaatcggctgcatcggcttacctaatccgactcagagccaggcgatcctaatcgtagccgatctggactccagccgattcctgctctattttcgaacacgatctccgcctttgacttcacttcgatctaatcttctttcccgatgccgatattaccaattttggttgttaacagcaggtcatcagtcgacttaattttcttggatttggcctttttctttggagctagagccaatgcgtccacagccgatgacctagtttttcttttcttgcctgcatcggttggttccctgatcttttcttgcctgcatcggttggttccctgattaggccttggaggagagttaaactcttgggggcatgatagccgatgacagggggagatggtccacctccattgggaatcaaacctggggcatattcaatgtccctgccactgttgctttgacgtggaggggaagagtcgattgtctgcagaataggaacaaaagattagtcaagtaatgaatcggctgacaataacttagattaaataatctaagttaatagatctgtcatgtacatcgaggccgattggtgaaataggtgtagcttccattcaccccaccatctgtcaaagtttctgctcttgaatcctgccaactcaatgttttcaatactgcccagagggggttcttggaggttaagcagccgacccatcatcaaagttgatgagatttctcctcggcactggatcttatcggcaaagaataagccgattgggagttgacccagtccaagttatctagctgagctcattgggtgataaaattcataagagacttgaatgtttcttccctaatgaatgccgacaggaaggatgcatggactgattgcagctgtgaaaacttccctggctttttggtatctttcatgattaatgtcctcaaacataaattctgatgggagatcaaggtctactgagtcctcatagggataccagactcgggtatctttctgaaagccctcataaaaactgcaaaaccaatccttgagcaattcagccaatagttttgctccggcatcggttggtgtggatgcatattctccatatgacatgcatttgcgatgattatgttcctctccatcatcgtctacagtcggttccaacctcggaaattcagcttctgtcatagatggccgattgacaactttcatgaccattagatttagccaggtctgcagcagccaccatggtccacctgccccaactactgagccgacgactatcttggccgatgcattattcaacatttggtatagatagccaaggaggattttgcccaaacgaaattgtttctttgattctaggacttcggctacaaattaccaattggttatagggccacaactgcattcgcagagaagaaacttttccagccacatgagtaaaaaggccacatgctctcgaggagtaacagatccttggcccatatatggtgccacataaccagaccaaccacctatgcttttggtcctgaagtcaaattggttcttggtgttcatgctcatagggttagccgatgaagttacatctaatccggtgatcatggtgatatcgatcaaagttggagtcatcagcccttggttgaacagaaaggcattgatggtgttggaccagaaataggtggtggccgtcatcagaggttcatccttagcggaattggctatggtaagggcaagcgcttggtcgatccagatctcgtcccagtgaactttcttaatagccgataaacgcttgtaccatgtggtccaactcttctcaggggtggttttctcgagagatggccaagacttaaaagcattcttccagtgacctagattagggttagctaatctaaagggattctgttggcttcaccgatgatcaaatcagtggggtcaaggttgccgattggaccaagaaagtaatggatttcatgcaacaagctaggaatcgcaactagattggagaggtgctgcaaatccaaaagaatcgagaagaagaaaacaagatgaggaaaggggaaatcaatccgatgcgagaaaaggagatctagccgatgaaaactcacctcagcgtactcagctgttggcgcggtagatgggctgacggagcatgacattaccacaggtggagatttgaccggagatggaaccactttggaatcgccttttgcgtagaaggaatcaccggagagagagagagggcaaagtttgcttcagcggtgaaaacggaagaggacggtgtgagatttctcgacggtaacggttagtatttaaagcacgggaataacggtcggaacacggtaaagtgcgaaacttgctcggagtcgatatacagcaaatccgaaacattaccaaatattccggacttgggggcatgtgttaacaactaaatttagcaatatcagcatcggagatgaggattagatcgaggtggaatcgaagacgaagatcgattcgggaacagagtaagaatcggctggagtccaaatcggctacgatcaggatcggttggatccgagtcagactaggtaagccgatacagccgattccgacaatacgacttagtgtacgacatcgggttgagttgatatgcttgaagatggttgccgcgcatggatagagtcctgagaaggcaattgtatctattaattaggatattttatgtaatttccttagagatatgtttagggcaaaagtctgtcgtaaagacttatggtatcttagagtttgttagagataagagtcgtgtccgatatggacatagtttgtaatttttgggtataaatagaccccgaaccccatgtaatcaattaacacacacgttcaatacaatttcggcgcatcgccacccttttgctttatttttatttcgacgaggtcttgctttcgggttgagctgcatcggtttcgatcttcaacaagaggtaaaacttgttatgacagcttgcgttctcgggattagtgcttccatctttatgatactctaatcttgtttatgtaattcgtcgagttatcatatatcttacataatcgccggcaatattgttgtttaacctattatcggctaacatctatcggtagagggcagctgattaggttaaacatcgaggttgacttagattatataggatatccaccactctatgaaacttccagcagcttgattgtctagatattgttcttcttttcatacttaatgatgtatcagttgagtttgatctattaagtcgtgcttagaatatcaatctctagcctgccttctggttgccaattagggtagtatcggggtttcagccgatcttatctgatttaactttatttactctatacgcttcattgatatgttaaatctgccctttatgttaagatcttgtcgcatttaagtatattagacttttgtttgatatattctacttgttttaaaatcttagtatagagtggtatcggagtattagccggtacatgctagatctatctgatcggctatgctatgaacatatatagtcttgttattaatatatatttcgatttaagtgattcatactgtctcagcatggcgaccgatctatcccaatcacttgatttaagtatatatcgatataaggagtatatattgttgatatctgcagccgatcgagtagatctagttctttcttacttatttatgactgccgatcgatacataaatgacatcggcccaaagataaatgatatgtcatcggcatttagccgatcggctatcgtttataggtttaactgcggtttctttgtatctatttctcgttgattacaggatcaaatcaactagcacgctagcatacccaaaggcgagtttggacctgcactggagttaagcagatctcccaggcctcgtgttttccatcaactcctacccgcgaacccccctacccctctcaccatcccccgtcacccccaccacctacccaccagtgtcaccactcgccacccatgcccatccacctctcacaacccacaagatgtaccccataaccgccaccgccaggacgcctttttttattctgaccacaacttatcgagaataattcatttactgaaatcgtagagacgcacacgcctcaattagtaacgcgtttactaggccaacagttctattgccgcagcccatgatcggtcaaaacggaaacggctgaaacaaatcgccgcaaaaggggcagtttctgttttagtctctctcctttatcctcaccgtcaaccgtccacggtcatttcccactttccacgctctcctccccgtctccgtcgactccacccctcgccgatttcgccgcaatcccttcaccgggtacggcggcacgcactcccctcacccacattctagttgccgacgaccgcggcggccgcatcgaggaagtccaccgtgccatcggcggcgcctagccgcggccgaggcggaaagcaccccgacggcggcacctagccgcgaccaaggcggccaccaccccggcgaccctcattggtacgcgcgactgaggaatcaacacacgcacaccagagctacactgattttagcaaaggttagtacaagcatctacactacctgtcatacacatccatttctccgatctaatccaatacccattgttcagctacattttttaagatgaagcggaagggaaaaatgccagagaaggttaggagagtcaagttcatggggtcgcaataagaatgcaagattgtgctcgatcaatcctagccgagtgagggcccaactacccgctccaagcgagctcgtgcagacggaggaagtcaacaaggaaccgccaaaaaacgtggccgcaagaaccagtaggatagagccctgaaggacgctgcacttgttgaggtgaggcacactctattctttctcaaaaaccctaaccctttattccctttgtttggttgctgtccatttatttctgcgtgtgtggttgtcgtcttatatgattgggattgatgtagggaccatggtactaccaaatctttctgtttttgtcctattcataaatccgacaggagctttatgttctgtgacccaccatatttttcccccacttgatctaaatcatgggtaatgcttttcatataattaagggttaggattaaaggtaagaggcagaatgcacggttacgatttagggctgtcttttggtgtgtgggaattcatttacccaacacattagccaaacagggcaatagtgtaggaacatactcagtgttagtaaatgcattactctcatcagtgttagtaaatgcattactctcagtgttagtaattgcttaccagaggtgagatttgaatactagtacaactagactttgaaatcaaatcagggtactgacacatgttcccaacaagctagtagtgagactgaaaactatagcaaaaaatgattacagatgatcccattgtcgatgctatcgaggctcctccattcgcttagttatcatgtgaaagaaaattcatccctataaccactttagttattcaattttatgtcctaaatgctaaaccatatttgtattgcagctgctagcgacaaagcaatctgtctttacacgctgtagcccgaagtttgcacacgatgcatgtcgtgcgttgtcgccgatacaccgacaagctttggcagcgcttggtctgggtgagcttgcaaagatgactctcaacggcttggagcagcctgacctcacctgctggctaatggatcgcaaagacccaaaatcgatgaccattgacatatttgagaataagaagatagtcataactccatggaaggttaaaattgtcttgggggtcccattgggaggggattcattcactggtggagaaaccatctttggtcggtcggccgaaatccacaatagtcccggatacttttataaaccgggactaaagatgatctttattcctggttggtggctacaacgggcatatgtgatctttaatcccggttggtaacacaaactgggactaaagatcatctttagtcctggttgtagagatgtcagacgttgtcagggcccccgggattaccaaccaggactaaagatccccccctttatatatgccttcttcctcctccagcccgagagcaagcttcaaaatttctcaaagaaagaggggagatcatgccaaaattttttgtgaaatttttttagtgattatatacaaatcggaggtgtctagaacgttagtaacttcatcctccaatgttttttggttgttatattacttttggagctacgtttcacacatttttttttgtctccaaaactttgttgtaagtttatcagacagaaaatttgtgtggggaagaagaatatatagaaattttattctcatagttttaaatatgatgaaaattaatcttaaaaaatagaaaacaaactaaattgaaaattaagagaagtacaacattaatattagtttagaacttcaaaaattgttaataagaattgcttgtcgaatgagtttttaattattttatcattactgtttgactgtcattattgtacgaaaatttatttatgtacgatttttttttatttcatgtagatggatcggcaatggatgtacgctgaccggcggtccaaagagtttatcgagggcgtgcattatttttcgagagtggccaaagctaacaagcgtaacggttttatttgttatccatgcaataagtgtaagaaccagaaggagtattctgcatccaggactgttcatttccacctgtttgagtcggggttcatgccaagctataattgttggacatcccacggtgagcaaggggttgaaatggaagaagatgaagcggaggacgagaacattcctgactgggctcagtacgctggatttgaaggaaatcaaacgggcgaggtggacagggatgctggcgataaaaacgctgcggatgatcttggtcagatgttgcaggacgcaaaaggaggactgtgaaagtgaaaaggaggcccataaattggagcggatgttagaggaccatagaacgtcgttgtacccaggttgcgagtaggggcacaaaaagttggatatcattctggagttcttgcaatggaaggcaaaaaatggtgttagtgacaaggtatttggcgatttattgaaactcgtcaagaacattcttccggagggaaacaaattgcccgagacaacgtacgaggctaagaagatagtctgccctctaggactggaagttcagaagattcacgcatgtccaaatgattgtatcccatatcgcggtgaggagtaccagaacctagaaacatgcgctgtttgcaaagcactacgatacaagattagacgagaggatccaggtaaagttgacgagcagccaacaaagaagagaattcctgctaaggtgatgtggtatttccctaatggaaaaagtacgaattacccccccgaactatgacgacagtttgaattacacccctaaaccacaaaaccagacattttataccctgaactatctataccggactaataacccacctcaacccaatccaaagtggtatcgtcctacgtggcgtccacgtggcaatccagtcagcaattttttttaaaaaatggtggggtccacctgtcatactctaacacatctctcttccctcttctctcaatctctctctgtcactgtcttaaatgtcattggtggccggcgatgggtgcgcggccagcacggtcggcgcagcgcttggcgcggcaaacagcgagcgcggcgggtggcgggcgtggcgggggtgcggctggcggcgagcgcgggggcgggcgcggatggcgagcgcggcgggtggcgtgcgttgcggngtgcaccggngcgtggtgggggccgttcatccctctagtgtggccggggtgccgccggccgtggtggacaggtggccgtcacgcgtgaatggacccgtgccacccctgttttagcgcggccttattcttacgtttatcagtgtccttcacctgtgtctgtataattatcgtgatatattctcgttccattcgcagtgctctcgtcctttcttgttctagaacccacacggctactctttctctcactctcgattgacacgtgca

SEQ ID NO: 17378 - DNA, 36780 bp, Oryza sativa
  unsure (1)..(36780): unsure at all n locations
cgcgtnntattgttgacgtcgtcagaggtacacnagttcatcacgggggtgcggcgggcgtggtggagaggcgggcggcaggcgtgatggcgcccgtgccaccccgctgtaacgcccccccgctgaccccgtgttgccgtgcccccccccctgtcatggcgaagtgcggtgaattggcgagggtggaggcggaggttgtctccgcccttccgctccgagcccctggcggccgccgacaccacgcccgagctcctagtcgtcgtcttcaacctggggccgtcattctctctctctcacccctctctctttggccatcgggaggtcggcgccgccaccgcgcccgagctcctcgtcgttgtcttcaacctagggctgtcggtctctctctctcaaccctctctctcgggccgttgggaggtcggcgcgcacggcaccgccacctcgcccgagctcctcgtcatcatcttcaacatggggccgtcggtctctctctctctcacccctctctctcgggccgtcgggaggtcggcgcgcacggcggtaggtcgacttggccgtggccaccgccatcgccgccaccgcgcccgagctcgcagtcgtcgtcttcaaccaccaacctcatccgcccctctttggaggccgccggtcagtatccgtcgcccttctccttgctcggctctgccgacggcaccagagagagagaacgagggagagagagagacgaccgccgtctccaatgtcctcagcgccgtccgccacccgtctcgccctccccaccgcgtccgccgcgcggggcgcccaccgcgccctcccaggggaggactcgttgcccgccgcttgaacgcgctgatgaagcctagaggggggtgaataggctgtccctgaaatcttaaaaacaaatcgcagcggtaaaattcaaacagacccggaacttcctggtaaggaactcccgaacttccggcctgccaggcccggaacttccggtgttctaagacaggaacttccgggtaacaaaacagagatgaaattcaaatttcgaaacaggagactaagccaatcttcacaagatggtgcacaggtattctaagcagaggatatatcacagaatcatacacagaaacatcacagaaagagacaagagcgattttttcccgaagttcggatcttgcgatcctactctccgttgaggagctccaaagagctgggtctcgattaacccctttcctcacttgtgcaaaaaccccaaaggaaatccacagccttcaaccccaaacacccccaggcaaatttctagaattgagtgaccaccaagatccaactcaacctacttctagaaatccaccacaagtgtgggttgctctacttggaaagcctctagaatctcagcacaagaacttcactaacttacctagttccctttcggaggagaggaaatccttcagaaactttcccgggacatccacaatacgcaacggattttcgcgggcgacacctaaccatctaggagatcatctccaagagtaataagcaccgagatgacagcccacgagatattccaagtgctcaccctagatcctagtcttcacacatctccaaatcttcttctctccctctcaatctctctttctcacaagaattaggctctagattgagtggagaaggcaagaaacacttgggagaggctagcaatagctctaggtttgaaaagtaaaagtggaatagacaaggaacgagctggagacgtcatctagccgttactcacaaatttgaactggaaactagacaggaagttccggacctggaagaccggaacttccggacctggaagacaggaagttccggacttgtatttttggatagatggagtatttgcaaaaatgattcctagggaaacttgacacttggctcgcactaagagcacttgacatatctctgagcatcacctggaacccctcttaatagtacgggttttcctaaaaactcgattgcaacaaataaactatcctatgcacttctcgagttccggtccgcttgattttatacttttgagggcgactccaagcatccatcttccacaccttggactaatgcagctgaaagtcactcaatgaactcattagtcccttaactacatttgtcattaatcaccaaaacccactagggggattaatacactttcaatctccccctttttgctgattgatgacaacatggttaaagcttacaaaagattgatataaattttgttttaaatagttagaggtgaataaaactcccccttagtgtatgcatatggaagatatgagtgaaactcatatgcatatctataagggagcaactgaggagagtttcgttcatctctacccattcgtgggatgcaaataagcagtaaaagtagacatgatgtgcaaaagatgacatggaaagcactcaaaaaggataaaatcaacatcacatcaaaaacaataaataagacacacatagcataaatgaaaagcagaaaaataaagggcagctaagagcatctaacagacattacattcacacaaatagagaattagaacttgtccatgagttcttaagaataggggccaaaggattgccaggtccggaacttccggataaaataccaggaacttccggacaagctgacatgacaataaggcgagggagctgccaggtccggaacttctggataagaggatccggaacttccggattaaacagacagcaggcagtaagcatcaaaaacaaaattttgacccccttcgattccaattttctccccctttggcatcaaggcaccaaaaagagataaaatcacaagggaagaagagggtcaagcctcatcattatcgccatcagaaggaatgatctcggtgtcgccggagtgaggagagttgatgtcttgcccggcggcgtccactgcctcatcgggatctgtaggaacattcacggtaggggcatctgactcctcaccatcactgctctcctcggagtgagaggactcctcattgaagaaacgagaagtgccagagggaccctcaccactagcaatgtctcgagcagtctcatatgcagcaaaaggatcaacaaactcctcatcatcagaaatatcatagacatccttgcctgctgcaatcctcgagtagtccccaaacaatccttgggagcatccttctcatacataaaggtagtgctggtcggtgacagagcatcctataatatggacgcaaccctcgagtagtccccaaacaatccttgggagcatccttctcatacataaaggtagtgctggtcggtgacagagcatcctctacaaagatatgtggatgactcaggtcatcatcatctaaccccaaagctgcagcaaattgtgccatagaaaccctatactgctgcccctgaatggtccacttcacaaaatcaagccccttcttggtggtgccaaagaatgcagtggagtagagctgtccaatcacttcctcattccaggaatactgcaaggccaacaaatctgccacgtgcttgcgctcacacaccttgcgtacctcattgaagactatgttgttctttgaggacatgtactgccagtctagccacttcatctctaccactggatgagatcttcccatgatcacagagttataccaattaacctgcaccaaggtcctgaatctgtcatcctgagagtctgctggcagagtatcaggactaaccattctgtcgtttccacacttgagtagattcttcagatagttcactcttgggcgtttaggatcaggatcaacagcccttgtcttgtacagcctaaaaggattgcttttagaaccaggctcatcctcattgccaccattatctgactcagatgcagctggagagggagagcggggtgcgtcacgaatgacaatgctaccagccctcctggaatggatcggaatctgactcccactataaaaatctccaactttttctttgcccaatctccccctaggaccacgaaccggggttctcgagtcagcaggaacatcttgagaaagcttctgtctcttctcacgaggcataatgaccactgcaacaagaatcaacaggttggagtgcaatggttaaatgaaacagtagcagaatcaaggttactggttggcgggacagagaccggaagttctgggccaagaacaccggaacttccggcctgcaaaactgaagaacagaggatttaaccaggccagtgcatgtgacaaaatcctatagatcggcaatctacaaggtagcaggaacaattctatccaaaaggttttctccctaggttcacatatttagagatcggggcaaaaacatgatgaaccaaaagagaagatcaaaagtgctaccttgagagggaaaatcgcaaatcgatcgcgggatgaacctcctagccaccaatgtggttgattccacggagaggaatcgaatttccacagttggaatagaaaatcgcccagaggagcactgtagcggcggctagggtttgggaatcggggaggagaagaagtgaggagagagagatcaagctcgggctccccctgggtatttatacccccgacccccggaagttccggattgggatgaccggaacttccggcctgacaaaacagagggcagtcaggcccatgttcaaaggaatagatgagaattcaatgatttagaaatgaaaacctatggacataaagagacttatgatgtatatgaccagccaacaatcaacattacataacaatggtcaatataaatcacaagaagggataaaaaccaaattttcgcaataaaaacacacacaaaaattttcgcaaaatttcacaaaagagtttttggataatagagggaatgtttgagctttattcctggtatcaaaaccatcttctacacaagaagtgatctcaagacacaaaagctctttttttttatttacattttagtgacacatgtttggctatgaattagccaatcacccatcacctaatgatacgagagtctaagatattgagctcacttctaagctcgcaaaatcttttctcatctaaaggcttggtaaaaatgtctcctttagtctcatgatctctcaagaagtggtggcgaatgtctatgtgcttggttcttgagtgttggagaattgttggctattttgatggcactctcattatcacataggagtgggatcttgttgaagttgtagccaaagtcttttagggtttgtctcatccaaaggagttgggcacaacaagaaccggcggctacatattcggcttcggcggtggataaggcagtggaattttgcttcttagaggaccaagaaacaagggaccttacacccggcataatccgaatcggaatagcccaaaagctcaaagccacaacccttagaataacacaagccatgattaggagtgtgaactaaatatcttagaattctcttgacgacaatcaaatgacactctttaggctccacttgaaagcgagcacacatgcaaacactaagcatgatatccggacgagatgcacataagtaaagcaaagatcctatcatggagcgatataccttttggtccacacatttaccattatcatcgaggtctaggtggccattagtaggcatgggtgtcttgataggtttggcatcctccatcccaaacttcttgagtatgtctttcacgtacttggtttgagagatgaaggtgccctcttgtgcttgcttcacttgaagcccgaggaagaaggtcaacttgcccatcatagacatctcgaaccttttagtcatgatactactaaattcttcacaaaaagaggcattagtagaaccaaatattatgtcatcgacataaatttggcatatgtataaatcactcttaaattttttagtgaagagagtagtatccgcctttccaatttcaaagccatttttcaaaagaaaatctcggagacattcataccaagctctaggggcttgtttgagcccgtagagtgccttgtggagcttgtacacatggtttggcaactttggatcctcgaaccccggtggatgctccacatagactaactccgagataggtccattgagaaaggcactcttgacatccatttggaataacctgaaatcatggtgagcggcataggctaaaagaattctaattgactgaaggcgagcgacaggtgcgaaggtttcacaaaaatcgagaccctcgacttgggtgaacccttgcgcaactaaccgggcttttttccttacaaccaccccatgttcatcttgcatgttgcgaaagatccacttggtgccgatgacatcttgcttgggtctctccaccaaagtccacacttgattgcgagtgaagttattcaactcgtcttgcatagccatcacccaatccggatcaccaagcgcatcttccaccctagttggttccaaagaagagacaaacgagaagtgttgacaaaaacatgcgacacgagagcgagtagttaccccttttcttatgtcgccaggtatgttgtcgacgggattatctctttggacagtatgatgtatccttggatggtgcactggggaggacctaagcctgatcagaatgctctaaaatgccctcagcatcgatcccatccacttgtgccgttggcacgtcttcactgccactggtccggaggttccggactgtagaacccggaacttacgggcctggagatgtccggaggttccggtcaataggacccggaacttccggctcagctgacacaacacttgtagggctattggatgtcgatgacggaggttgatccctatcttcttggtcatcctgcgtctcgactggtcgtatgtctccaatagccttagtacctatagcttgatttggatccacaacccctacaacatgtacaacaacttgctctccttgggagccattagattcatcaaacgtcacatccctagtgacttcaacaataccggaggttttgttgaagacacgataggcatgtgcatttgattcatagccaagtaagaatccctcatccaccttaggtgagaacttagatgagcgaggcctcttacttaaaataaaacatttgctcccaaagacacgaaaatacgaaacatcaggcttcttaccactaaagagctcatatgaggttttctttaggatcttgtggaggtacaagcggttaatagcatgacatgcggtactcacagcttccgcccaaaagacatccgaagtcttgtactcatcaagcattgcccttgcggcttcaatgagtggtcggttcttcctctcaacaatgccgttttggggaggatcatagggggcggagaactcgtgcttgattccttcttcatcaagaaattcctccacttgagtgttcttaaactctcctccattgtcacttcgcaccctcttgatagtgagatcatagaggttttgggcttgcttttcgaagcgcttgaagacatcttgagcttcgcttttgtcatggagaaagtacacccaagtgaagcatgaaaaatcatcaacaatgacgaaaccatacttgttacctccaatgcttatgtaggccacgggcccaaataaatccatatgaagaagctagagtggtcttgttgtagtcatgatgttttttataggatgtgaactcccaacttgcttcccggcttggcaagcactacacacacgatctttctcaaaagaaaaattatatagacaaagaatgtgttccccttttagaacagatgccaaattcctcattccaacatgggctagcctacggtgccatagccaacccatagaggatttagcaatcaagcatgcctccggattcactctattcacgtcgaaatcaacgagatagagatcaccctttaacacacccggaatgctatggaagagtcatctcgcctaaaaatggtcacatccacatcggtaaacaagcaattaaatcctaacttacacaattgagacacggataataaattgtagcttaatgaattgacaaggaggacattagatagagattgattcttggaaatgacaatcttaccgagacccattacctttcctttaccatcatctccaaagacaatattttcacgacttccaccctcctcatcaagacttataaacatactcctctctcccgtcatatgattggtgcagccactgtccacaacccaacttgagccaccggagaagtatgcctacaaaagagatcaagcttgggatttaggaacccaaacttgtgtaagtttaggtcccttgatgttagtcaccaaagcctttggcacccacacacaagtgcggtactcatcattgtaattcccaataaaataagcaaccactttgccctctgaatttttggaaattacatatgaatcatagaaaagaccctctggccggaacttcctagcattataaccggaacttccggccagccccttccccctattagaagcccagaacttcctgacaaaatgtccagaacttcctgtcttacaaggcaggaacttccggtcattttgcccggaacttccgggtgtctgaccagtgagggggcaagtccggaacttgcttgtggagcttttccttctgttacaaacatcaagcattcttccccatttaccatcacacgcttagacacagggcttccaccagaaaacccgagcccgtatcaatccttgttaggatgagcggagatggtcttgtaaagggcatcttttgaatggtatgtcttcatgcatccatacttcactaatgtgcccaacctttcattctctttcttatgagcttgcatagcatcaacattagtagcatgagagttcaaatcaatattgtaacacctagcacaaccattgctagtagatgggttggaagaattagaaaccacatttggttgagaagtgctattccaaagagtgtcaaattgaacatcaagatctttatgacttttgtctaaactagcaaacttctcttgaagagtttcattgacatccctaaggctagctagagaaccattagccaaattaagctcattagctagttgttcatttttagcacattctttagctaggctctcgtctaaggcaaggtttcttttcttctcaagaataagtaatttttcatgccttttgagagattgttctttactatccaaagctctcattaacttagccaaatgttgcatagcgggtttgctaaagctctctttgattgcctctttcccttgtcatcatccttcctccctttgccatagtcactcttgcgaagaaagtgcttgaatctcttgacaataaaagtcatttcttcatcttcactttcttcacaacttgactcttcttcttgttttgccttcaaagctacttcttgatttttgatcatggcggcattcttcaccatttgcctcacttcacgagcttcctcttcttgcatctcatgagacacaattcttccaagaatgtcacttggggtgagcctcttgaaatctttcctttcccgtatcattgatacaagagtgggatttcttggaccaaaagcacggagaagtctcttgaccacaaagtgatttgtcatgtcctcactcccaagtcctttaatcttgttaacaaggatcatcatcctatcatacatctcttgtggtgtctccttgtcatccatcacaaatcttccaagccttccttccaataattcaatcttggcctcacgaacggcgggtgatccctcatgagccattgcaaagtatcccatatctcctttgcctcctcaagcccattgtcacaccctgatttttgtttcaggatttataaattatttaataaattattattagaatttatattaaatgttctttaatttacaagtgaagttaaatgtgggaaataaaatttcctaaatataaagcatggatggatttaatttttattaaattctccatgattaagtcaactctctggaattttctcagatgtttcggagctcaattcttaatttttaatcatacaaagagcatttcagtaattacccacatattaaattaatcattaaatggtctaattataattttgttaagtactttgagtgtccaagtattttcaggatttttcttgaaattatttgagcattggaagtatttttaataattcaaagatcatttaagtgattattttaattgggaaagtaataaaatcctcctcctcagcttgggccattttcagcccattccttcctttccttcctctctcttccgccggcccaacctgagccgcctcctctcctctcagctcagccggaaaagtctactttccctccctgcgctactgttcatcttccaactcaggcagagcccgagccagccgtgccgtgcacagtgccgccgcctcttccttccaaatctcgcctccccgttgctctttttctccaattttgttgaggggaaatattcctcttatcctcctctatctttacccccaaaaatcggagcaaatcgttgagtatcttatccgaatcgaactcgttttcgagtttatctccaaaaccgagtttttgatttcccggatcgatttcttgcgggaggagtccgatctcttcaatccaaggctataaataggaccccctagtcctcctctttcgtttgccccctctcccgtggtctcccgtgcctcgtagcgccgccgccacatgctccaccccgccgtcgtcgccggccgagctccatccgcgtcgcgccgccgcctccgtcgtccccgccggtcgccgtcatcgccgtgaggtgcgccgaggtgtgggcaagctcggccgctatctccccgaagccgccgaccaccgcagccccgtcgccgccgtcgaccgaagccgcgccgccgctagacctcgtcgccggccgtcgtcgttcgtcgtttggttcgagggtgggtaccgttgggttcgtctcgtcgtcctctacgtgttcatgtcctccaaagtcgcagccgaccatccaatctccggcgaggtcgccatcttggtccggccattgatgacgtcatcatcgtttttctttttcctgttttttctaatagattaaatcttcagaaattcataactaaatcatcgtaactcggttttgagtggttcaagttgctaaattcatctaaaatcatgatctacatgtttgtttactttatatgtactttttatttggtttttattagtctttttcttcgttttgcgtgttagcttgtcgtttccgtcgttgcgaaggttcgtgagtgcgtcggaagtgatcaagaagattacttgaagaccgattattgcaaggcaagtcacacagatcctaaacacaatcctttgagcatgttgatcctatatttaaattctctatttatttcaactgtgcatttattttcgaatgtcatcgggtggtgtgaacttattcctttgttatggccaatttgcattgattactttattccttgataccttgggttattataacttgactagttgggctttatatattggttcagctagatattagttatgattgcttaaccatgcttagaaacattagcacactattgggataacttatgactcactattatttaaggatggcttaatgatagttcacgatggttaatcgtgattggttaattaattacttgccaactaaaacttgataatggtgggttgtgagcacatggttttgagagtcgtgctcatgacaattaaggaccggttcgcgagctactgttgtgaaacatttatcgtgccaaccacaagccagcgtgggcaacggctttatcttttgtgtagcgtgattcattatagtgcgccagactgagaagtggcgagaagtccacgggggtcgctggggagtccatgccttgtttataagggggtgattatgatccaggaaaggtgcgctgtaatgggttatgttgtgcaaggggtattgtcacaactcctttccgaggtaccgtggtggtactgaggcacatggtgacatgatgtggagttgtgtcttgtgggtacaatggtacacctctggccagagtaaaactattcgaatagccgtgcccgcggttatgggcgggttgagcaatgcttttcgtgattagtctcacacctctcacaataattatggatgttaatacctgataataatttgcttagctcctggtttggagttagatctgtacagccggatatggttgttcaggatggttgggcctgtgcagcatgggtgtgctgttcagtgttgattaaaatttttaattaattactctactgttttactactcttaactctttgctaaatgctgctttcgcaaatgagtctatattatgccatcctttggtatccttgtgcacttgcatatttgctgtgtggcttgttgagtatgtcatatgctcattcttgcaataatcatcaaacctcagttgaagataaaggatccagaaggagaagacgtttggcttataccccagttgagttgcctatgggagtggagctgaagccatcgctagaccgttaattccgttgctgttttcttttctttgtaagtatgtaacgttattattaagatggatttgtatattaaattgtcagtttgtgtacctcggctgattcctggacgaggattttatgcacaaattagttcggaaattactagtgaatttccgggcgtgacacccatcaaccttgttgaacacctccggacttaaggcggagagaattgcattggaagcttaagcattgcggtggatgagttgctcttgctccgaagtgagcttcatgtcatcatagggtacatcaacacctgtacaaacaactttccaaatacttggatgcaaagagattagatgcaacttcatcttgtgcttccaagcggcgtaatgcgtcccatcaaattgaggagcacgcccggaaggcacggagacaaagttgtgagagggaatagtaagtttgctgtaatcaaaaggtatagtagctcccttgggtgatggagtttccttgctgctcactccatcttcatttccattttccccgttctttcaccctaagtccgacatcgtggatcactcaaagcagtgaagcttgaatcaagagcaccttgctctgataccaattgaacgtgctgatgaagcctagaggggggtgaataggctgtccctgaaaccttaaaaacaaatcgcagcggtaaaattcaaacagacctggaacttcctggtaaggaactccgaaacttccggcctgccaggcccggaacttccggtgttctaagacaggaacttccgggtaacaaaacagagatgaaattcaaattttgaaacagtagactaagccaatcttcacaagatggtgcacaggtattctaagcagaggatatatcacagaatcatacacagaaacatcacagaaagagacaagagcaattttttcccgaagttcggatcttgcgatcctactctccgttgaggagctccaaagagctgggtctcgattaacccctttcctcacttgtgcaaaaaccccaaaggaaatccacagccttcaaccccaaacacccctaggcaaatttctagaattgagtgaccaccaagatccaactcaacctacttctagaaatccaccacaagtgtgggttgctctacttggaaagcctctagaatctcagcacaagaacttcactaacttacctagttccctttcggaggagaggaaatccttcagaaactttcccgggaaatccgcaatatgcaacggattctcgcgggcgacacctaaccatctaggagatcatctccaagagtaataagcaccgtgatgacaacccacgagataattccaagtgctcacccaagatcctagtcttcacacatctccaaatcttcttctctccctctcaatctctctttctcacaagaattaggctctagattgagtggagaaggcaagaaacacttgggaggggctagcaatagctctaggtttgaaaagtaaaagtggaatagacaaggaacgagctagaaacgagctgtatatgtataacggctaggtgacgtcatctagccgttactcacaaatttgaactggaaactagacaggaagttccggacctagaagaccggaacttccggactacacttaggaaaaactttttcacaagaccggaacttccggacctggaagacaggaagttccggacttgcatttttggacagatggagtatttgcaaaaatgactcctagggaaacttgacacttggctcacactaagagcacttgacatatctctgagcatcacctggaacccctcttaatagtatggtttttcctaaaaactcgattgcaataaataaactatcctatgcacttctcgagttctggtccgcttgattttatacttttgagggggtctccaagcatccatcttccacaccttggactaatgcagctgaaagtcactcaatgaactcattagtcccttaactacatttgtcattaatcaccaaaacccactagggagattaatgcactttcaccgtttgcctgagccgagagagagagagagggacgacgatgacgacgtaggccgcatcctccaatgccctcctcggcgccgcccgtcgctcgccgtgccattcctgcactctgccgtcgccccccgcatgccgaccgcctgtccacgcgccactgccgccgcccactacccgtcgacacacgcctgagagagagaagggggagggtgaagagagataatgacaggtgggccctatattttcttttatttttttgttgattgaatttccacatcagcgacacgtgtatgccacgtaggagaaaaaccgcttaggaatgattcgggggggggggtaattcttccggtatcaatagttcgaggtgtaatatgtctgtttttgtggttcgggggagggggtaattcatactgccacagtagtttgggggggataattcgtactttttccttccctataataccacggctaaggcgtttgttcaggaacaagggaaatgctagaatgatgcgatggcacgctgaagaacgtcaacaggacgggatgctgagacaccccgccgatggttcgcagtggcgaaacattgacagaaattttaaagactttggaaaggacgcacgaaacatacggtttggtttaagtacggatgacatgaatccttttggagagatgagcagcggccatagaacttggcccgttacgatgtgtatctacaacctccccccttggctatgtatgaagaggaagtacataatgatgtcgattattattcgaggccccaagcaacctggtaacgacatcgatgtgtacctaagaccactggtcgaagatcttaaactgttgtggaaaaaggaaggtgtccccgtgtgggacgaggacaaacaggaggagtttaacctacgagcgctgatgttcgtaaccatcaacgattggcctgcacttagcaacctttccgggcagtccatcaaggggtacaaggcttgcactcactgtatggatgaaacagaaagtacgtatcttaagcactgtaggaaggttgtgtacatgggtcatcgtcgattccttgctgcaaaccacccggtacggaagaaaggcaaacactttgaacataaggtggaccaccgtacgaagcctaaacatcgcagcgggaaaacagtgtttgctatggttaaagatcttaaagtagtgtttggaaaggggccacgacgcaacgccaccgccgcgacacgccaccgccgcgccgcaatgccgccaccgcgccacgccgcagccgcgccgccacgccgccgctccactgccgccacgtgaacgtaacatgaacttaacgagaacgaacgtgaacaaacgtacgtggacagacgtgaacgaacgaacgtacgtgaacgaaacgtgaacttaacgagaacgcgaacgtgaacgaaacgtgaacttaacgagaacgcgaacggtaacaaacgtgaacgaaatgcgaacgtgaatgaacatgaacgaacgtgaatgaaacgcgaacgaacgtgaacgaaacgcgaatgaaacgtgaacgaacgtgaatgaaacgtgaacgaaacgtttaacgaacgtgaacgaaacgttaacgaaagtgaacgaaacgtgaatgaaacgtgaacgaacgtgaatgaaacatgaacggtcgccttatatgacactacgtgaaatacaatatatgttactttgcgtttagactaatacatttttttgtatgttgcagaaaagacgtcgtcgttgtcgtccctcaagcctgagtggtagctagccctcgaaggaattcgcaggcaagtgatgtaaatatatgattgttagatttttaatataatatcctacaggtccggaacttcctgtctagtctccagttcaaatttgtgagtaacagctagatgacgtcacctagccgttatacatatacagctcgtttccagctcgttctttggccattccactttcacttttcaaacctagagctgttgctagactctcacaagtgtttcttgccttctccactcaatctagagcctaattcttgtgagaaagagagattgagagggagagaagaagatctggagaggagtgaagactaggatcttggatgagctcttgggatatctcaagggctgtcatctcggtgcttattactcttggagatgatctcctagacggttaggtgttgcccgcgagaatccgttgaatattgtggatgtcccgggtaagtttgtgaaggatctcctctcctctgaaagggaacgaggtaagtgaatgaagttcttgtgctgagattctagaggttttccaagtagagcaacctacaattgtggtggatttctagaagtaggttgagttggatcttggtggacactcaattctagaaatttgcctaggagtgtttggggttgaaggctgtggatttcctctggggtttttgcacaagtgaggcaaggggttaatcgagacccagctccttggagcccctcaacggagagtaggatcgcaagatccgagcttcgggaaaaaatcgctcttgtctctttctgtggatgattctgtgatctatcgtctgcttagaatacctgtgcaccatcttgtgaagattggcttagtctcctatttcgaaatttgaatttcatctctgttctgttacccggaagttcctgtcctagaataccggaagttctgggcctggcaggccggaagtttcggagttccttaccaggaagttcccggtctgcttgaattttacagctgcgattggtttttaagtatccagagacagcctattcacccccccctctaggcttcatcagcgcgttcaattggtatcagagcagggtgctcttgattcaagcttcaccgctttgagtgatccacgatgtcggacttagtggaaaaaaacggggaaaatggaaatcaagatggagcgagcagcaagggaacttcaccacccaagggagctactataccttttgattacaacaaacttaccattccctctcacaacttcgtctccgtgccttccgggcgtgctcctcgatttgatgggacacattacgccgcttggaagcacaagatgaagttgcatctaatctctttgcatccaagtatttggaaagttgtttgtacaggtattgatgtacctcatgatgacatggagctcacttcggagcaagagcaactcatccaccgcaatgctcaagcttccaatgcaattctctccgcgttgagtccggaggagttcaacaaggttgatggacttgaggaggccaaggagatatgggatactttgcaattagctcatgagggatcacccgccgttcgtgaggccaagattgaattattggaaggaagggttggaagatttgtgatggatgacaaggagacaccacaagagatgtatgataggatgatgatccttgtcaacaagattaaaggacttgggagtgaggacatgacaaatcactttgttgtcaagagacttctccgtgcatttggtccaagaaatccctctcttgtatcaatgatacgggaaaggaaagacttcaagaggctcactccaagtgacattcttggaagaattgtgtctcatgagatgcaagaagaggaagctcgtcaagtgagccaaatagtgaagaatgtcgccatgatcaaaaatcaagaagtagctttgaaggcaaaacaagaagaagagtcaagttgtgaagaaagtgaagatgaagaaatggcttttattgtcaagagattcaagcactttcttcgcaagaggggctatggcaaagggaggaaggatgatgacaagggaaagaggcaatcaaagagagcttgcttcaattgtggcgaatatggccacttcattaacgattgtcccaagtgaaatgaagctaaggctaagggatgcaagaagaagccgaagcgtgctcatgtggcggaggcacacatggcggaggtgtggtactccggagatgaagaagattccgaggtcaagcccaagcctaagccaaaagacaaggttgaaggagaaggtggtgttgctaccgtcgccttcaagtcatcctcttcaagcaaggagcgtctcttcaacaacttgagtgatgacgatgacgactcctaccactactcatgttccatggcccaacgccgcaaggtgatggctcaaaagcccctctcacacctctcttgatgttgattctagtgatgaggaaagtgataatgaattagatgatgtgcttaagagctttagcaaacccgctatgcaacatttggctaagttaatgagagctttggatagtaaagaacaatcactcgaaaggcaagaagaattgtttattcttgagaagaaaagaaacattgccttagaggagagcctagctaaagaatgtgctaaaaatgaacaactagctaatgagcttaatttggctaatggttctctagctagccttagggatgtcaatgaaactcttcaagagaaatttgctaatttagacaaaagtcataaagatcttgaagttcaatttgacactctttggaatagctcttctcaaccaaatgtgttttctaattcttctaagccatctactagcaatggttgtgctaggtgttacaacattgatttgaactctaatgctactaatgttgatgctatgtaagctcttaagaaagagaatgagaggttgggcactttggtgaaatatggatgcatgaagacataccattcaaaggatgccatttacaagaccatcactgctcatcctaacaaggatggacacgggctcgggttttctagtggaagtcctgtgtctaagcgtgtgatggtaaatggaaaagaatgcttgatgtttgtgagagaaggtaaagctccacaagaaagtgaggtgacttgccccttcactagtcagacacccagaagttccaagcaaaatgaccggaagttcctgccctgtaagacagaaagttacggaccttttgtcaggaagttccgggcttctgataggccaaaggggatgaccggaagttctgggtaaaataccaggaagttccggccagagggtctttactatgattcatatgtaatttcaaaaaattcagagggcaaagtggttgcttattttattgggaattacaatgatgagtaccgcacttgtgtgtgggtgccatagacaaacatcaagggacccaaacttagacaagtttgggttcctaaatcccaagcttgatttattttgtagacatactcctccggtggctcaagttgggttgtggacagtggctgcaccaatcatatgacaggagagaggagtatgtttacaagtcttgatgaggagggtggaagtcgtgaaaatattgtctttggagatgatggtaagggaaaggtaatgggtctcggtaagattgccatttccaagaatcaatctctatctaatgtcctccttgtcaattcattaagctacaatttattatccgtgtttcaattgtataagttaggatttaattgcttgtttaccgatgtggatgtgaccgtttttaggcgagatgactcttccgtagcattcaagggtgtgttaaagggtgatctctatctcgttgatttcgacatagatagagtgaatccagaggcatgcttgattgctaaatcctctatgggttggctatggcaccgtaggctagcccatgttggaatgaggaatttggcatctcttctaaaaggggaacacattcttggtttatctaatgtttcttttgagaaggatcgtgtgtgtagtgcttgccaagccgggaagcaagttgggagtccgcatcctataaaaaacatcatgactacaacaagaccactcgagcttcttcatatggacttatttgggccagtggcctacataagcattggaggtaacaagtatggttttatcattgttgatgatttttcacgcttcacttgggtgtactttctccatgacaaaagcgaagctcaagatgtcttcaagcgcttcgcaaagcaagcccaaaacctctatgatctcactatcaagagggtgcgaagtgacaatggaggagagtttaagaacactcaagtggaggaatttcttgatgaagaaggaatcaagcacgagttctccgccccctatgatcctccccaaaatggcattgttgaaaggaagaaccgaaccctcattgaagccgcaagggcaatgattgatgagtacaagatttcggatgtcttttgggcataagccgtgagtaccgcatgtcatgccatcaaccgcttgtaccaccacaagattctaaagaaaacttcatatgagcttttgagtggtaagaaacctaatgtttcatattttcatgtctttgggagcaaatgctttattttgagtaagaggcctcgctcatctcagttctcacctaaggtggatgagggattcttacttggctatgaatcaaatgcacatgcctatcgtgtcttcaacaaaacctccggtattgttgaagtcactagggatgtgacatttgatgaatctaatggcttccaaggagagcaagttgttgtacatgttgtaggtgatgtggatccaagtcaagctataggtactaaggctattggagacatacgaccagtcaagacgcaggatgactaagaagatagggatcaacctccgtcatcgacatccaatagccctacaagtgctatgtctgctgagccggaagtttcgggtcctattgaccggaacctccggacatctccaggcccggaagttccaggttctacagtccggaacctccggaccagtggcagtgaagacgtgccaacggtgcaagtggatgggatcgatgctgcgagcactttagagcatactgatcaggctcaggtcccccctgtgcaccatccaaggatacatcacactgtccaaagagatcatcccgtcgacaacatacttagtgacataaaaaaaggggtaactactcgctctcgtgtcgcaagtttttgtcaacacttctcgtttgtctctcttctttggaaccaaccagggtggaagatgcgcttggtgatccggattgggtgatggctatgcaagaggagttgaataacttcactcgcaatcaagtgtgaactttggtggagagacccaagcaaaatgtcatcggcaccaagtggatctttcgcaacaagcaagatgaacatggggtgattgtaaggaacaaagcccggttagttgcgcaagggttcacccaagtcgagggtctcgattttggtgaaaccttcgcacctgtcgctcgccttgagtcaattaggattcttttagcctataccgctcaccatgatttcaggttattccaaatggatgtcaagagtgcctttctcaatggacctatctcggagttagtctatgtggagcaaccaccggggttcgaggatccaaagttgccaaaccatgtgtacaagctccacaaggcgctctatgggctcaaacaagcccctagagcttggtatgaatgtctccgagattttattttgaaaaatgtttttgaaattggaaaggcggatactactctcttcactaaaaaatttaagagtgatttattcatatccaaatttttgtcgatgacataatatttggttctactaatgcctctttttgtgaagaatttagtagtatcatgactaaaaggttcgagatgtctatgatgggcgagttgaccttcttcctcgggctacaagtgaagcaagcactagagggcaccttcatctctcaaaccaagtacgtgaaagacatactcaagaagtttgggatggaggatgccaaacctatcaagacgcccatgcctactaatggacacctagacctcgaccataatggtaaatgtgtagaccaaaaggtatatcgctccatgagaggatctttgctttacttatgtgcatctcgtcccgatatcatgcttagtgtttgcatgtgtgcctgttttcaagcggagcctaaagagtgtcatttgattgccgtcaagagaattctaagatatttagttcatactcctaatctttgcttgtggtatcctaagggttgtggctttgagcttttgggctattctgattcggattatgccaagtgtaaggttgatagaaaaagcacaactgggacttgccaatttcttgggcggtcccttgttttttggtcctccaagaagcaaaattcctttggataacaaactctaaaagacttttgctacaacttcaccaagatcccactcctatgtgacaatgagagtgccatcaacatagccaataatcccgttcaacactcaagaaccaagcacatagatattcgccaccacttcttgagagatcatgagactaaaggagacatttgccttacccatgtgagaaccgaaacccaattaaccgacatttttaccaagcctttagatgagaaaagattttgcgagcttaggagtgagctcaatatcttagactctcgtaacattaggtgatgggtggttggctaattcatagccaaacatgtatcactaaaatgtaaattaaaaaaaaagagcttttgtgtcttgagatcacttcttgtgtagaagatggccttgatactaggaataaagctcaaacattccctctcttatccaaaaatccttttgtgaaaatttgcgaaaatttcttgtgtgtgtttttattgcgaaaatttggtttttatcctcttcttgtgatgtatattgaccattgttatgtaatgttgattgttggctggtcatatgcatcataagtctctttatgtccataggtttctttttctaaatcgttgaattctcatctattcctttgaacttgggcctgactgccctttgttctgtcaggccggaagttccggtcatcccagtccggaacttccgggggtcggggatataaatacccagggagacccgagtctgttctctctctccttacttcttctcctccccgattcccaaaccctagctgccgctacagtgctcctctcggcgaatttctcttccaaccgtggaaatttgattcctctccgtggaatcaaccacattggtggctagaaggttcatcccgcgatcgatttgcaatttcctctctcaaggtagcacttttgatcttctcttttggttcatcatgtttttgccccgatctctaaatatgtgaacctagggagaaaaccttttggatagaatttttcctgctaccttgtagattgccgatctataggattttgtcacatgcacaggcctgtttgaatccactgttcttcagttttgcaggccggaagttccggtgttcttggcccggaacttctggtctctgtccagctagccagcaaaccttgattcctctatttttccttttaaccattgcactccaaccttgttgattcttgttgcaatggtcagcatgcctcgtgagaagagacagaagctttctcaggatgttccagctgactcgagtcccccggttcgtggtcttagggggagattgggcaaagaaaaaattggagatttttatagtgggtgtcagattccgatccattctaggagggctggtagcattgtcattcgtgaggcaccccgctctccctctctagctgcatctgagtcagataatggtggcaattagaatgagcctggttttgagagcaatcctttgaggttttacaagtcaagggctgttgatcctgatcctagacacccaagagtgaactatctgaagaatctgctcaagtgtggaaaggacagaatggtgagtcctgatactttgcctactaactctcaggatgacagattcaggaccttggtgcaggttgactggtataattctgtgatcatgggaagatctcatccagttgtagatatgaagtggctagactggcaatacatgtcctcaaagaacaacttagttttcaatgaggtgcgcaaggtgtgtgagcgcaagcacatggcagatttgttggccttgcagtattcctggaatgaggaagtgattggatagttctactccactactttctttggcaccaccaagaaggggcttaattttgtgaagtggaccattcaggggcagcagtatagggtctctgtggcatagtttgctgcagctttggggttagatgatgatgacttgagtcgtccacatatctttgtagaggatgctctgtcaccgaccagcactactttcttgtatgagaaggatgcttccaaggattgtttggggactacttgtgggttgcgtccatactatagagtgttgtactctatcttcaggtggtctttgctccccaaagtgggagatgctacagcccttccaggtaggcatgtgctcctcctcagtcgcatgcgctacaacaagccagatttcagcatcatgaagcttatctggagtgagatctatgagatagtgtgtgagccaaagaggggctgcatctatgctccttatataatgaagatgatagaggaaaagactgggatttgttatttcatggaaaatcaacacaagcatttccgtccttatgctcccactacttcagctactccttcttccagggtgactcgtgcttccacctcagctgctccttcttcctctgctgcaccttagcgttctgagtcttcttctcccataaagatggctctccgggctatcttttgtatgtctgctaagactgctaagaaggtaaagaagatagagaggcgtcagaaggaagattggattgcagcaggcaaggatgtctctgatatttctgatgattaggagtttgttgatccttttgctgcttatgagactgctcgagtcattgttagtggtgagggtccttctggcacttctcatttctttaatgaggagtcctctcactccgaggagagcagcgatgatgaggagtcggatgcccctactgagaatgttcctacagatcccaatgaggcagtggacgccgccgggcaagacatcgactctcctcactccggcgacaccgagatcattccttctgatggcgatgatgaggcttgatcatcttcttcccttgtgattttgtctctttttggtgccttgatgccaaagggggagaaaattgcaatcgaagggggtcaaaattttgtttttgctgcttgctgcctgctctgtctgtttatccggatgttccggatcctcttatccggaagttccggacctggcagctcccttgctatttttgcctgtcagcttgtccggaagttccgggtattttatccagaagtttcggacctggtagttctttggcctctactcgtttggacttatggacatgtaataattctctatttgtgtggatgtaataactgttagatgctcttagctgctctttatatttattgcattttatttatgctttgagtgtcttatttgttgtttgtgatgtgatgttgattttatcctcttgagtgctcattatgtcatatcatttgcatatcatatctattcttctgcttatttgcatcccatgtaataattctctatttgagcctcattcatatcttccatatgcatacacaaaggggagtttcattcatctctaaccattcaaaatcaaaattctgatcaatctttttgtaagctttaaccatgttgcaatcaatcacaaaaaagggggagattgaaagtgcattaatccccctagtgggttttggtgattaatgacaaatgtggttaagggactaatgagtttattgagcaactttcaggtgcattagtccaaggtgtggaagatggatgcttggagacccccccaaaagtataagatcaaagcggaccggaactcaagaagtgcataggatagtttatttattgcaatcgagtttttaggaaaaaaccatactattaagaggggttccaggtgatgctctgagatatctcaagtgctcttagtgtgaaccaagtttcaaatttccctaggagtcatatttgcaaatactccatctgtccagaactgcaagtccggaacttcctctcgtctaggtccggaaattccggtcttgtgaataagattttcctaagtatagtccggaagttcctgtcctacaggtccggaacttcctatctagtctccagttcaaatttgtgagcaacggctagatgacgtcacctagccgttatacatatacagctcatttccagctcattctttggccattccactttcacttttcaaacctagagctgttgctagcctctcccaagtgtttcttgccttctccactcaatctagagcctaattcttgtgagaaagagagattgagagggagagaagaagatctggaaaggtgtgaagactaggatcttggatgagctcttgggatatctcaagagctgtcatctcggtgcttattactcttggagatgatctcctagacggttaggtgttgcccgcgagaatccgttgaatattgtggatgtcccgggtaagtttgtgaaggatctcctctcctctgaaagggaacgaggtaagtgaatgaagttcttgtgctgagattctagaggttttccaagtagagcaacctacaattgtggtggatttctagaagtaggttgagttggatcttggtggacactcaattctagaaatttgcctaggagtgtttggggttgaaggctgtggatttcctctggggtttttgcacaagtgaggcaaggggttaatcgagacccagctccttggagcccctcaacggagagtaggatcgcaagatccgagcttcgggaaaaaatcgctcttgtctctttctgtggatgattctgtgatctatcgtctgcttagaatacctgtgcaccatcttgtgaagattggcttagtctcctatttcgaaatttgaatttcatctctgttctgttacccggaagttcctgtcctagaataccggaagttctgggcctggcaggccggaagtttcggagttccttaccaggaagttccgggtctgcttgaattttaccgctgcgatttgtttttcagtttctagggacagcctattcaccccccctctaggcttcatcagcgcgttcaggtcccaggatccccaaccgtacattcctcctacaatggtcagccctttaggcaatcgtagcagttgcgcctcaacggggcaggtaggatcacagagcatagacgccatgcaaacccaggatgaaaccacctgccccgttgatgacatgactcagcggacaccatgtgagctgcatattcccttcaagaacttatcaataaaggtaagctcatagtttttagattttagacttgtccattccgcaagttgctgcttatatatgttgattactaataaataacctctcacaacgtgaaggtggcgtcgggcatggccatcccaacggacccttcagggacttaccactacaggccgattccagcaggatactccaaggtcaaagttgagtttgtggaagccacgtacgaggacctcgacttggactacgctggaggagacggtgagacgcatctacgagacacaagccatgccattatactatggcgcaagtagtacaccatcctccttgggcaacaagcggcgtctcgtgcaccatctcctccggctccgccatctcctcctcaggctcctacaccgtctcctcctcatgctccagcaccgtctccacctcaggcttctgcaccgactcctcctcaggctcctacaccgactcctccgcaagctcctcgtccggcattttccaagtcaagggcaacgaagggcaacgaagaaggcgaaagttgacaccgccaaaaacaaggacccagggtacgattgcacgcaagaggagcttgacgcttatgtggcatcaaaagtcagcagacaattgaagcctcgaagtctagaaaagaagattcctatagactcaagtgtcaggaacttcttcaggggtatgtctgcacttgccaaggaggccataaagctatcggactatgagcgagcacttaataaagcatcttctggaaactccaaaccagtcccttagcttggagagcaaccaaaccaggagatcgaaccgttggtgaccggtgaagaatttggaatacaagattttattaatgacaccgggctaactagggatcaattgctacgaggcgcaccaatcaaaaaggcggaagtgaaatacatgtacgaacccggtaaaccgcttgtcaagcctgagcaactgcagtccctaccgacacaaatgtacaaattccatcaactgtacatggagatgagcaccaccggtagagagataatcggagcgaggatcagggacacggacttcttgcaaggagaagatattctctgaatcaatttcaagggtatctacgaactataccagctggacgccctcgacgtctctattatgagttgttagactttgtaagtatcgttcagttagatttcttattacatttcctttaattaattaggtccttatatataagtacacaatatataatatatactaccttttatctttgtagaatggagattcaaacagcccgacggcggggggttttcgatactggattcatcgaccctcgtaaagtaaacgtcgaaatgatcaccaagtatccgcaagccacagaggacaatctcgtccatctcctgaaggcgcagcattacaagacattcatactattgtcgtacaacatagagtaagtttttactatcttcctaccaaatttcattcccgtacgaacatgctaagtgtttcatatgtaatacatccgacgcacattgcagattccactgggtccttttactcttcgacttggaggcctgcgtagtcaacgtatatgactcaatggataaaaaagagtctacgtttgaccaggtttttgaacttatagacaggtactgtcataagttccaatgttaattacgaatcttgttataattaattgctactacgaatcatagctttaaactccatgtagggcttggtatcggttccgtcatttggtccgcggcaactgaagaccaagacttaggcggaagtttaaatttcatgtgagtacaaatgctctacatttatattgaatctccaattcaaatacaagtgtatatatattaattagatctctcgctgtttgtcatgtatatatagtgcgcaaagcaagcccagggaactaacttgtgcagctacttcgtgtgcgagtattgccactgccttgcaaaccaaatcatcaacacaacagagcttgatgtacgtacaaataaattgaaaatttcattgcgtacgtatcgatttgttgttcactaattaatttcatacattcataggttattcgcatgtgggataacctcacacacaaggaatttatcacggcggttcaagaacaactcatgggattcatcaacgaacaaatccttgatcccgagggtgaattctactgcgacggaaatacaattcataggtcgtttctgagataacgactactactacatcgaagtctgtcacgccctaaaaatcgcctaaattaaaaatgcatattttaaatcatttttagaaattattttaaaagcctacaagttaaactctaataatctaggaaaaatttcaacataaaattgagctagataaaattttattaaatactttgcttgttcctctattttctagatttttctgggaattatttgagcaagggaagtatttttaataaatgaaacaacatttcacgaattattaccaacattccccctccccgcgcgctccaaagccggcccacgccggcccaacccgccccgccgccgcccccgagcccgagccgccgccatgctccatcaaatccgccccaatccgtccccctcgagtccgattgattgaggagttttgatcccctcatcctcctctatctttaccccaaaaaatcggagcaaaccgttgagtattctaaccgaatcgaattcattttcgaatttatccccaaaaccgaatttcgattttcttggatcgatttcttgcggtgggaatccgatctcttcaatccaaggctataaatagcaccctagttgtcctcttttgtttgccccctttcccgagctctctagtgcgccgtagagtcgccgccgcgtcgctttagccaccggcgtcgccggccaaccaccagccgcgccgcgccgtcgccctagccgttgccgctgccacctctcgccgccgtcgggtgcgcgtgaccgagggctagcccggccgccccctccccgtcgtcgccggccaccggaggaccgccgccactgtagtccgagtcgccgccgccgcccctctcgtcgccggccgtcgtcggtcgccgttcgtcgtttcggtgagcaccattgggttcgtaccgttgccctctacgtgtaggtgtcctccaaaaccccggccgatcatcctagctccggcgaggccgccgtccgagccaagccgctattgatgacgtcatgctgacgtcataatcctttctttttcagttttttaatagatgaaatagattaaaacttcggaaaatcataaataattcatcgtagctccgattcgagtggttcaagttgataattttttctaaaatcgagatctacatgttaaaaatatcgacatgtactgtttatgcttgtttttgtactgttttgttgatttttggttatttgctttagtttccgacgttccggaggagagcgtttcagttgaggaaggttcggaggtttttgtggaagcccaaggcaggcaagtcacacagatcctaaacagccctttgagcatgttgaacccgtttaaagctattgttttatttcaacctatgtattattttcaaatgtcatcgggtggtgaaccttttccaattaattaatggccgaagatgactttattttcgtatgggttataatttgattagcatgaaccttatatattggattggttcagctaaatgccatatgtatgtttgcttagtcatgcttagaaacattagctaattaaagaggaataaatataaattatattatattattattattaattatggttaaatttaatggtagctcacgatggttaatcgtgttactgttatgaaacatttatcgtgccaaccacaagccagcatgggcaacggctttatcttttgtatagcatgattcattatagtgtgccagactgtgaagtagcgagaagtccgtgggggtcgctggggagtccattgcctctggttttgacggggagattatgatccaggaacggtgcaccatggtgagttgtgttgtgcaaggggtattgtcacaattcctttccaaggtaccgtggtggtactgaggctcatggtgacatgttgtgggattgtgtcttgtgggtacagtggtacacctctgatcagagtaaaactattcgaatagccatgcccgcgattatgggtgagttgagcaatgtttttcgtgattagtctcacattattcattaatggtaattgtgataattaatttgactcctggtttggaatggtatattcctggtatggaggtttgatttgtacaaccagggttggttgttcaaatgaggtagggcctatgcaacacgggtgtgttgtatagtgtttatttaatactgattaattattcaactgttttactattctcttaaatatttattaaatgatgtttatgcaaataagctatattatgccatcctttgttatcctgtgcacttgcatatttgctgtgtggcttgttgagtatgtcatatgctcattcttgcaatattcattcatcagaggaggagtacttcagtgaagctgatgatctggaggattaggcttgttccgggttgagatgcctatggagtggagtcgccatagctgttctgtagtttgttttagtttatttttttccgctgcgtagaatgttattctttgagaggaactatccacctctgtaataatttattatttgcgaatgttaaataggcatttatttgtactctattatcaatttgttattgtgtgcctcggctgattcctggacgagggtttaacactcatgtaagcgtttggaattttggatagaaattccgggcgtgacaaagtcgtagctagctaggacatcataatgaattgtaattaatacatgtctatttttctatatgcatgtacacatttactttagtgtaaatatatattttggtcatatatatatgcacataaaatgttaagtgctttaatatatatatatacatatgcatttgcataacatatatgtataaatacatatatattatgcatgtatatgtattgaaacatatataaatataatatatatatatatatatatatataaaccatgctgcaatatggccatgcaaataataaaaaggtcagctcgatctttggtcccggttggtaacactaaccgggatggtggttggtgttactaaccaggactaaagatcgatctttagtcccagttatttcacccgggactaaagatagagatcgtctcggattggtaaccgggactaaaggggggttatgaaccgggactacaaacggtttcttcaccagtgattgcaattaccagaccgagatataatgtcagatgcactagcagacctggctattgagcttgatctccctgccaaatccgacataatggtcatcattaacaagatgttgctaccatccactggtctgtatatcaggcccaaggacgcatggattggatctgatcttcaaaaggtagcaaggatcaattggtcgaaggctgtttttgatgccctccgcgacaacgttattctacggcacaagaacaaaacaggcccaaggcagcagacatatatacaccgccgcattacattccttgtggtaagcatcccttatttacccaaccattccatttccaatgcagctttaattttctaatgttattgtcacccttctctatacagctgttgtacatcaataacctcaaggtgccaaaggattcattgacagttgatcactgccaaactcctcgcatacagctctacaccaagcagcttgtggaggatatttcgcaggaggatcgtgtcaccgattcatctggaaactatgtgtttggcaacctccctgtgagccctatgtcaatattgcattatatttatctgtttgcaatatagggaagagcctgtcatctatctgaactgaaatgcactgcttttttattgcagatgaatggtattcttggtttatgctatagccaccctgactatgacaaggaaaaagaaccacgtggggacaattccggcactccctttgctgacgagttggtttcgacggtagaaatttctttccccagcatgtttgacagtgtaggtccccatttaagtggtctccaagatgagcacaagcagcgtgtactggatgctcttggtgaatatgatcaccagtcaaagttaagtgcagatgctattgccaaacaaattaggctggttcagacatgccatgcgcgtgtcagcgaccatatcatcagcatcatcaggggtgaaagccgcactcaaccaccaccggatccacaaccacaaccagcctcacattcacaaccagacaaccaacacggcccagttgcatcgcaaaccagtgaggaagcacaagaccaccacactcacagcaccccggacatttcgcctaccaactccccagcacttcagccttccaggatcataacaccagatgctgcgttgaatgcgacaccacagatcacatccactgaaccacaccctcatttaccaggggagctgtttccgaccatggacaagactgccactggagatgaaactcaagcccacactcctcagccagatgcggattttcaacgtggcggcgatgttggtattccactgcaaggaactaattttaataccccttctttacacacacaacgagctgtgcacaaactcactgtatttatttttcggtcctactcttacctgttatagttttatttgtgtaaacattagtcagcatcctcaatcattcgcaaggtgtaatgccttcgctcgctgttatgcaatgttcttctagtaattcatttggtggcccctcaattattattctttatacaacatttaccttcagtacaaaacattattgccacacactttaatatttctgtaacaacaatatctgttgccaataggaagacctgtgctaataacaatgattacaactgacatctacatttatccgttgccccaggaattattgctattaccatgactttcgagggcacatacacaacccaatcccatactgcagatggtattgaacggcaccacgatctgccagatgcggatgttgaacatggcattgagaccgacatctccatgcaaggttgtctgcgtttccagtttttctttcccactgcataactttcgcaaccatgtggcactatactcattttttttgcaaagtatagtcataatcatatccagcgttgctatatttctgttttctatgcatacctcccatctaattagcaattatcttactaactgatacacttgtgatgtgagcaatgcaattactaccatggattcttttgccaaactacaaaattgcctcatagtaatacccttactacctgcacaatactcacactgaacctctatagccctacctgcagtaccatccaattttagcaacccatttactacaagctcattacatttatcttgtatatcagtttcccgtatatatgaacattaatcaaagtccttactaataatttcatcaatgtacttagctttgtctacttagtaaaatttcctttaaatgtattagtgacacctttacccctactctatcgctgcaaccatgtgcaataacgtttaccaataggattacttacttgtgccataccacaggaaatactgcaattgacgtgactaccgagggcacaaacacagccaaatcgcactctggatatcaaattgatgggcaccaccatcatccagatgcggatgttgaacacagcagcgatattgacatccccacgcaaggttttctgctcatccagttcatttgctttacactattgtcacgaccggaaataacccaacgggcgttccttacgtgcgtgcattaatccttgtcccaggaggcaaggtacaccaaaagttgatacaattcagagtttaacaagcggaagcgtaaatagctaatttattacatgggcagcgaaggcccagcacacacaaagacaaacgagaaacaacggaagactagggcgacgaccacaggcacttgacggcaggcacgagctagacaccaaagccttcatcctccaggaactcctcttctgggtttgggaaaaattgagcaagactgagtacaaccaccgtactcaacaagacacacccacaagtgcagaataaatgcaagggagtacaaaggagttatactataaagggttagggttgcagtaaacagcatttaaagacattagttgctcaaagctattttgtaagacattagattctagaactatacaattattaatcaaggccgtgaacccacacgaacctgccttaacccaagggctacgatgattcagaccgaactggcaacccgaccctgggtcccagctcgtcccaagccaacccaagccaaccattccacattttagttgttaagcaggttttaagaattaaaacactaacttgggtacattgctcggcttgcccataaccgagggcgcggctattcgaatagattatactctgatcagaggtgtacatctttacccacaagacacatcttcctcacgtgtaaccacgtgccacataccaccacggtatacagacgaaagacgtgacatagtttccaacccatcctagccatagacaagagtaccgacccaatcccacctacggccggaacccccgggacaggcaggcaggactgaacccctagcagcaggacaccggccctgtgccatgacatctcgactaccgggccgcagctcgtgtagccttcatttgtcctagagatgtccatcgacccccgacttcttccatctccatccgtgtacttttgtttataactagactgagccacaaactaagccttacccactagacatgtggaagtacggtagtgctttgcaacagaggcccgaagaccggtccttatatggccgaggtgctactatcaaaaccatgcacctcgagcccagcctaaaaccattttggggattttgaatagaaggagcggtgtgaagccaattt

SEQ ID NO: 17379 - DNA, 30834 bp, Oryza sativa
  unsure (1)..(30834): unsure at all n locations
tagttggattggtagatcaagccgtcgacgtcatcccggagtgaagcgctgtcgccaagccattttcgtgtctgctgccatcgtccggacctcatcaactccggccaacaccatggtatatacccatgaacctcaaatactcacatgcatgcacccccttaaccaattcatgactgtagatgcacatgcaccatcacctgaaaacaccttccgctcacactcgccatcggcgctactccgatgtcccctaaccaagaaaactagaggaatggaatcgcgagagctttctcttcattttatcttttgacctcaacctcaaacgagccaccgtttgccgccggcgagctcgagctagctctactctgtctagagcagagggatgtctcccgtgaattagattatatcggtatttgaaattgggttaaggtgttacgacctatttgctgcattccctaccttgaataattgatcctcttgctgtttgaacccctagaaatggttagagcacactctttgtgctcaaatgggtttatatatgctctatgtgcaactacttgcttagccatatttagaaatatgcaaatgctcattccatctatatttaaaatgtgattttcatatgtgaacctttgctggaataaaatgaatatgatgggtatttacgaactaaaatgtgtaaaatgtgattttagacttgggcggcaagtggtgtgcatatggtgttagttacatgccgatagggggagtgtttgcccaagtccgtaaggaccgtaaggaccgaacttgtgtcaccaacttaaagttattcgtacatccacatgtactagtatgggatggcctaagctgattaatctatttagaactagcattgcattctggtaggccggtgtgtatgagttagtcgataattctgaggaattagtcgatgattcagaggaacttcctatttgccccgacgtggtagtttaggtgactaagtctgtccaatacaacggtattgtgccacgtgggtgggtttaaggcgtgggcccaccacttaacggttctagacatatttctaagtatgcataggatggaggaaaacgtatcgtgatggtgcaaggctaggctctaagtagtgtaaaggcttcgttgtgacctctagtccgcactcataatgtagagtgtggggtgcttgggccggcaccgaaccatctagagtgtagcctccgggcttctatcacatcatgtgggtaaaggtgtacaaattctgcagagttctttaaactaatcgattagccgtgctcacggtcaagagcgctttggtgaagtgtcatgagtatagactatgtttgaaaatgtgaacatgtgaccttggtttgaaattgataaatgtgttgagttgtgtgtgtggtgatatattattacttgttgtcaaaagatgacaacaagatattgattatgatggaattatgatggatttaatgttgaaacttaaaatttgttttgttaattgaagcatcaacttctttacaaaagaattgcgaaataaaacttgctttatgctgaaattgaactacatattgccttcattttaatatatgtcttacaagtagtatattaggattgtattgtgcttgctagtacattaacttgtttaatgtactgactcttgctgttgatataaccctttgtttgcaggtttagacttagtctttgagtgatgcgggttccgattgcttcttctaggatgagaacttaatggggtaaacccctagtcggtgtgcttgtgtttgggtagtcaagcttccggcgttctctaataagtttatttggccggtcggcctatgtatctattaagctgttgtaagtcttaagtttctttcatcttagttgtgtttactatgtataatcatgcttaagatgaaagtgtgaatctagtgcacatcctgggaactagattcacatgagtatgagttaagaatatttgagatgttgtagatctttagccatttttgtcaagtctcctgaatgtataacacatctggtcgctaccttcgagtggtttgaggggcacatctcaggctgaagttgactggcaggctaaaggactagcaatgtctccaatattcctctctcgaggcgtcggatgtttcattatgcttgtttgatgacttgaattattcatttcatctctcaagtataatggaaggtccggagagcctacgacaattcccgttgctgcgcactatggtaccatgaaaattttggattgggcgacattgggagatagctagttgctcggtcgtcgtggacatcaaacaaaaacacaaaggatatcaggtcattcttctccacttgcaacacttgggtttctagagaactcactgttatcagcttatgaatattggaacacaactctgatatgaactgtaattattctcttcgtgttcacatcatcggttacactttagccatgtgggataattgaccgacatacacagtatcgagtattgtcacatagtgagtttaaattactcatgcgccactgaaaattaactctgtttttgcgtcaggaaaataagtatgctgaaattggtatccttttgactgctgttaatatcatgaacgattggtttagttttttttgaatgcttatacttagtgttatcgatcttgttagatgttatctttttcttttaaaaataaaagtataatttccatcctctagacaaactaagaatacatggtaacaccatatctgtagacacaatgatttcatttttacaagaagagaccaggattaaccatggttaggagtatctgttaggctatttcttatggatacatcttaagaccatgcataaatatatggtgtagctgtaaggtgtaacaatgcacgaccaaaacaaccgatccctttcattcacttgtatcgtctcttatggtcttctctcctgcctcgccaaagctttcctctttagccttccatctgctagcttctactgtctatcttcgaaccctatcttaactatcagtaagaaaagacagtgataacacattgataaaacaattacaactttactttgcactcttgctctgtcctaattctcgcttaggtcatctctgatgctgctacatactaaaaacagctgatcaataagacacccaattttgaagagacaaacaattttggcttggaaagcatgaggaaagtgtgggcgatgttctgcagagagggatgaagtgtctcgtactttctgagatcacaataatgtttactccttgatcatcaacatcacctcatattacctaaaacctacgttatcagctatacacaaatatttggtgcagatgtgtataacaattcattggttcacatattaatctatctatctatctatcaatccaaagccggccgttctgccagcatttcattggtccacacggcaactctggactagttttttacttcctccgtctcaaaatgtagtcatttttaagattggcacgggtattaaaaaagtaggtgagaatgattagagaaagtgggtgatttgttaaaaagaggaagtaggtgagaagaatggttgtgattggttgacaggacaaggtaggtgtaaaaatagcttcattttatgataaaacattatgctagaaatagctatatctcggaacggaggtagtagctatttgggaatgtgttatggctttgccgtttcaccgtgaaagaaaaaaaggctattgcctattggcgtgtgcaccggctcacaccatgctggcctgcacagcccagtcagctctaggcctggttgtccggaggccaacatttgcattgttgtcttgtcaggttaattgtgcagttaggaccaagcagaaatagtataaaacaaggtaaaaatagaaaaaaagtataaataattttgtcaaaaccatctgaataaataaaatttattatggtgaaaactcgaaactgagtcgcgtacctaaccatacatattgatattatatatttctacaaataaataataatcagaaataaaaactaaataacagaaataagttgaaagattggatgaaaactttccaatactatattacaattgatactatatgcataatattttggttaatgaaatcgcaacaattttgaggaaacataactttaattttttagttagcaaatctaatcacaagtaaagttattggcaatcactaattacaatcgtactttggtttttctcattcttacaggataaacacaaaattaaatttctttcttctgggacaaacacaaaattaaattccattaatttgtcttttgaatgatattttatggtgtgaaacttactcatgtaaaaatatattactccgtccgtatcaaattacatatcgttctgacatttcaacttttagattgtgatcctctatctgcacctttcattaatgccacatataactggtaatcaaagttaacattgcttttaatactattaaaatatagttaatgagcataacaaggtaatttgcagtaagttcttgtgtgatgtgaaatttgctagagtaacaaataattaaaaaaaggtaggtaaattttctatattgtagatgagtcctaaaataagatatacatgctatgaatttatcggcgtgccactaggcgcgcagattttttctagtatatttactctttctgggttgataatacttgtggtttgaacaactattttttattataatatataaaaatatcaaaacatatatgattttattaaagtattttttaacactactctacgcatatggttttcatatttttaagataaatattttggaaattatttatagtcaaagatttcaaagtttgactttacccttgttcaaagcgactaatattgtcagcccgaagggagtattactccggatttgagctattacttaatcatcaccttgtacgataaaatttgaattcatggctagaaattatgttgttcccaattgcattatgttgatgagctataatgctatcattctctgttgttctcaacatatctcttccaagactttcatcaaaagttggttattaaatttgtagaatcaaacagaaagaactaaacctatggtgggaatatgtttagtaggatatatcggggcttttaggtcctagaagagagcaaatgctaattgccaagacaattcaattcaattatatgataaaaaggctaaagtgttgaaagaggaaagagggaggaattgatacgaaaagcgtaggatttaaccactatctagtcaaatatacgtaaacatagctaagttctatgatgtttacgggttcacatcctctaccataatgtcactaccattataggtactgacattcctaaaaaaaatatagacaatgatatgtggggcaataggagggtgagatctacataccagtaactgtaatgataatgatattatgttagaggatcctcacccgacgtttacacatatcttggctggccctttattgactttaatgatgctctcacattctccaagtatagttttacaaatctcaaagcacttgtaatttttagagataattaagtagcagtcagccaccactaagtcaagctatattaatcaaaaacactgttaaatgaaaggttcatttaagtaactctacaagtagtataaaaaatgagcactttagaaggtaacaagtgatgatattgatattgattttcctttgcacaaaaaataaagccggactaaacttttcagctatataaatcattgtcccaagagtcgagcaagagtggtacaatggtgaagaatgagtactacggtttccaaaactaagatcaataaacatgtgctctagatgcatgccacaaaaaattaagatctaggactgggcggacctaggaaatacaaggcgatggggccaaaatggtcatgcatcggcagcgacggacagagaaggctttgagaatattgtggcatagggtcgtacaatgtacttgtgttcatgatattgtgttgtgcatttactatatatttcgattattttagttagcatgattattagcaatgtcattacatcatttatatatttcatctaattcaatatcacattcacacccaaagaaccatagaaaaacatcgtattttcgtagtccgatatctaaagctcgtaggctggttgcatttgataaattagaaacatttcctcggaaacctcaaagtacaactcctttacagagaaatttgttggaatgtgtgctaccatatacatattgataggactccggcgtttcgcttatcgacgaaataagcgaaacggcatatttacaaacggataatgatttataaataaaacttttatatacgtgttcttagcgatctaaaagcaaaggctgacaaataaactacgataaaaaagccctaaaatcaactctaaatttaaggttaaaaatttaaattttggcttataagcgtaagcataagcataagccaaaagatgaggctgataatgtttgctagaattcatgcccacacgactcatgaaactagcaaaagtatgtcactaatcgatctacacctcagtcacttgggccaaaaccacaccactaatacaggggctttaaatgaattgggctggtacaatgaccccttccttaagagtccactactagagaactcagatgtgtgtagtatgtgcgatggtaacgctcttaagggctgagatgagagatcgtgagttggaatcccacattccacatatttttgacttgtatatatcttagtatcagttccttcaaccggtactaaaaattaacaactttagtctccatttccttgtttgtctcggttttcttctctcaattgctacaatcagaattaacaggggttgacaaccagtattaaaaatcatatatctcctagtggtcgatgcaccgacagctcacaacttacatggcggaggcccacaacttcaccttggtgtagactacgcacgagttatacagcaagggtacatatcagaacatcagctagctaggaaggggaggcacagtgaaccagggatccatgatgccatgtcctcggagatgtttgaccttgccataatgggacagtctaatgctatacgttcgagttgatcgtcctctgtatgggtgagaacaaaggaaaatagaagcacaaaccaaatgataacttctctctcgccgtgtatatatatatatatatatatatatgtaatgcatcggcccaactgcaaaacaagagttgcgtacaccttctgaaaatatttactgaagcagtagaatcatggtaaagaagatcgcatcaagtctgttgaaggagtagtatagctgtatcaaaatttggatggaatgactctgcgtatattctgcactttgtccggcatcaagaaagatggttggcagtaattgtgccacatttttactgtcctctgaagatgctataactcattgtctcatgcacttcacaagaaccagataaacacatcatatatttgtaaaagtttccaataatgacaaatcagataatatagtttttattggattatttttttagtctgcaaattaagtggaaaagacttcgataaatctgataaaaatgttgcaatgtgttgcacattgcttgtttgttaagaacgattactttacacgaaagtaccctaaccgaaaattttgactgcactataattattattgtaccgcaacattttggaccaattacttgctcctgaatacacttaatccatatcaacctgtgctatatatgctcatatatatcatttttcctgttcacttgtgtagttacctacacagtagacatggtccatccttccaacccaactagatgtaattaactttcaagctacagaatacaacccaagtattctttgttctgaagaaaatgctgaagctatatcttcctagctccccaacaatttttcttcctagtcccctatctcttttctcctccatccttctcttccttttttttccccctctcattcttaaacatctagaatctctctaacataaacatgctagacaaatattgaaatcacacatttattactgtcgaggcatatagccatatacctatttctagctagctagttgcataccagtcaactttttagtttcttgttcttaagaaccacacatctattaatctcttacatacaaaatggtaacccgaacatgaacttagtttgtttacataatacatacatatctgcaatgttggcatgggaggcattgggaaagatgtggatatcgagtaaaaagaaacatgacctctaaaccatcgaagggtctcaagaaggtactagaaatctttgaaccgattcaatccaactcaatcttgaactactcaggaacaatgtgaacgttgacgatcgataatctctcgatgttcatcatgaacaaagctttgatgtggaagttgatgagatcaatgactcgatctaactgaaagtctaggttgaatagcttggggcgagcagcaatgactgatatcaaagactagtcaagtaagacatttcacttagaattgattaatttcatgttatttgactagattagcattaaccggaacatagatctgcacattgctctatttatcttcataagtttattttcctcggatgcttaattcaatgctgaatgaaccatcatcacagtaaaaagaaaaaacactgtttctaaagcgtttggtgtttgataaatctattaatgtaatttttgttgtattgctaaagtttgatagtctgaaagtggaagacttcgaaagttgcatcctaaaaattgttggaatatgtcgcgcattgctagctagttcagaacgagtactttacatgacaacagtgcaggatgaagagcctgcccgaaaatcctcttgagtggtctataattaccttaggtggacatatggatggaccagaccaactacttcgtttccttctcgatgaattttatctatatcaagcagcatcctccatgtccatttgtccagtagccatgcatgaacattacagtttagatataccaaaactgcatgtagctagctaggcctgggaggcagagggaactactgagccataacatcatgtgtacatgagcagagttgcaccttgtcatgcagagaaacaacactaacatggttgagtagattatcggattgcagaatgacaagccaactatgagatcaaggcctgggttgaacgacctgattagtccgtgcgtcttcttaacacaagcgtttgatcaaaggacctggcctgataaaggatcagcagagcacctcatattaagataaaatagatcatttgagtagaattaatagaaaggggaaacatgaggcgctctgctgatcctttatatgtcattttttttgttctgcacatgtgtagttacctattgtacttagtactcaagaaccttataattctctgttctgaattcctagctaggcttctcaagctgactagatgcagttaataaccggtatcataacagagatggtatacgatcgaaattgagtacattaaaatgcaaaaaaaaaataaaataatgaacgacatatatgtttatttcccttctcctttgctcaaacatgatgccaatgacaagttatttcccttctcctttgctcaaatatgatgccaatgacaagttctcaccgtgtatatatataatgcatcgtcccaacggccaaacaagtaagtaaaatcaattcaactatggcagcaacattaattatctctcattcgtacattctacctagctagcagatacgtatatatagatcaatttcgctagtatgcacgcctacatgtctcatcaaactatagcaggagtatcgatcgttgatcgatctaggactgggaggtgctaggaaatacaagctaacagcatcaaaagtatcacaaatgggtgacgactgatttagaagacatccaagaaacagtaacaccttgtagtgtcttgaatcatggtagagatcgaaggcgttgctgacagacttgttggagtaatatcgaaatgaaatggctcctatactgtatgatgctaccagtgattttacaacatttctgtggtcctttcactactggagaagtgatctttgccgggtaggggaaaaaccacaattgtcccggttcaccaaaaaaccgagactaaaaacaatttttagtcccggtttataggttcaacgggaagatttcatcctggttcgccagttgtcagggtgtgttaggcccccggtgatctttagtcctggtttgtgttactaaccgggactaaagatcatggcgatttttaagcccggttggtaacacaaaccgggactaaaagtccatccatataaagtcttcttcttcctccagctagcccgagaaggcttcaaaaatttgttgagtttgagggaaggtgctgccaaaatttttggtgattttgttttggtgaaaatataaaatttgaaggagttaaaggttagcaacttcatcctcctctactttgtgataagcatttgtacttagagatatgttttgtatactattttgcctctagaaatttgggaatgggagatgatgaaagagaaagtttgtgtagggatgaaataatatagaaattttgtttatgtagaatttgggaaaaaaaaacttgtgataaaagagatgagaaagagaaagatagaaaattatatgaaaaagattagaaaacttagttaatttaaattaaattaagtaaaacaaattaaatatttgtttacaactttaaaatgatggggaatgaaaacatgaataatttgtggtattattttataatcaaattttattatttagaatttggaaaaaaacttgtgataaaagaaatgaaaaagaaaaagatagaaaattatatgaaaaacatagttaatttaaattaaattaagtaaaacaaattaaatatttgtttacaactttaaaatgatggggaatgaaaacatgaataatttgaggtattattttataatcaaattttattatttagaatttggaaaaaaacttgtgataaaagaaatgaaaaagaaaaagatagaaaattatatgaaaaacttagttaatttaaattaaattaagtaaaacaaattaaatatttgtttacaactttaaaatgatggggaatgaaaacatgaataatttgtggtattattttataatcaaatatgattatttagaatttggaaaaaaaaacttgtgataaaagagatgagaaagaaaaagatagaaaattatatgaaaaagaatggaaaacttagttaatttaaattaaattaagtaaaacaaatttaatatttgtttacaactttaaaatgatggggaatgaaaacatgaataatttgttgtattattttataataattatatattgctatttttaatattgtttaattggtttgaatttcgtggattaatttttcatgatttttgtgcttttcatgtagatggatcggcaatggatgcgcgcggactgacggtcaaaagagttttttgatggcttgcataattttctgaaagtggcagaagctaacaagcagaataatggttttatccgttgtccaagcactaagtgcaaaaaccagagagagtattctacagttagaactattcatattcacttgtttgagacgggcttcatgccgagctataatgtttggacctcgcacggggagcaaggggttcgaatggaagaagatgaagtagaagacgagaacattccggactgggcccagtacgttggatttgaaggaaatacaacgtgcgaggtggaaggggctgacgttgaagatgatcttggtcagatgttacaggacatcaaggaggattgtgaaagtgaaaaggaggctcagaaattagagcgtatgttagcggatcacaagacgccattgtaccccggctatgaacaggggcacaaaaaattgggtacaactctggaattgttgcaatggaaggccaaaaatggtgtcagtgacaaggcatttggcgagctattgaaactagtgaagaacattctttcggaggaaaacaagttgcccaaaacaacatacgaagcaaagaatatagtctgccctctaggacttgaggataccaaacgattgtatcctctatcgcggtgaggagtacgagaacctagaagcatgcccggtctgtaatgcactatgatacaacattagaagagacgatccaggtgatgttgacggacagccttcgaggaagagaattcctgctaaggtgatgtggtatttccctataataccacggctcagacgtttgttcaggaacaaagagcatgcaagattgatgcgatggcacgcagaagaacgtcaacaagacgggatgctaagacaccccgccgatgggttgcagtggtgaaacatcgatagaaagtttaaagactttggaaaggatccacgaaacgtaaggttcagtttaagtacggatggcatggatccatttggagagatgagcagcggccatagcacttggcttgttacgatgtgtatctacgacccccctggctatgcatgaagaggaagtacatcatgatgttgattgttattcaaggcccaaagcaacctggtaacgatattgatgtgtatctaagaccactggttgaagatctcaaactgctgtggaagaaataaggcgtccctgtgtgggatgaggacaaacaggtggaatttaacctacgagcgctgctgctcgtaaccatcaacgattggcctgcccttagcaacctatccggacagtcaaacaaggggtacaaggcttgcatccactgtttggatgaaactgaaagtacgtatctgaaacattgtaaaaaagttgtgtacatggggcatcgtcgatttcttgttacgaaccacactgtccggaagaaaggcaagcaccgtaagaagcctatatttcgaaacggtaaaaccttgttcgaaatggtgaaagatctgaaagtagtgtttggaaagggacctggaagccaacccatagccagcgaagatggtcacgcagcaatgtggaagaaaaagtctattttttgggagttaccctattgggaagtcttggacgtccggcatgcaatagacgtgatgcacctcactaagaacctctgcgtcaacttgctgggcttcctaggtgtatacgggaagtcgaaagatacacttgaagcacgcaatgatctaaaagatacgaaccaacgtgaggacctccacccggaaccaaaggagaaaggaagccaatgcttgagcccatccagctacactcttagcaaggtaaagaaggaaagtatgtttgaatgcttggagagcatcaaggtaccgtctgggtactcctttaatataaagagaataataaggacgaaggataagaagttcacaaacctaaagtctcatgactgtcacgtgttgatgacacagctgcttcctgttataattagtggtattctccctgacaatgttcgagcaacaataacaaagctatgtgctttcatgaacgcaatttcacagaagatcatcgatccagaaagattagaagcccttcaaaatgatgtggtgcaatgccttgtcagctttgagttgatctttccaccttccttcttcaacataataacgcatcttctaagtcaccttgtgaaagatatcagtattctcgggcctgtgtacctgcacaatatgtttcctttcgagaggtacatgggcgttctaaagaagtacgttcgtaaccgtgctcgtccagaagtaagcatagccaaggggtatggaacagaggaggtcatagaattttgcttagaatttattgaagaccttcgtccaatcggggtggccgaatcacggcatgaagggatgctacggggaaaggggactcttggaaggaaagcaattatgactgtagacatcgatttataccgtaaagcacatttcacggttttgcaacaatcttttttggttgctccttacatcgaggagcacatggcgattgtaaggagcgaaaacatcggtaagtccgatggctggataacacgatgtcacattgatactttccccgcttggctatgacaacatctcatgggtaacgcgacgattaaccaacagctagcctttttcgcgaggggaccatctgggtccatcacgacatggcaaggatatgagatcaatggaaaggggaaatatgaggcgctctgctgatcctttatatgtcatttttttgttctgcacgtgtgtagttacctattgtacttagtactcaagaaccttataattctctattctgaattcctagctaagcttctcaagctgactagatgcagttaataaccggtatcataacagagatggtatacgatcgaaattgagtacattaaaatgcaaaaacaaaataatgaatgacatatatgttgatttcccttctcttttgctcaaatatgatgccaatgacaagttctcacggtgtatatatatatatatatatatataatgcatcgtcccaacagccaaacaattaagtaaaatcaattcaactatggcagcaacattaattatctctcattcgtacattctacctagctagcagatacatatatatagatcaatttcgctagtatgcatgcctacatgtctcatcaaactatagcaggagtatcgttgatcgatttaggactgggaggtgctagaaaacacaagctgacagcatcaaaagtgtcccaaatgggtgacgactgttttagaagacatccaaggaatagtagcaccttgtatgtggtgcattttgaatcatggtagagaaggcgttgctaacacacttgttggagtaatatcgaaatgaaatggctcctatatttgtatgatgctacaagctattttacaacatttctatagtcctttagaggtactaactgttgagaaaattgatctctcggttcaaaaaacagggaggagaacgggctagacagttttttccacctgttgtaactcgaaatcacagcaattcaatttgttttaatccctgattaactgtgtgcagtgatcggtggcgcccaatttattttcttttgagtcaccaccgattccctacaatgctaaatgtaaaaggggagcccgacccaagagcggatgacgatctctctcgatctcaatctccccgataaccagaccctaaacccaatcaacataggcgctggaggggaaacgtgtggcggttccgggacagtgtaggtggcaaccggaaagctatcactaccctcacgagtgatcgccggcgacccctttgggatcaagccagcgttctcactgctaccactatttcccctacaccaacaatacgcgaggtggttcgagtttctgcatcctctacattcactctggttcgagctagaacaattacaatgtcttagaacaatttcgaagacagcagcacagttgtcctgatcaaattgaacgaataatccatgtggtcatgctgctgcgcaggttcgtgaggatgaatcaataaaggcgggaggtcttcatcaccaggatggatgtcggcaaaatcagtgttaagaacaaaaacaccaaaagtccaggactgacctaagccacctcgcaaggggagttctttgagcacgattactcttggcactgcatcaatgtcatcaaagacagctctgagcaaaactctacctggaatgggatccctctcctgctaatccaccaggcgaccaaataggggaacagcagggggagaataacccacaaaatagaggcaattcgggaatcagtgctggtccaaaccagaatctggcaatgtctgttctagaaaatgaaacttctcctgtgttctttgtgccggattctgttcagggcaaaatccaggaagtgcttctcaagaatcagttgttaagacagttagcagaaagagttcaggggcctccagcagtccctttggcgcttgctcccttcactgctttgctgctcccaagaaggaatgcaatttatgattctttgccgccagtcttccactcttcacagctgcccgtggtagtggttcaacatgaggatcatgaggatgatatggaccatgacatgggccctctgggccaagatgagatccttgatgttcagcttttggcaatttcagagccactggaccaggctcagcccaagagcccgccaagaacaggaccagtgcctctcctgttagaaccaccaagagctccaatcaagaagaaagatggcaagactgtcttgtttgatcctaacagaaggcagagtgctcggatgcgttcttctagtcaggagctcacccagcctgaccccagaatgggcataggaaagccgagaggaaaatctgccaaaaaattgaaatagttggcaggtatttcaaaccttctagctggcaatatttctttatcagcttctgattttcattctgatttagatgaagattgtctctctacatctgattcctctccttctgactgttcaatatctttgctgcaaaagttgggagtggaaatatgcggtctatctcctgaggaggtggaagaggcgactttgggtggtgctaggaagaagaagcttccaaggccatctgaagaagacaactaggcagcctccctggactcttttgtttatctcagttttaaatggatagcagctatatctcttatcttttggttgtatgtttgtggaaccttgatcacctggttgtgatgtgtggctgtcagactatttatgttactacttcaagcactgagtatgatatgcttgacatgtattcagggtattttgttcaatcaaggttgtttgttataaccttgtgtttctcctgctatatttatgtcctcgatgaatagtcaagctagaagtatgaacattctctgttggaatattcgggggatgaactccccaggaaaatccttagccttatatcagcagattgatatcagtgcctgccacatcttatgtttgcaagagacaaaaaagcagaattttgttttagccgacatcaaaaattttgctccaaaacgctttgattcttttgccttctccccttcacgcggtgcttcaggtggaattcttgtggcttgggtctctcgtttgcttcaagggagtacggtccagattaatgattatgctgtgacagtcaaattcagctcgaatctcaacaatgctacgtggtttttatgttgtgtttatggcccttgtgctaggccgcaatgtgatctttttgttcaatggttgcgagaccttcatatcagtccagtggaaaattggctcatccttggtgatttcaatttttatagatcagttgataaccgaaacaagcctggggcaaatatgaatgatatccttattttcaatgatattattagtcacttgggacttttggagttgccattaaaagggacgagtttcacctggagtaatatgcaggataacccactgctgcagcaattggactggttctttacttccccaagctggactctagctttctcaaacactgatgttcaagccctgacaagaagtacttctgatcatgtaccatgtgtggtaaaaatcagcactaagattcctaaaagctccatctttagatttgagaattattgggtgcaactggaaggtttctttgaggttgttcagtcagtctgggcccttgaccctgggtttgaggatcctgcaaagtgcatctcctttaaattaaagcacttgaggaaaaaactactcaattggagcagaaattactcccaactatctaaattactagtcaactcaaacagggttctagatttcttggatttgatagaggagcttaggccactatccatcttagaatggaattttgaatatgaaaagatgtaccaataggtggatgctcctaggtgaggaaaataccaaatttttccaggccatggcaacagaaagatttaggataaactctattccccaagtgataaatgatgagggtacctctatttctgctcatgaggaaaaagctgatttgttttaccagaattttatgcaaagaatggggatcacaacttctccttcaatggcttttgacttgccttccctgtttgccccccagaatctggatagcttgattgaccctttttacacacaggagattgatagtctaatttctttactcccggttcataaggcacctggaccagatggtttcaatggtcagtttgtcaaaaaatgctagccaataattgcacaagatttctatagacttgcagcgcatttccatgctgaatgcactgatctacagtgcatcaatacatcttatattactctgatccccaaaaagcatctgcctgaaaaagtaaatgattatagacccatatccttgatgagcatcagtctgaagttcctaatcaagttgttggccgataggttacaaggggtcattctcaagattatccatgtaaatcagtatgggttcatcaagggcagaacaattcaagattgtttggcttggtcttttgaacatatatcatcagtgtcaacaattaaagagggaaataattctgcttaaacatgactttgaaaaggcctttgacactatagaacactcagcaataattcagataatgaaacatatgggctttcctctgaaatggctaaattgggtctccttgattttttccacagctagctcatctgttcttctaaatggtgtgccaggtgcctacttcaaatgcaaaagaggagtgaggcaaggtgatcctctttcacccctgttgtttgtccttggagcagacctcctacatgctgtagtaaacagagctttctctttaggactgttgtccaagcctatcaatgagcaagacaataagggtttcccaattgtgcaatatgcagatgataccctcattctgcttaagtctgaccaaagagaactcttctgctttaaagcaattctgaatacttttgctcaatccacaggacttaaggtgaattatcataagtcacagctttaccccctgaatgttcccccagaaaaagtacacttgttagctggtctgttgggttgctctgtgggacaaatgcctttcacctatcttggtttaccaatggggacaacaagacctagactgattgactttgcccctctggttgacagaattgagagaagactaacctccagctctatgttcctgccctatggagggaggctaacccttgtgaactctgtgttgtctgccatccctacatattacatgtgctcccttcagcttccagtcactgtaattgaagcaattgacaaggctaggaaaaactgcttatggagagggaatgatactagctcgaaaagaaagtccttagcggcctagcataaagtttgtagaccaaaggaaaaaggaggcatgggtgtcattaatctgaccttgcataacattgctctttttctcaagcacttggcaaaattctatcaaggggctgacctcccttgggtaaagttaatctggaattcatattatcagaccaaggttcctcacggagtttttaacaagggttctttttggtggagggacattatcaatctttcagattacttcaggggaattgcaaagtgtgaggctatctcaggtaacacagttttgttttgggacgacatgtggaatgaccaaattaggagcatcacttacccacatctctgtggccatgccattgccagaaatattcgttggctgtcacctgtgctaaaccctttgaggattgttttaagtttccactgacccaggaagcttacacagaatttctgcagctaaagggagagttggatgctctgtccttagcaagtcagcagggggataattggagttttatatggggcaggaacaattacacctcaaaagctttttacaagttgaattttgcagccatgcaacatcccagacctttccgatggatctggaagaccaagtgtgtgatgaagataaaagtttttatatggcttcttttctctgataggctgaacacgagagacatgttggacaggagaaaatgcgcccccctaaatgctgatcttacttgtgtcttatgccctttgcatcacagagaaactttgtctcacctgttctttcaatgcccttttagtagaaagtgttggcagaagctgggaatatcttggaacacttctctagaagtctttcagatgctggtgctagcaagattgagatttcagaaaaaaggattcttagagatttgtttcattgcgtgttggcacatttggaagcaaaggaatggaaagattttccagaatatagatccttcatttgaccgctggtggaattcttttaagcataaaattcttctacatatgtgtaggatgaatgatgatcttagacaattagtttctggggttgtagccttttgtagtttttcttttttcctgtaaatactttgttggcttctataaaatacactactgggccattgcctggtagtattcctttcaaaaaaaaaattgaacaaataaagttaaactacatggtctaagatttctgttgcaaagcaccatgcacgactagctgatctgttcaacgagcatgctggtttttacatcaaagaaaagaaaacgagaatgctgctggatcatgtgtctgcatatacatttctccggaattgaattgagtgctctgatcattccttgtgattattcttctgatttcatcaaattgtgtcctagtcccggcatacagaccatcctattaacaaccccgaatgatgtttctccctattgataatgcatgttgttttgttttggataaggatacagtctccaaaaaataactatgaacattaatatatatgaaagtatcaactaatatatgattttattgaagtattttttaaactaatctatacatatgatctccataatttcaagacaaatatttcagaaactattcatagtcaaacattttaaaatttaactttactcttgtccaaaatgacaagtattatcaatctagaggggtagcaagtgtgcaagttttaaaaaggaaatgttgtttattggtctagaaaatttgaaatgcagcaagcagatatgcaaattaaaacagacttaaggcgttttaattccagacgacatggaatttgtttacctctgtaaaaaaatttggcatcaatttagtatagggtgtgatgccttgagagactagttaatcaaagtaaggaatgctaatacttactgactgcgcccatcaaatttatctaaaaagatactcttctagagcacttcatgtctcaaaatatataacttcaatattatctaaaaaaatatactcttctagagtactttatgtcccatacttccattaatatccttcctttcaaatttcttaattttcatctttaaccccagccatcctcccactcctgagtaagatttgtcaagcactaacaatttttacaggtagtaattccctttaacaatcacccatatatgcctttattgcagttgatatctgaacactgccaaattctatatattcgtcactctcttctaattaacctccatatatcctcacccatatatttcaactgcagtctgcagccatctctcatccgcatgtcttcatttttttctcctctgaaatttaatttctctcgcgttcttaaacttccagaatttctgtagcgtaaatatgacagacaaaaaactgtttatattcctagactcctagttgcatatcattgtgccatatatgttgacctgaagcacatgaacttgaccattatttttctacaaaataccacatgcatatatatacaacaatgttggcttgggaggcatcgggaaagaagtggacatatagcagaaagatacatggccaatgaaccatgggtacatctccaaaagagtgcgcgagtgtgaaatcattcgaatggattcattccgtctctgtaatgaagtgtgcagggccaatgtgcagtttggcgatcgatgatctccttggtttgatcacgaatgaagctttgatgtgaaagtttgggggtgttgtggacaaagagatgaaagagatttgggggtgcaaagttcctattgctcttgaagagcaattttacggtccttgaggaggtaccatgaggtaccattttttctattgtaaatttggtatctcttggtacctaggtactatgaggtaccatgaggtaccaaattttacactaaaaatttagtacctcatggtatctcctcaaggatcgtagaattgctctcctttgaaagtcaagcatttcctgtttttggctgggagagggagaataccttgtgctgaactcttagttcagagaaattggaaggggggactaaattctgtaaattatgcttgggaactgaatctactaaccatgttctttttacttgtcctattgcttgctttgtttggtgctctgtaatggaggtaattggagggggttcaattccaaccaatttttgggatggtataaaagctgttaaggataaactcagggtgaatttaggtctttttctttgtgctagtctttgctggggtttgtggttggtaagaaatgaccttgtttttgagaataaattggtgaaatcacctttgcaggtagtgtacaaggcaatttctttgatgcataggtggaaggtgctgctgccaaaagaaagagatcgcgaagctttgaacatgctgcttgagaagctgaaggctaagatcgactctcttcatccaatgaacgtgctaccatacaatattagtgtttcagtgttgttgctcttggggttgaggtctcttagtcgtttggatgtctttcttggcagggcttgtaagtcttttggggtttagctatctagcgcttgatgggtactggcagccccagttttttccttgtttttcctttaagtttctgtatttcagaccttgttatgtttggctttctcccaaaagccgggtaaataaattacctgttatcaaaaaaaaaagccaagggagaccagtgataaatgatgtccaagagttgttgataaaaatattaatgttcagctgagtgatgaagcactcgagatatcccctgcttagcttactcggagtgattaatttcgtgttactcagttagacaacctttgctcgtcgtgttaataatgaatccatgaattgctccatttagcttcatggaaattctttttcataggctaatcactgcagaaatcaaccaacgtcgttgactcatagtacaaaactcatgaattgtttactctatctatttatttctgatatatttcaacgtgataagtaactgcttatgttcatattattattcacgccatttagatttcaagttgatcctatgggtacgatgttattcttgttttaatattctggattctggttctgcttaaataattcaagttccctgcttgccatggatgtgtgatgtgtttcaatttggttatttgattccagtttcaattattctagtaccatgcgtagtcatgggagtgcaatttggttctttattcaagttcctgtggataagcgctgatcacgcttactcggctttgccggcaaatgctaggatgtattcactattgtccgggatggaaactactatttcaattcatgcctgcccgggatgggaactactatcttctttgacttggtgtttgaaaatatgtttcctatcaacgaaagaaagccttatgttcaagctttattgccaatgttgtgtacgtgtgttttctagttccatattgtacttgctgagtattttttatactcactcttgtgttttatttggttttaggtacgcattgagaccgacatgcatgggcgggaagtagcacccttatatacacgtctatttgcactctatcaaactatattgcttaggtccataatgatacttaaactatatcatggttcgatcttgtaataatcttttagaaatctattagtttctttccatggaattataaggatggatcgtattatgggaatgatattgttattagtttaacttataattgcatgtcgtggatatccatatttacaagggagactctgccgaaaattctaataattttggaagttagtggtttgagtgtttttcggtgtggcactctaggtacgtggttacttggggtgttacagttggtatcagagcgggcggtaggtccatgggaaataaatatgacaacttaaaatattgatcatgttttccttaggatgggaaaaataaaagtaaaatttgagttagatttaaactaataaaatttgacacactggtgcacaataggatgggattgggtcattctttgcatcacacttctgatttattttattgattaccgatctctatctcattgtatttgtgattactagagttatattgttactagatatatgctcttctacaaataagacctgattatatattaagtaaagctaggaggtataaaaaaattattcagttttgattcgttggtgcggtgtatagtgtggagattaacatttgcacataactatattcggaaagctattagggagaacaacatggggttgcaataatgagttatacttgaggtgtgtgagtgtacatgataaagttttagtttccctagaccttagttaaactagcttgatcatggctctaacttgtgttaatctcttctatagaagtaattaacgttgtatcctataagacttaatgatcctttaagaataggtaacttttcttccatataggcaatgcaaagtggttagaggaggggacttttactctttactttttttttcccaatgccaagtgaggttgtccgagtgtgagtgttaggtcgtgatacatctatcactgtaccgagttaatagtttgggtatgggatggattggcccccatgccatctactcattctatttttttcttacagtggtgtgatgtgtccatgtgttatgcctgatgcaccaaggtagtgatgtcttcacccgaaaagcaaagaaaaaaagtaagaaaaaaagggatgttccattttttagacttgagattcaagggcgatatggcttattagtttcttttttgagttctattatgtgactatggttgaggtaatgaaaaaaaaactttctcatttgtggtacacgttctgaaataattccaaaaggaaaacatttgactttgcattcatcagttggtgacaaatattctcctaatttctaattttcttttttactttcagaaaggaattaacactaaatatttattttggtttcacttttgtggctttcattcgcttggttgttcaaacataagtgttgtgcgattgctttgtagtgataaattataaattattgatatgcacaatactatttgaaaatactaatttaaatcttgttatggagaacttgtattaaatctgaatttctttaccaagtgatttattttcattacatagctcagaagtgtgtgcagtattgatattcttggattgaagttcacagctatttgattattaatctttatttgattttttttatagaatagcttctagattcgcagtttgaggtgacaaacaaactccaaaactttgatttttggttcatgagattatggtaaatatatatgtatatatttcctttttgtctttttttttaaaaaaaattcaattcgaagaggattcttccttctacgcattttcttcaaaaagtggttttatattcggttcatgttctaaatatttccattgtctttacatgtgattcttgaatttattacagatagtcattatcctgatattagatttcttaagaaaaccgtgtttgagactaaatattcatttttttatgttgtttgttttgtttcttgaccttccatattcgattatttcttttcaattacacgcacccaacaaatttttttttattgagtggatttaattcatttactttggaatgtttgagtttcttagaaaattcaagatctatcgatgttcagagcagtttttgaggataatgctttcgttctagttactcagaaagttcattataagtggaacaagtgtggcctatgatccttgagattgacttcgtggatattgtttattacctctaaataattggcaatcaaagatagactttcagtagttgttgaaggggagcaacatactaataagatgtgatgggtgtgtgtttatttctttaaattttaagttaaaagcttgtgttgtattcccgattcccttgaccataaaggttgttttcacaatgtgttttattgctttgtagtatgattcttcatgatgtgttctaatgatttttgaatatgtcccaattgggtgttttagtatgtgcattgcgcttctttggcaagccaatattctcgtctagtaggtctgagttggtttattagctgcttttgaattgttagctaccatactttcttatgctagttaattattatctaccatacctagacgcaagcagtgttgcgaatataggagatgtcctcgacattgcttgagagttctaactactttatatgtatgttttgtgtattcctttccttctttcggtttctcaagctctatagtgggcgaattcgagggcgcattcaatgtgcactttgaccatcgataatgtaataccccgtatatcaaaagatatttaggttttttttagttttggttgacttgttaaaataaagatattaacagaaataaataaaagaaaaatatctttagaagtgggccaatatgagaaggcccataaacccagcccattagttctcccctaaaacctagagagaggggaaccgaatcccacccccccacatagtgccgccacccctctccctagccgttgcctccttcctcccctcctcttgtgttcgcatctcacccatctccagcaaattgctctccctagatctccaccttcatagcttggatcaagaagcgaagtagaaaaacggaacgaggaggaggagaggagtagaaggaggggttagaccggagtctcccctattgtcttctcacaagttctctaaagaaaccctaggtgaggcttatccccttgttgtatcagttgttctagcatggctttagtgcattaatttgtggttagggaaggttagagaaggagtttgggtaattgcggttcggtttgttgcagttctgcatgtgggcagatttgcagtgcttcagtgtttcgatatttcggggctctaaatgttattttctgaaaaagtgtataactaggaagttgtagataatgtttggatatatcttctggccaaagggcacgattttatctcaagtggattaggtggtggtccatcagatcgtgcatgataccaatccttcgttggaggcaagtgcatgacgaactaatcgtgtaattcatggattgtttactctatctatttatttctgatatatttcaacgtgataagtaactgcttatgttcatactattgctcacgtcatttagatttcaagttgatcctatgggtacgatgttattcttgttttaatattctagaatctggttctgcttaaataatttaagttccctgcttgccatagatgtgtgatgtgtttcaatttggttctttgattccggtttctattattctagtaccatgcgtagtcatgggagtgcaatttggttatttattcaagttcctatgggtaagcgctgatcacgcttactcggctttgccggcaaatgctaggatgtattcactattgtccaggatgtaaactactatttcaattcatacctacccaggatgggaactactatcttgtttgacttggtgtttgaaaatgtgtttcctatcaacgaaagaaagccttatattcaagctttattgccaatgttgtgtatatgtgttttctagttccatattgtacttgctgagtattttttatactcactcttgtgttttatttagttttaggtacgaattaagaccgacatgcatgggcgggaaatagcacccttatatacacgtctatttgcactctatcaaactatattgcttaggtccataatgatacttaaactatatcatggttcggtcttataataatcttttagatatctattagtttctttccatgcaattataaggatggatcgtattatgggaatgatattgttattagtttaacttataattgcatgttatggatgtccgtatttacaggggagactgccgaaatttctaataattttggaagtaatggtttgagtgttttttggtctggcactttatgtacgtggttacctagggtgttacagataatctccttgacttgatcaagaacaacgctctgacgtggaagttgatgagatcaatgactggggctcggaaaaaactgataggtaaatagatcaagaagactaggaatgataagacttagctgaatgatgtagaaaaatggagatatcgcttgtttaatttactcgaggtgaataattttaaacatgttcactatcttgaaaatgaatctacgaactgctccagttagcttaatatgaattatttttcttataatcactgcataattaaccatggtcgctgtctcacagtacaaaatacaccagtgcaatgattgagagagaagcatgaaattgtacaaaatctaatattgtttcagggtacgtagtgaaacttcactgaagtactttggtagaatttaaaaggcgttgatgcacaggtagccagattcggtcttagttatgcttaaattcgagctttagagctatacccacttgagttccttgtctaaataaacatccaattgacgttaagggtccgtttcaaatgggatatagatatatatcgactagaaaatagacgcgcctgttagcacgtcggattatttaacaatttataccgcaagcacgtttaaaacatacgagtctttcattttttttattgatctagtgatatcaatatgcagcttaacactgatgcagtgataatcgaataatggaagttatttatatttatcattatgaaaattacatgaatcattaattaatacgatatcccattgaattttgcaaattaaccttacatatttaatatcagtactaagttaatttggttcggctatatcactctttcgattagcaatggagctgagagcatcaagccagatccattacagctgatacctatggctcgatgtggccaaagtaaacacctcgagagcaacgttatagacatccagctctagcgctcggcgtctcctcatcctcacactattttgacggtgtggcgcatggtcaacgctgatcacatacactgcttctctctcctttgatctgcttggttattcaatcggtacggtaaaagaggatgtcttgcccttacttctcactaccctccaagacgaaccaacgtcctgcatggttccatgtgtcagccaatgttatttagcacacgttcattcatagcgtacacttttatctgaaaactttcatctcaaatacattcatccgaaaagctttcattcaagaactttcatccagaaagtttttatgaaaattttcacaagaaaaaatgtatgttgggaacgaatgtgcaccaaatagcaatcctgacttgtgcctcgtgcttagtcaggatttgtgccactgttacttctctcacttcttctgtttgttgtctcaagatttgtacacatatttggtctgaagtgcctcattagcagcgagcgaagcacatatggcgcaggagatcatgagacattatgtgaggatggccgttgtctagccgttgaattggttgcagccaggttgtggtcgatgtgatgctagaactggtggggacacatgaaaacgtccgctctcagttggcagtgaccgcgagctccatgactatactagctaagacaataaaaaggttttctagaaatcttcttcatggtatctggcacatttgaaaatagagaaatggacttatttttccagaatgtttagcccactttccaatcttggagggcttaatttatgaaagaaattattctgtatatatgtagaataagagatccgctgaagcaaacaatttttgattggttacaaactttgtaaaattttgagtcctgtatgtcatttaaacttcttgtaaatattttattctttaaaaaaaatacattgttgggcaaaaccctagcagtcattcccgtaaaaaaaaatggtgtgatactgtgctggcggaaaacatgaaggtgacactagaacggatacccttatctcaatcgggcggtaagccccatctcaatcaggcatggcgtccgtcacaggctagaagtcactgatgtgaagagctatctcaatcgggctttagtcaacttacaaatataaacatttcatatgaaaaatggaaaaatagtcatctgtgacgggctttagttaatgcccgatagagattaagtatatagcccgtcactgatgagtcatctgtggcgggcctatctcaaaagggcctcaagttggtgcacgtcacagatgatggtgatttgtgacgggccccaacttggggcccttttgagataggcccgccacagatgactcatcagtgacgggctntntacattaacaaaatcggcctttacctaagcccgactcaggaagccaacnaaacagcaaccgatgatggtctactatgggtggcggcattggatggcagggtgtgcctatgggaccggcgcatctgggttaatagtcgacatccggtaaaattagaaaattaagttccttgtagccagatggttaacgagtccaaatggggcattgggcccgggaggactacatcccgccc

SEQ ID NO: 17380 - DNA, 30461 bp, Oryza sativa
  unsure (1)..(30461): unsure at all n locations
gagtgtacttcataagttgttttcgtgaaaaaccatggtgtctctttacccagtatggaatcagccataccctatggaaagaggaacccttctcttcaagccaaaaggtaagcccatctcaactcattaaatggcctagtcagtagaacaacagcgtccagtgatgagtcgagttccactgcttgtatttcgccgcactagaactgatccttctatctgtgacaggctcaaaatgcatagaaatagtgggccgtcacaaggctgtcatctatatcggcctgtaaagtgcccgatagagatatggtcgtacagacatgttagaagggcataaagctggggcccgtcacggatgacgccaatctgtgccgggccacaacttccggcccgtttgagatacgaaccgatatctcaaatgggcctaaagctatggcccgtcacagatgatggtcatctgtgacgggccataactttaggcccatttgagatatagaatgttatctcaatcgggcctaaagttgtggcccgtcactgataggtgtcatccgtgacgggcttaagttttatgcccatctaacatgtctgtacgaccatatctcaatcgggcacttttcggtccgattaagatgacttccttgtgacggcccactatttctaagcatattagagcccgtcacagatagaaggatctgtactagtgtgagggctgaggatggtggtggcgatggacgggaaggagatcttttttttttcctttctattacttttcatcaaccatgtttgattgttgattttttttcatcctcttttttttcttttccttgttctctacatgggcccagctcagggcatggcccttgggccagtgtgacagtggcagtgatatgcatatgctctagtggcgcgcgatgcaggtatagcatacatgagtaaagatttatctcaaacttaggcatcaccacgtgcaatgatatatatatgctggtagaacagccaacatttgaagtattgattgattgattgattttcctttggacaaatataaagccgaactaaaattttcagatttgcttatatatgattcttcttttcattggaacaatcagatttgcttcatgaagaaggatttggtagagttggacagccatggatggatctctggaatagagggaagttgttctaaggaatcattccatcccagttatgaaacactcaggactatggactatctgaaaagcaagaaatgttgcttgcttcaagaacaccttgacaaattttcaaatagacataatattctaaagttttatgattggatcaatgtgggctgttttacataactcattgttaagggaataaaagtgggtttggggactcaggcttctaaagcttctaaatcttgtaactagaggatagatgggtaacttttgtttatatgatctgagattgcgtgctcgatgatcaacctgtgttattttggccttaaatgtttcttcatgtctgcaaattttgtggaaaccagtgtcatggcgttaatggagattggggaaggcctctccaatctttctaaaaaagaactctgaactaatgtacactttgatgatcgatgatctccctgactttgatcatcaacaaagctttgtttatcccaaactatttttgccatgtttgcgcatatgtttcatccggcgagttgggacgacttcattgagggtgacctcttcatgggaagttcttcgtgttcccaaatgtttgatctgataaactggccgggatgagtttatcgagtgccaaatcatctatatgtcattacaagagttgggacgacttcattgagcgtgatctctttatattccatttgttcgattcaatattcatttgacagagcacaatgacgtatttagatggaattttcatcaaaatggtcaattttcagtccgttctacgtatttagccttaattaataatggctacattgagaggaataagtttttacggaaacttaaaatgcctcttaagattcagatttttatatggtacatgcttaaaggggtcgtgctaacataggataatttagcaaggagaaattggcatggtagtttgaaatgttgtttttgcatgaaaaagacgtttatttgtggaatgtcactatgcaagatttctttggagagatctacaattttcttctggtttaaatactccgcttagtatatctcatatgtttgagaattggctggtgggggttgataaaaaaactagcaaacttattcttgttggagcatccgctatttgttgggctatatggttgtgtagaaatgatatggtttttaacaagtcaccttctatatcttatatgcaggttcttttcagggcaacatactggctccggtcttgggcttaactactaaagtgtgatgaagatataaagttagtgaagactgcatgtcgcattcttaagtcaacggttatgcagtttttcgctaactttggatggagattcacaaatagaattcaataattttgtgaacttctcatgttgtatgcgtctttagtagttggtgtgctcctatttttttatgactatgtttctttattttgttgaattgctataataattgattgtagctccctgaaagaccgggattctattccattataaaagaaataaattagatcgagtttatcgagtgcaaaattagacaaccccttagtcaaagaaaaaacgccctctgccagggcggcaagggtgtcgcctgcgatcgcatgtccgtgccatttgccacatcatataatacatcatgtgggagggtgtaaaagaaaacctcctagaaagcattcgggatatagatatataaaactaaaaaaagaaaaggaaaaattacatcaaaggtccctcaactcgatagccagatacaaaatcgtcctccaaccgcaataccaagtaccggacgtcccttaactgtcaaaaccgggtatttttcatcccaaggcaggattggagccggatttgtccgacgtggcacgttgaccacggactccggcgctgagtcagcacgggtgggtagttaggatataaagacacatcgatttggcgcggttgatttcttctccatccagcgaaaccctagagcaggaacaagcaagcggcgcggcggcgggcacaatctgggatgcggcgtgcagcagcgggcaagatctggcaagtggcgactcagcgccggagaccgtggtcaacgtgccacgtcggacaaatccggctccaatcctgcctttggatgaaaaatacccggttttgacagttaagggacgtccggtacctggtattgcggttggaggacgattttgtatctagctgtcgagttgagggacctttgatgtactttttccaaacagaaaatatactgaatatttaaaaaagtaaatataaaataaaaaaaattccttgacccaagtgttgcaggcagcagttgtctgcagcagagcccagtaggacatcacggcagcacaggaccactaggcacgagggcataacaacaaagacaaaggcccaaaccaaccagcatcctgggcaactacgtggttagaaatcggatcgatattgtcggctaatgtgggcggaggccaagtgtacaaaatcctgtagatatatataactatatgattataatcagctgatccactggtagagaagtgaacttttgtaccgcttagtaatcctttttttaccggttctaacaaccaagataaagaaaccgagactaaagttttaatctttagtaccggttgaaataaccagtactaagagatgcatacaaagtcaaaaaaaatataaatattgtgggattcaaacccaagatctctcacctcaacccttactcatgtaaccatcccaccaactccacacatctaacttagatagatatactttcttttttatctaaccctagagacatcttaattggtgttaagcgggactaaagatccttcagcatgaatcttagttggtgttaccaattagtattaaagatgtatttttagtaccggttggtaaaatcaatcggaattagagatgtttctaggatttggactttttgaactggtaataaaaatatatttagtacggcttctaaatataatcgagatatttatgttttggtactacgcttgcatactgtatagatcccacaaattaacactacaagcgtggtaaacttctgttacatggtgatagtgaagctaagttgcatagacatcaacttgaatgttgaataagtaaaacgtccgaataaaatgtcgtgctcattaaattcctacgaaatttcaaaacacacaaaagtttcaaaatttttcgtttgaatggcacagtagataggaaaaacgcatgaattcaagacacggaaaaaacaacatgaggcaagactcatgttcattttcctatcccataggaattttaaggaatttgtaaaaaggctccataggattattttcctaatgcttttaaagtaattttctcggtccaaatatgcatgcctacatgttttgcgccgtgcagatattattaggcttcaataatatcgtcaaaagggggctaaacataattcaaagcctgactaagatgtcaagtcgtgacatttttttcaggtaataattccatgtaatattttttcctaacttgtactacctctttttatttttacatcgaatatttacggatggacgtagtactgaagtcgatatctataagcatagctaggggtgttaatgaccgatgagtcttttcaagaccctacctaaccctcatatattttttagataaaaataaatagaaatttagtccaccccattatatagtccttaaattatataagctaaaatgttaaaccctttccaactcctaagtatctaggggtgaaaccgaaacctgtattttacggaatgattgaatttcttttggacaaatataaagccaaacaaaaattttcagctatataaaatcagcctatgattcttcttttcattggaacaatcagatttgcttcatgaagaaggatttggtagagttggacggccttgtggtgcaagttttttcattggcttgcagtcatcgccttgccaagcaagggctgcaacatgatcaggccgaagaatcgatccaacacatcgttgtcacgtgtgttctctaccggcaggtttggtcattaatcgttcgcagtcaagacatgaaccatttctctagctggtggtccaagggagtgaaaggcattgaaaaggattgaaattaaaaaggaggttcaacttgcttgttttacttgtgcctgggaaatttggaaacatacgaatgactgtgtattgaatggcataagtcctagtatatacgatatatggttgtaatccaatcggtgggcaaatgcaagtgtattaaaaagcaggtttgatgcttggctagagcttcaaacctccatgaggttctttgtgggtctctaatccttacagagtaattgtaggactttgtatgtgtttaggtgtaggggtttctaccctctctatgtttttctctcttgcttaatgaaatgacatgtaactctcatgtttgttcatgaaaagaaaaacagtttgctgcatacaggtattatgtatatgaatttaggggttagaaaaacacgatgtgcttctccctgccaatcatgatgtagtacgcacatgccctcgcctctttgtctatgagtttgaggaaggtgctaaatagtcccatattacttgtaaagtatttctttcactggtttttagggagagaacttatggtatcttttcgggggtgagaaaggatatttgcactagttattgtactagtgtgcaacaaccactatttcgaagctaaatatttttaactatttcttgcatccattaagataggaccgatctaataatgtaggaccaatataacatggtctacatttacaaaaggtatcttatttaaatgtagctctctagtgttgagcttccactcttgcttctattttcacacatgtacagtctcagcattctctcctcccattctccactgaggctttactaggcagtgataaatttgaactagatagaacttttgttttggccaatagattaaactaactaaatctattattcatccataatacgtagacctatcgttggatcgatttatagatcttggactgggaggtgctaggaatcccaaaggtgctgatgaattcggtagtgtatgtaccgttggctttggaagaaaatgaaattgattttgctggcacatatatatatagtatttgtattatcctagttatatgtgtatcgtgtatgtagcgagtaattcagtagctggagtagttaagcaaaccaagtcatgcccggcatgtgttcttctttagaaaatggagtcatgctcggtgttagatacaatgaactaaaacgtgatttgggaatattaattagttgctattctgttatgaataaattccggtgaaattgaggttagttactgggtattgtttggacttgtgcggtcaacctatatatagcctattgtttatacttttgattgttttcttgaccgggaattatacttttgattgttcgttcgttcttcaatacggtcaggtaaggagagcgctccatatgtccacatccgatgcctggaagggtgtttcctctcccaccgcattaagcctttatgcattgtgcataaactctacggaagggtatcttcgttattttgacagtcatgccctcggtttacgatgatgtcctgatggtttatgcaaacaactccaaccagcaccagcaccaggatatcctaccggacaatatggtcaccgccgttgccggagaagatagacgttgcgtatgttttacgttaatatagtcatggtttacgctaatagagaaggaccatacgcaacgtaaactatgcggtgggagaggatatggtcattgccgtcgccagagaagatagatgttgcgcatggtttacattaacatagttatggtttacggtaatagagaaggaccatgcgcaacagccatgtggtgggagagcatatggtcaccgccgtcaccggagaagatagatgttgcgcacggtatacgttaatatagttatggtttaccctaatggagaaggatctgccatgaccgctgctttatttagcgtttgtagaagtacaacacaaggtaagttatatatgtagtttagatgaactttcgtagaagatccatataagtgaatggttattcgtttacataaattcctacatggttaatgcaaaaacttattgcaagtacatagccacagcagatctggagtaaatgagcggattacgttctattaaataataatgttatgttgtggccttgtgggccaaccccacaatcatggttcataaacatcgtatctttttttaaaaaataaaagacttaaaagacactgcaatttatagcggatggcccaacaaaagtacatgaaaatagcccatttgcgctttactattttactactaaaacccttacgttttcataattatgctcaagttctcacatctgtattccatttagcaccttaatatttttagaatttattaactactgttagatattttatttgataccccatagattgataagtaattacgtttgaatctctcaaaagtaattacgtaaatcatcatgtggttactcacttactctcataggatcttccacaactactattcatcctcggaacatttaaaaattggattacgccaagcaggacgacaagctgggaatcagcccatacacccaaaaagatagattatatgtcgaggacgacaagggttacgccaagcatggactcagcccatacactaccagctgctgcctacgccaagaagatgagagtttacgctgcaaaaggttagcttccaaggcttgtacgcgtacgcgagcattgcgaggttccctatgcgtaaacacatccatgctatgcttgaaaggctaatttacacacacgaaggataagtttacgtccacgatccacgggcaagcgtgaaccatatgtaggcaagcaagggctgcaacatgatcaggccgaagaatcgatccattacatcgttgtcacgtgtgttatctaccgacaggtttggttattaatcgttcgaaggatgggtataacctacataatcttgccaagtacgtcaagatatgaaccatttctctagctggtggtccaagggagtgaaagacattgaaaaggatatattgaaaaaggaggttcaacttgcttattttacttatttttgggaaatttggaaacatacaaatgttgcgtatataatggcataagtcttagtgtgatggttgcagtccaaccagtgggtaaatgaaagtgtcctttgatgcttggctagagcttcaaacctccatgagttgctttgtaggtctctaatccttacaaagtaattacaggactttgtatgtgtttaggtgtgggggtttctaccctccctatgttttttctatcttgcttaatgaaatgacacataactctcatatgtttttgttcatgaataaaaaacagcttgctacatacatgtatatgaatcagggggttaaaaatacacgatgtgcttgtgcctgccaagcatgatgtagtgcacatgcccagatgccctcacctctagtccgtgagtttgaggaaggtgctaaatatatagcgccatattagttgtaaaatatttcttccactggtttttagggtgagaacttctggtgagttttcgagggtgtgaaaggttatttacaatcctgcaataggttatatgtgggctattgctattgtactagtgtgctacaatcgctatttaatagcaaaacatgttaaactatttcttgcatgggatccattaaagatagaccgatctaatataataatgtagtatcgatctaacatggtctacatatttacagaaggtatcttatatttaaatgtagctctctagcgttgagctacacactcttccttctatttttgcacatatacaatctcagcattctctcctcccaatttccactaaggagtgaggcctcactaaacagtgatatactcgaactagatagaacattccgttctggccaatagatattgaactaactaaatctttattattattcatacataatacgtagacctgtcgttgaatcgattttatcgatcttggattgggaggtgctaggattcccaaaggtgctcaagtgttgggaggtgtacactacatcggatcaggtcacctctgacggccccaaaccctcacatatgagtggtctgggcctggtcagagaacaatggtcactgttgaggtaagtcacctttgacgggcggcgaccgacctttggaggtgacagtcccttctgacggacaagtactctatgccccaccagaggtgagtgtccccagtaacctagagcttgttacaacctgtcggaggtgactcacttgtgacgaatctgaaagtaacggcccgtcacagatgactcacctgtgacggcttttgcattataacccgtcagtgatgagctacacctagaaagaaatttaattgattttgcattatgttaagtaccgttggctttggaagaatgtgaaatcgattttgctggcacatgtatatagtatctgtattatcctagttatatgtgtgtcatatgtatgtagcgagtaattcaatataccgggcagagttagccaaaccaagtcatgccatgtgttcatttttagaaaatgaagtcatgctctgtgttagatactatgaactaaaacgtgatttgggattttttttagttagttgctattctgttgtgaatgaattcgggttgaaattgaggttagttactgggtattgcaagtgcaactaagtaaacattctctcatcatctatctatatatatctatctatctatacctatactaattaattagacactttctacgagctctcgtattatccagaaacgattttgctatatctttgtcgggtgactttttattgatatttgacctttttctgttcgttggatattgcactacgattcgtgctggacagtgcgggatgaggatgagggcccgtgtttggacctgcctcgtggtagtcgagaaattacagtcaacgtgattggacatgttcgtgtttgaacatgatttttttagacaatgtgactcgatctccgtgcgaaaatttcgattttctgcaacgtgtcagtagagtgattttttttctattaaatttgatgttttcttagccgtaggatcctgcgccaagattagttaagaaaattacagtcctatataactaaaattacattcataaatttagttgatacgatatgtaagtgcactataattttaataaaaatattatgtaagtaaatatgtatttgttatttactttaaaatataaaattacaatcgtatataactaaaattacatttgtaggtttagttaatatgatatgtaagtgtactgtaactataactatagtgtaattacagtgtaattatagtgtaattacaatttttagtaggtgggttggtgatttttttttacaatataactatagtgtaattactgtaatatagtgatcaaatgagcctaatctaactatctaaaatctgtgtgatttagacaaaaatatgtcacgtgatggataggtagtcccatgctggagcaagcagatcgttttattctacctccaatacatatctccagcacgtaacggtagaaacggatagtttcctgcggtgacggaagcggcgacaaatgacggaagatggtctatatctggactctaaccggagtattgctccagattggtttctcattccaaacaataaaaatatgtttcatatgtttcataaaattgcatgtgatgcagaaaaaatcaatttttatatgttgtatccagtagctatattagtactaaaatacctattattggttgtatactaattctcaagggcaaatgcatctttttacaatgaacttaatggtcaactgacggtggagtgacggcaatggcataaaagggaggagaaacttgaaccggtggcataaaaggggagaagccaatttgaagtggcatataagggagccggttaatttagagtggcactctgccgcgcctccagtggtgccgccgttgtaagggtcataatctgcccacaccacgcactcagttctcacggatgtgtgccatcctctcttttgcaggtgagagtgcagagtgcagagtgcttcagctgaaagtgagtcttctgattcccctcttcagcccaatagtcctctatgtggattatttgaatctgaatgtacatcattttctttcactatgtgtggagattatgaatatcccatatctacacggcatgtatagtccgactaggtacagggtaccatatatagatagaaaatctttaagaggactcgagttaggtctaaagttgtatgtcaaggaaatatccgagatcctagtcggttacgattgtatcttatctgtaattacatatgccattagggatatggattgtatttggtaatacggacctcttcccctatataaggaggggtccgggtcaatctagggatacattttttctcttagatcatacgatcaataatacactcggcggatcaatccccggacaggagtagggtattacttcttgattaagaaggcctgaacctgtataaaattccttgtttctaaacccatccacttttccaacttgatagccacccccttttagtattgccgaaatcttgtttcgacagttggcgcgcaaggtaggggtagcgtcaagttcttcgccgactaagtgcgatgggttccgtctccggcatcgacgacttcgtcttccctcccgggcaggcgttccggtttggcagcctagacttcatcaccaacaacttcggcaagatttctctcctcgactcggattcgaaccagtcgggaagaggctggatctccgccccgttcggtatcccgaactcggccgaggtctaccccaaggtcatctccaccgagttggtttcaaaccactcggacgagatccaatctacttcaacaccaccagatcaagacaatggggcctatccgccaatcctgatgaaactccccgatgatctggctgtcgtctttactaaaagggcgtcttcttcccgtaggcctaggcgggatccggcttcagcaccgatccggtctagctccagggaagtcggcgtcatactccagccacacggcacggtttcgatggaccaactggaaggctacttcagctcccctggcgtcgactcacgagtcacgaccaacagagatcgtagagtacgatgaattcggctaccgctacgacaaccgcgaccttgacgacttcgacgaaagctttgaagataactacacccctctctattttggcgtcttcatggccgataacgagacggaagaacagcgccaagcccgagaagcagaaggacgacgtgtacaacaggaggccgaacgacgccgactggaagaggagcgccaggcacaagagcaagaacggctgcagcgtgagcaacaggaacgtgaacgggctgcaaaggaggcggaggaccgacgacaacgggccttggacgccgggcgacgagcgcgagaacttattgggcagcaagacgttgaggggacagcggtcttgcacacccctcaacaaaacgcggttgcggtgatcactctcctcgacaccctcctcaaggaagacgcgctcaaccaagttgatcacgtcgtcatcatcttgaaccagaccaagaccatgattgccgcctcggtcccggttaactccgcaagcgtccgcacgccgactggcagccgagttccccatcttcgatctcaagattatcaccagccaagcctcagcatcaccggcgcgggatccaatcgcaggagtaggggtcacgacgagcgatctgtccacccgcctcccgaacgacacagggagcgccgagttgaacggcctcgctccccacctcgtaggcgccccgtcgatcttcgtgatacaatcaaccagcgccgtgcaacacgaggctatgcccgccaccattcaccggatcgctatgacgacgacgtggatggagtcgctgcctttactaacgacctgcgtcgagtggattggccagccggcttcaagccgactggaatcgagaagtatgacggcaccactaatccggagtcttggctcaccgtctacggtctcgcaattcgcgcagcaggaggagacagcaaagccatggcaaactacttgccagtgcccctagcggattatgcccagtcctggcttcatgggttaccccgtggcacgatcgaggcggaacttcgcgaccacttcatcgccaacttccagggcacctttgaacgccctagcacacagtttgatctctacaacgtcattcagatgtctggagaatcccttcgagattatatccggcgcttttctgaacaacgcaacaagatctccgacattaccgatgatgtcatcattgctgctttcaccaaggggattcgtcgcgaagatctagtcggcaagttcgggagcaagcctcccaggacggtcaagtagatgttcgaaaatgccaacgagtatgccaaagccgaagatgccattatcgcgtccaagcaggtgggcaccacttggaagccgaagaaagatacgccgactacgggagggagtggaagtaccaatcacaaggaccgtaagcgtaagcccgaggaacttgttgcaactactacacattcctcccgacaacgttcgcgcgtcaatacttttgacaagatcatgaactcccaatgtccgcatcatcccaattccaatcatgcggccaaagattgcttcgtctacaaacagtttgcagaacaatacgccaagaatgcacggatggcctccgacggagatcaaagcaagtcaaaaaagaaggacgatgacgatggtgccccgacaggttttcaagaccatcgcaaggagctcaaccacatctttggcggacctctggcttatgaatctaaaagaaaacaaaagctgaccaaacgggagattaacgctgttcagcccaatacgcaccaatatcttcggtggtcggagacaacaatcaagtttgaccgctcggatcatccagaccaagtggtccacccggggcggtaccccctggtactagacccagtggttcgcaacgtcaagcttcgcagatccctcatcgatggcggcagtgcactcaacatcctcttcgccaaaaccctagacgacatgcagatctctcgcacagaactgaaaccgagtaatgcgccctttcacggagtcattctagtgctatccgctacgccactcggccagatcactctccaggtcaccttcggtactccggagaacttccgcacagaaaacgtctgcttcgaagttgctgatttcgagacagcgtatcatgccatactcgggcgcctggcgttagccaaatttatggctgtcccgcattatacctatatgatgatgaagatgcctggtcctcgaggagtcatatccctgcggagcgacatcaaacaagccatcacatgcgacaaggaaagctgcgagatggcccaaacccgcgagatcacgatggcccgagaagacatccgactagctgcaaccacggcaagcaaaggagaagtgcctgcaaccaagatcccaaaaagtggagaaagcgaaaccaagaccaagaaaattcctctagatccctctgatcctactaagactgctgtaataggcgctgagttagattgtaaataggaaaccgtgctcatcacctttcttcaaaataataaagatatctttgtgtggaaaccatccgatatgcctgatattcctagagaggtgattgagcactctttacatgttaaggaagacgctaagccaatcaaacaacgactccgccgctttgcacaggataggaaggatgcgatcaaggaagaactgactaaactgttagcagcaggcttcatcaagtaagtccttcatcccgactggctggccaacccagtcctggttcggaagaagatgggacaatggcgcatgtgcgttgactacaccgacctcaacaagtcctgtcccaaagatccttttgggttgcctcgcattgaccaggtagttgactcaacaaccggctgcgagccactcagctttttggattgctatcaggttatcatcagatccgactaaaggaatccgactgcttaaagacttcattcatcacgcccttcggggcatactgctacatcaccatgcctttcggattaaagaatgcagtagcaacttatcaacgcatgatccagagatgttttccaactcagatcggtcgcaacgttgaagcttatgcggatgatgtagtcgtcaagaccaagcagaaagatgatttgatcacggacctagaagaaacctttgcaagcatccgcgctttcaggatgaaattaaaccctgaaaagtgcatcttcggagtaccgtcagggaagctgcttggatttatggtgtctcatagaggcatacaagccaacccggagaaaatcaatgccatcctcaacatgaaaccgccaagttctcataaagaacttcaaaagctgattggttgcatggcggcactcagccggttcgtttcgcgactcggcgagcgggggatgcccttcttcaagctattgaagaaaacagacaatttccagtggggacctgaagcccaaaatgcctttgaagacttcaaaaaactcctcactactccaccggtcctagcttcaccgcatccacaagagccgctgttgttatatgtattggcaacttctcaggtcgtaagcacagtcctggtcattgagcgtgaggaagaaggccatgttcaaaaagtccaacaaccaatctacttcgttagcgaggttttggccgactccaagacaagatatcctcaggttcaaaagctattgtatggcatcttaattaccgtcaggaagctatctcactacttccaaggtcactcggttacggtggtcacatcgttcccactcggcaatatacttcataatcgcgaagcaaatgggcggatcgcaaaatgggccttagaattgatgcccttggatatatcgttcaagccacgaacttcgatcaagtcccaagccttagctgactttgtcaccgagtggaccgagtgccaagaagatatgcccgaggagaagatggagtattggaccatgcactttgatgggtcgaagagactttcgggcactggggctagggttgttttaatttccccgactggagaaagactgagctacgtgttgtggatacatttttctgcatctcacaacgtggcggaatatgaggcgcttcttcacggactaaggattgcaatctctttcggaattaggcgtctgatagtttgtggagattctcagttgttcgttaatcaagttatgaaagagtggtcttgccttgatgataacatgaccgcttatcgacaagaggtacacaagttggaggataagttcgatggactcgaactcacccatgttcttcgacacaataacgaagcagctgacaaactagctaattttggttcaaaacacgaagcagctccttccaacgtgtttgttgaacatctttacgaaccagccgtaccaaggaaaaaaataatcgaggccacggacgctcaagacatagctatgattgaagccgactggagagagccccttataagatttctgaccaaacaagaactcccccaagataaagatgaagccgagcagatctccaggtacagcaggctctatattattcatgagaccgagttgtacaaaaaaaaagtccatcaggaatcctgcagcgctgtgtgtctttggaggaggggagacagttgttaaaggatatacattctcgcatctgcggcaatcatgctgccgcacggaccatcgttggcaaggcttaccgacaaggttttttctggcccacagctgcgtccgatgctgacaagattgtgtggacatgtgaaggttgtcaatttttcgccagacaaactcatctaccagctcaagagttacagactatcccgttgtcttggccatttgaggtttgggggcctgacatggtcgggccgtttaaaaaggcagtcggcgattatactcacctctttgtggctgttgacaaattctccaagtggattgaagctaaaccggtcatcacaatcacggcagacaaagctagagatattttcatcaacattgtgcaccggtttggggtacccaatcggatcatcactgataatggcactcaattcactggcggagtatttaaagacttttgtgaagacttcggcattaaaatctgttatgcctccgtagcgcaccctatgagcaatggacaagtcgaacgaaccaatggtatggtgctccaaggaataaaggcacgagttttcgaccgactaaatccatatgccggcaagtgggtagaatagctgttgtctgtactttgtccttgcgcaccactcccagtcgggccacaggccagtcgccgttcttcctagtttatggagcagaagcaatgttgcctagtgaggtggaatttgaatctttacgttttcgcaactttcgcgaggagcgctacggagaagaccgagtagatgatctgaaccgactggaagaggcccgcgaagcagccttaattcagtcggctcgatatttgcaagggttgcgccgttatcataatcgcaacgttcgatcacgagccttcttagtcggcgacctggttctgagaaaaattcaaactacacgagatcggcacaagttatcccccttatgggaagggccattcataatctccgaagtcactcggccaagttcctactgactcaagcgtgaagacggtactcctatcgacaactcctggaatatcgaacatcttcgtcgtttttatgcttaagcattacttttgtatttccctattttgactgctaacatcaagctttcccttgagttatcagttgggggctactataataataatggagtgtgatttttatcaattcaatttgcttacttgatttatcattgccttgcttgattttttggcttagtcaatgaggactgaaagttttttaatagcttttgcgggttttaggctcaataaggtttgacaaaagcttttaagaaattagaagctaagtttgaaatattaaacacagcataaattcatcagtattgtacaaattgtgcctccatcatcatcatcatcatcattatcatcagaatcattgttatgatataacatcaatcggtatcagttttttcatcatcagagttatcagatccagtcggccgaaggtcgttgtcctggaatctctcaactacataacctgctatcttatcggcggctttctgctcatcgttgatgaggtcaagagcagcttcttcactcgtcctatctgcaaagccatcaatggcgtcaatatcgatcttcgggtacaaagacttggtcattgccaacgccaggcttgccccaatacttccagcctctttgatattcttaaaatatgtatccggagcaactctcagcttgtcgaagatttcggaagcatcgaatgtactcggaccattgttattgaagaacatggcttggacgagtggggtagcagcgttggcgactttatccctggccccgtcaagcctcttgattttgttgactaagacatcgaattgagcctgcgacttgattttgcggtctgcatcaacagattcacatcaacgagtaagcataaagaagataatggcttttgaagtattgattgctagtacctacaacgtctttcaaagccgagtccctctgtcttgccaattcagccttgtcattttccagagtctgaatctgctttcccagttgagatatcttggcggcttgcactatattacctctggttaattgatattacaaagatggcagcataagtaagttggacagagattgtgtgtaccttttgaggagccactcagttcgaagttggagtcttgcagctcggcgatccgatctctcagatcatgttcagttttcctagcaagctccctagcttcgtgcagctggtttctggtagcttcaagggttccaaggtggggaactaacctctcaagagttgcagttttcgcttcgttcctgagatggattctctgcaatacaattttatcggcatttaagctaagtggcaaacaggatggttgaggccgtgcatgagggaacttacgtttacgatacgagtagcctggctgagtgcctttttcagcaggcatacttcatcatcttctttttacttgtttatcacgattccctgaggttgcatatcgtcatcccaccacttgaccagaatgggagggcgagaatcttcagctgctcgtatccggaggacctcttcttcatcaccaatcattgacccttgtatattcataaaggtgaaacaatcgaataaagtctgttagaccaaaatgatttcagagaatgtatttacctgtgatgattttcggttggggacgagtagactcttgtgttttaataggagagctggaccctgggtcattactggtatcctttctaagagggctgtccgcttgggtttcaacttcagggacatctcggtttggttctgtgcccgactagtttccagtcgggggctcctgattaaccccgatttcagcttcggccgactggtttccagtcgggggctcgtcgctgggtattacattgtcggttgtcggctgattgtcacttgggtgatcttctgtggttggctcggtctcttttgaaggacccgtctctatgtcaattggtttagaatcttttccagaaggatctatgtcagatggcttcctacaagtttgagttacgccattattattatttcaatagtgggtgagcagcgctacgagggagacagtcaaacgattcgtacctagaagatttcctgatcttcggcattggacgattggatgttttcttcttagggttggattgctttggcagttttcttgtcgcctctttattgctggattttccagcatcatcgccttcgtcatcactcaggaccaatttcctcttgcacgagtccgattggatggttgatcttgagatgtttgattgagtttcagacctgatttttggtcctccgcttgcctgaccagtctgtcggcgaggtgatcggcgttgggtaattggagggtctgatttcatcaaggcgaattcctgggtatgatgattcaagctttttatcaaccttgcaaatgataaaagaatgcttagaaacgagctgggattttaaatacataccggtggagggggattgaagccattgtatggcaccacaggcagcaagtgcgaatagctgactacaattgcatttgagaagattttatacatcctctccttcatgaccttgaattcaagagattcaggatcttcacagttagggtcatgtttgccgtcgaattcaaaggctgtgcgagatctttctttgatcggggctaaccggctcttgatgaagtgccgagtgatttgttctccctgtagaccttgctcctttagcttcagcatgcgatccatcagggcgagcacttgggcggcttcttctcccattggaagtgaattccaggtgccttgataaactggagggagacaggagtactcggggaatgcaggctcggggttttgtacataaaaccaatttgcatgccagcctttgtttgaagttttaaacggcatggagaagtacttttggctcagagttcccctcagttggaatccagctcccccaactacgcatggcttgcttttgttcggttggggtttgaggaagaagatgtgacggaatagggaaaaatgtggcctaatgcccaaaaagcttcacaggcgtgtatgaagttggcaatatgaactatggagtttgggtttaggtgatgtaaactgatcccatagaagtccagaattccccggaagaaccttgatgttggaagagaaaatccgccataaaagaaatgagaaaataccacggcttcatgagtgtcgggggtcgggaatgcctcgccgaatgccggacgccatccaatgatctccttcgctggaagaacaccgtgcgccaccatctccttcaggttttccttcgttacatcggagggcgcccattggctctcgaagctttctctctcctccgccatggatgcgaattgggtgatgcgatttgctttggaaatggctgaagaatggatggggaatggatgtggtgggtgcgtggatgattttttgtggaattttggaaggtgaatttgagcaaattggagaaccctagttccgcgggagtggttttgtactgtagcgtgaaatggggaaaatggcgagagtctcagcgaggaagacgaagcgacgctttgacttcggcgtttatttcgctagggtatcgggagtgctaatgggcctgggcctatacagtacttcagcccaattctattatcagcgtgactagttgtgatccttagggacttaggcatttttgctttggcaatttttgctcacaacagtatggcccgatgctgttaaaatcctttttaatgcagttagatgattctttggaatcactacgatgcgaacaaaaaggtacccaacagaaaagtgttatactaattttgtaagtcttcttaggctgcaaaagctgttcaggtttgttgagataactggtttttgatcagttatttactcggcatgcttattcttctggtgtgagtcatagcctaggctatttagacttatcactaattatgttatcacatttgtatcacatttgatggatatttttgagaatttttactcggattcttgtcaaatgtgtgaatttatggaccttaggagtgtttatcactcgggcctttccatattttcatttttggtatattaaaactaaaagcagtcggctagatgttttattgaacgccgcatatgccttgctatatgatattcagttgtaaaaccacttggttcttgactatatgtttagttttttaactaaccacatagtcgggggctacacctaattcggtgcatctagtcgatgcactcggtattttctattttagaccttcacagtctttgattttggtactcggagatctatacagaagaaattgaagcactcggattattactttatgtttcaagagaaggccatttcatcgactgtaaaggtcttgggggctactgtggagattatggataccccatatctacacggcatgtatagtccgactaggtacagggtaccatatatagatagaatatctttaagaggactcgggataggtctaaacttgtatgtcaaggaaatatccgagatcctagtcggttacgattgtatcttatctgtaattacatattccgttaggtatatggactgtatttagtaatacggacctcttcccctatataaggaggggtccgggtccctctagggatacgttttttctcccagatcatacgatcaataatacactcggcggatcaatccccggacaggagtagggtattacttcttgattaagaaggcctgaacctgtataaaattccttgtttctaaacccatccacttttccaacttgatagccacccccttttagtattgccgaaatcttgtttcgacactatggcttgatttacactatttgatctagctatcagttcaagtggatacaatcctattgtcatcctttcaccacaatcagtagttttgagaagttaatttctttgcatacactgatgaactctgtagtagattctctgcaggttctttcttgctcaattaattattgctcactctatagcagatcaactctggatttagacttctttggccaagcactatggctaaaattgcatgccaagcttcgaacagaaaggtcaagcaatttttccaaccacggtgcagcatgtggcaatggcactaacactaatttctatcatatgtaggcagatccaagttgatgctggcataggctttggtgaatcactgatgggtgagagacctgcagatttccttgtccaacagagcaatggctgagttctttcagttgtgggatgaaattcagatggtgcagcttcaaccaggaatagccacgactccattcggtggtagctaacaggtgatggccagtttactttctcatcggcttacaacctcttcttcatggcaaagaccaaatgtttatatggtgaactgcataatttcgattctttctgttcatgctgatctgttggttaatctggaaagacgaaacgcttgggtatttgagcagaggtctagacctacagagcaattatttggagacatcaaggagatcacgatttggaagtcggctagcattttttatcctacagtgattatttattagtgttagttgtttattgtggtctgaggctttgcctcatacctttgttcgacagcatagtactttgtactttgtttctccctaatcctttggccaacctggccaatcatttcagtagtaaaaaaatgtgttttcctggtcagattgatatatatatgatttctactaggctgaaactcttggcttggagaaactttgttgcatactatagcaggagctgcagcggattgaaaattgatggcatcaaaggttcttactaatacaagcaataagttgtcaaagaatcattgtttgaatttgttgtaccaaaattccaatcacacttagtggctaatctttttattttgactaaactaatgccacatgttagcagcagtagcagaatttttttattttggtttcaggttttagaactgatgttatttgttgctccaaataatccactgatattgtcaagtgggagctatttgacttgtgtggctagaagtattcgagtcaatcatctgcttgcctcggcctacttcaatagacaacggaggatgctctacatcataatcgtatgcaaagacaggtaatacacaccatatttcccttcatttgcaaagtcgtaataaactgaataagaacaggtaccacattcatatttgtctgatagatctcaaatccatatattgctaatggtctacttctcaacttggtttttacacctcaatgcttgttctgtattccgtttgtcacacattttatcaatgaattacagttctttgaaattggatcatgacttccaacttgcagcaactaattgcattgtatcacacgttcattacaagatactcaaagcaaaaatggcaatatgttggttagcagcttgtacttgcaatgagtaagagcatagaggttctggacttacaatctgaggtcaggatcatgttccatatatttttacatagaacactattgcatgaattgtactatttgtagatgttctatagttaatcaactatgttaccttaaatatacatggtgtgttttagattctgaaatgtttagcaaacttagtcaacatgtagattaactatcacaatttatgtcactttttcatatctagcgaacttatctaacttttttttcaggttacaaaaaatgcaggaaaaacgtttaggctgtcgaagcaaatccatcaggaggacaccctggcatctgatgttgtctactatgcatcaaagagattactggttgtttctactccttctttttgaatgagataatttacgttaatataatgttttcatagaagtgagccaatcttgatttgtttggttaacacaagttatgtgttaaacgtgtgatccaatagtatggctttgtcatgttctcttattagctaattgtaagtccttagcagctggaatgctggatcatgactaacaagtgaaaaggatcagtgatagttttatgctggtgcagacatgcaatgccaaataaaacatggataattccttcttgtttgtgcataattaattgtttgtgcaggcttcttagcactcaataatttatcttttcgaagtttctatagttgttgctcatatacaagggataattttgttgctcagtctcataaggacagctcactacctatccatctaaaatctgattacacatttgcccattaaattctactatgcacaacaagaagccacgattgtgctcttaattcaaatctgaatttgttagaacatattattggcgtatgttgtcgaaacgacaactgcatacgtcgaaagacgtggttacccaacagtggttggaaaagaagtaaagtgtattaaattgggaatttttcttgggatccccctattacatggccctaggagactatttatagcctcattacaggttcttactactagggtttaggttacacaggggaatttacatggttgcccttacgaaagggacatttatatgggcatatagtgtaattgaggtatgtgggctcctaatgggccgccaggcgatcgctagcccaatggccactgggcttgagaagctaggatggtctcatctgccttagcaaggccaaacttgctatggcgaagtcgtctcccttcggtatacacgcttcgccttatatccttcgcccaagaggcctttggcttcgcgaggtacccgcgcgattctccgtccttcgccttcctttctccatagtcttcgccatgggtgcttcgccccgactaatcttgacgtctcaggcttgaatccccgctggtctcatggtttcggtaggtttggtcgaagggcctcatgtcatactgccaacaacgtgtaaccacataaataaatccaaagtatatataatatttttgtttccccatttcaaggtctatatgattttacttatttggttttggtccgcatactggtagtacgcctgagagtggttatgttgatgactgttaagagaatgacaagtcaatatcttgctttgatacctttttttttgcatttttgatttagctaaaaataactatgtactggtaatggttatttttattgttacaaattccaattacatgaggatatgttttataaattttgggtaaataggttgtgcttcagaaggtgtagtttctaaaatttttagtgtaattatgtactcgggtgacatattttgccaaaaacgtgtattgcacatgcacgattattagtaaaggctaagacaaggagatgtgcacgcagtgatgattaatgcccgatcattaatcgactgggcacagaaaaagctagctttctttccgatcaagcttactataggctgacatagtgatatcaccctctattttaccttggtcgctgagggccttatgtggaaaaggatattaactattccctcagtttttttaatagttgactctattaacttttgatacgacattccaccattctttctataaaaatatatatatctcatttatttaaaagtatataatgttatttattttgctgagacatgttttataactaaatttcgtagaaaacctataagctgatgtccattactgtacttcagagttccgaatatttacactactttttttaataaaatgattagtcaaatattattctaaaggttaacaacgtcatccattaaaagtagaggtagccatagttgagtccgatgcacgaacagagactcatctatatggttgatcacctcatctataatttacacaggtaccgctgaatttgcatcttctattcaacacattctcagatatgtcaaacatgcatgttctttgtgtctaattcaagacatccatgaatttgttttattttgattgaaataatagattattttactatatacctattgaatatctgttttgtcataactcataagtgcattgtcaaagcaatcaggtcgattaacatcctaaatcttatgctcactataaaaatttggttatttgatcttagtcttaaaacaaagaatatttttttctaaataaaaactaacaattaataactaattttcagatgtgttgaccatattatccatatgcatactgtatacagtccatagcatgcatattgttgatattaatgtcgttggatttttataagatttattgcgacggtatattgtattaagaattcatgttaaacagaacatgccatagccagaagataccgaggactattcaggatttgttttttttctaaaactcagaattaatagatatagagttgtatccgtttggactttatcaatttaatttctaaataccaaactgataattgtaaattgcaactgacatgtatggaatcttttttcatccaaaaccctataatttgtaaataattttgaattcatatatatggagtaccaatcttggattctcaatttagatccctattaatttaagagtaaatttcacgtgacatcaggtattatggtctaagttgcacaaaacctcaggagttctagcacgtggcacataacctcaggtattatgaccaaaaagtttcacaaaaccacgttattgctcatttcgacattgatttacaatatttttagttctaccatcacatctcaaatttataagttatttatccatcatataaatgttagattcatgcaagtaaatctttttaaaattttgttataggagtaagtcaatttggttaacggtgtgattttgtgaaactttaggaccataatatgtgaggttatgtgcaacacgccaacatctatgtggttttgtgcaacttggaccataataggttgtaaatgacatggaatctttttttattctaagccactataaataaccaataaccaacatatgtaacataaaaaaattatatgtaataatagcagtaataacaacaacggctagtttttttaattgctgatggctaaataccttaatgactttttgataattattagagggtagaataaattaaatataataaattccaaaacatcggcaccgcgacccatgtgtttgtgggcagcagcccgtctgcaacagagcccactaggccactaccacggcaccacagcgccaccactgcacaacaacaaagacaaaggccgataccaactagggtcctgcgggcctaggtttgacggagatttttctgatcatattagaggagtcccaattcaaaaaaaaatttattcataattatatgactataatcagttttttttaaaacatatttcaaatccagacatttataacgcgcgcctactcaaccttataaatacgtgcatgaataacctactcatatgagcatctatgaaagattacaccaccgtattcctatgagcacggaataggttaaaattgatgaagtcaccatagacatctcgctatcagcggaaaaaaataatttgacgtaaatacaagcgcgcatatcaagtctagaacataaatccggggtgagttagttccaccataagaaatataaccaattaaggtacgctcactatgtataatcaattttttagggatgattataatcagttgatcctcaagaacacatgatttcttgtgggacatccctctgattgcccattccttactagcaagcgtgttttttttttatcttgaagtactttttctcacacaaaatatgatacatgttttgcaccatggaggtatatatattaagcttcaataatgtcgtcaaaagggggccaaacgatatccaatgcctgagtaagatgcgaagtcctaaaattatttacaggtcctccatatatatatcctcacccatacatgacagctacctctctcatccatacgccttcctttctttccctctcgtttttgttttctcattcttaaacaatcaagaattttttttataacataaacatgccagacagcaaactattagtattcctagactgctaggtgcatatcagtgtttcatgaacattgttttcttaacataatacatacatatcagaaatatatgttggcttgggagacatcggaaaagaaatgggtacttagtagaaacagacatgggctctggagcatggacggatctgtgaaatagagcgaagccgttctaagggattcattccatcccagttatgaaatactcagcagtatggactatctggaaagcaagaaatgctgattgcttcaagaacaccttgtctgattataccatagacataattctcaaggtttgtaattggatcacaatgtgggctgctttacatagctaattgttaagggatgtctgcggggagtcatgcttctaattaaaacagatggtaagtgggatggtaactagaggagagaagggtagcttttgtttagatgatctgagcctgcgtgttgccgtgttccatgtgttttttggtcttaaatgtttcttcctgtctgcaaactttgtggaaacctgtatggctataatggaaatgggggaggcctcgtccaatctttctcatcaaaaaagaagaattctgaaccaatgcacactttgatgatcgatgatgtccctgacttgatcatgaacaaagcttttttttaccatgtacctcctagctatgtttgcgcatatgtttcatttgacaagtttggacaacttcattgagcatgacatttttcatgttcccatgtgttcgatctaataaactaggataagtttatcgaataccaaatcatccatgtcatgataagagctgggacgacttcattgagcttgatctcttgattttcctatgcattggatttgataaattatgatgagtttatcgagcgcaaaataaggcaatcccttagcctgagaaaaaacgccctcaagcaaggtagcaagaatgtcgcctgtaaaattatcgcatgtccgtttgtgtgggctgatggctgtttgccacgtcatagaatacgtcatgtgtaggagggtgtaaaataaacctcaaaacttgaaaacgaaaatgtactgaatatttaaaaaagtaaatataaaataaaagaatttccttgacccatgtgttacaggcagcagttgtctgcagcagagcccagtagaacatcacggcagcgacaggaccaccagcgcataacaacaaagacaaaggcccaaaccaaccagcatcctgggccactacgtggttagagatcggatcgatggtctgctagtgtgggaagaggcccaattaacaaaattctgtagataattatatatagattttgctatatctcactcgaaagattttttttcttttctcccattatatattactataatcagctgacctctgattattgcgctgtcttgcatactgtatagatcccacaaattaactctagcaagcgtggtaaactatctgttacatcgtgatagtgaagctaagttgcatagatatcaactcgttgaatgtngaataagtaaaacaaccgaatagaatgttgtgctcatttaaatnctatgaa

SEQ ID NO: 17381 - DNA, 24099 bp, Oryza sativa
  unsure (1)..(24099): unsure at all n locations
gtggtttttggagcacntaactattggtacagnagctcatcaaaaacaacggaatagaatgttgtgctcattaaattcctatgagatttcaaaacacagaaaaagtttcaaaattttcgcttgattggcacagcagatgggaaaaatgcatgaattcaagacacagaaaaaaaaaaaggaggcaagacctcatgttcattttcctccacaatttctcgagaagagcctacctattgacgaaaaatcttcctaaagataaaaggaaattcctaaatcttatctaattaatagatagaattaagtcatctgtcatgttttttatgaaattctttcctaaagtcagtctcttttggacaagttctcattggctgattgtgttctttccttaaccaaatccaaataatcataccatattttagcattcataccatcccataggaattttaaggaatgtgtaaaaaggctccataggattattttccaaaggggtcataatacttttaaagtaattttcttgctccaaatatgcctacatgtttcgcgccgtgcagatattattaggcttcaataatatcgtcaaaatggggctaaacataatccaaagcctgacaaagatgtcaagtcgtgacaatttttacagctaataagttgatttaatattttttacctaacttgtattccctcttttttctatatcgaatatttagggatgaacgtagtactgaagtcgaatcaacgagcatcctcaatatatcttttctttaccaagtgggtagtaaaatgtgacccataaaactagatagtagttattttagttctcacaatgtgtaggtattaggtggtaaattggatccaatgtttaaaagaaatggatacgtgaataagagaaagtgaatgagaaagaagagaggagagagtgttttatatttgcttaatgtttgttgcgtggtaatggtgctactacccaatgatactattacccactttactatctgggcttataaatgatgaaccagatagtaggactacttaccacccacttcttaacatattatgggtgccctaagcatagctaggatggtaatgtgtcaagacttatgagtcttttcaagatcttacctaactcttatatatttttagttaaaaataaataaaaattctgtcgtccccattatatacctactccttaaattatgtaagctaaaatgttggaccctttcccactcctaagtaggggtgagactggaacatgtattttccgaccatacgcccaacccgatgtccatgggaagaatataggagggaaaatataatgcctggtatcgtttgatttggaacgtgaacccgatacgagaagagttgtgtccacccgtatgtcccatattattaaacataaatgaaaatgtattacaaatccatctataaacataataaaagattggttaatccctattttacgagctctaatataatattgtataatttttccttgatgtatctcttttaacaccttaattgcttccctatatttaacctctatgaattagagatataaataattattctttgccgaatcccattcgaataaaatagtatgggataggatacttatcagtgatatgtcatacggtattacctgtatctagttcagaactttaaaggaaaatataggttataatatatgggaatgccatgatccaatcgtacctgcctgattttagccctacccctaagcatagcccatcccctgtttcccaaacatgccaaagttctatatattggttcctaatttctcaactctggctgctttcgtttctccaaccagagttggatgaaattttagatgctcgtagcacgcttttcaaactgctaaacagtgtgttttgtgcgaaaactttctatatgaaagttgctctaaaatatcagattaatccattttttaagtttgtaataattaaaactcaattaatcacacgttattaccatctcgttttgcgtgaaacacttaatctttatctttagcctcaggagattcaagcaccacctctcttctaccgccctccatatatccttacccatattgccagctgcagccctttctcatccatacgtattcctttctttcccttccattttttgttttctcattcttaaacatccagaatttttgtaacataaacataccagataggaaacaagtcatattcctagactcctagttctatatcagtgttccgtataggttgaactgaagcacatcagcaagaacattgcttttttttttttacatagtattacatgcataccagcaatattggcttgggaggcctcgggaaagaagagggtactgagtagaagatgggatgggctccggaccaatgatattggatctttgaaagaacaccagttcgttctaacgggttcatgccatctcggttaagaagaagtactcaggaccaatgtgcactttgacaatcgacgatttccttgactcactactacgaaaaccatctttcgtggcggccattttgggtttttgctggcggaaatcatagccgccacaaagcaaaggccagtgaaaatgtagatcttcgctagcggttatcgaccgccagcgataattcattttcgctggcggtcgtcttaagctagccgccagcaaaaatccattttcgctggcggttgccttaagacggcctccagtgaaaatgaattatcgctagcgggttacaggaaccagccgccagtgttaatgctggccaagtttaaaaataaaacgacggacggagcaacaccactccgtccgcctccgtcaacgctccaccattcgaaaatttcacagaaatttacccaagcattcaaaattccacagaaatttacattaaagaattttcattcactcaagcattcaagcatcacaaaaatcaatgcaatagcatcacaaaaatcaacacaataacaaaaaatttgaagtcccttcgccaccgccattgcatctcctccttggctacatcggcgagtgggttgcctagccggagctggtcgtgctacttcctaggctcgcaccgccgcatcttctcgttctacctcgcccacagcgccttcgtcacctctgctcatccaccaccaccaccacacacggatttcagattaccgcgtcaacaaaaatggcgaatcgaagcgcaagaacggatgggtgctgaccttgggaggtgatgaggcggtagacctggacgaggagtagctccaccggcggcagccttgtcccctgcggcggcggcggccttgtccccgcggcggatccggcctcctagcgacgcggcggcggcggatctggcctccccgcggcccggcggcaccagatccggcatccctgcccgcacccgagcaccgccaaccgccgcacccgagctccgccgcccgcgaccgagctcgccaccgcccgcgccagccctctcctccgcccgtgccgaagcatgccgccggccgcgcccgagctcgccgctcacgcctgtggatggagggagagatagttcaagggagagagggagtggaaggaggagataaggtaggtagagtgaagggaggaggatataaggatgggtaggtggagcgacttttaatgccgcgattttttaaagggccagagcggcgcggtcccccaccaggattttcgctggcggtaggataagaggtccgtcagcaaaaattgggatatttttgcaagcggacttcttaacctaccaccagtgaaaacggattttcactagcggttctaaacccactatccctcattagaatcttgcaagcggatttcttatataaccgacagcgaaaaaataggataatgccatgaaaaatgtttttctagtagtgacttgatcatgaacaaattagctttgatgtgtggaagttgattagatcaatgacttagactgactaagatctctcggtgaatagctatgggtgaccagtgataaaagatatcaaagagttgttgatgaagatttttcatgtttttttgggacgaaaaagaagattttaatgttgataggctgagtaaagcactcgagatatcacttgcttatcttattactaggagtgattaatttcatgttattcggctacaccatctgtgttcgttatcttgaaatggatttacggattgctccatttaatttagcttcatatatataagaatgctttataataggctaatcactgcagaaattaacctggatcgctgtctgacagtacaaaatacagcagtgaaatgatggagatagtatcacggaaatgtacaaaatcaaatatgtttcaccgtggtgaaacttcactgcagtatgttggtaaaactttaacgcgtatatatggaaattcgatcttacttatgctcaaatttgagcttatataactacatccacttgagttctttgtctgaaaattccagtttatgcattatgggtcctttttatttgagggcaagatcatataggatatgtccattgatgattttagggatgggacgatctatattcgggatcgctaactagtgatcgatcgcctcgaggctatcttttttttcaccactttttgtttggcaccatatagtttttcttttcggggtaaatttatatacctaaaatttatgcatctaaactttacacacctaaaatttataggtcaaaagtttatatacactatttaaatttgaatttagatttaaatattttttatatagaatatttctatatgtaaagtttatacatatgaagtttactgcgtgtatgtgtgtgtatatatatatatagtaaagtctatgcacatgaatatatttttatgagtattagattttttttattttttaacttgtttttctttaaaaaaattatggtgtagtaggaagaggagaagggggaggagcgtgcacgttaggagagggacgggggtgcccgatccttgtggacgatcacccacccattagttctccctatccatactgggtgtttggctcagtgctcacggatgagctatttttgtttgtggttgaatgaatgtaacgagaataataagatcattaaggctatgtatagttccttcaaaatggcaaaagttttattgttttagagcactttttgttaaatgtatctaaacactggtagcaaaaaagtaggtaagttggcatttgtcatttgggagtccatagcagcaaatttggccaaaaaagcatcgggccccgtgtatgagagaggcaacaacaattaatggcaaaactttaccatgcatctaaacaacaacctgtaaaattgcatgccaaatttttttgccaccaaaacttttgcaaaataatttgccgccgcaaattgatctaaacaggccctatgcaataataaaacacattaattatcgttaatctaattgtaactaattatcaacaaagtagataaattatcccttgtcaactctaatcttgatatggtaattagtaaataaaaattaaaaacaattatcactgatctgttactaatgatgaagacggatccaggaaaaaaatttgggggggctcagttacacagtttcttcaatctccaaccatttagggacctttagtttattattaatggtgaaaaaatcgaagggaatgcttcgggggtatccatgggtcttgtgggtgtaagggggacttgagtcccccctgcacccatgttggatccacccctcgatgaagctaggttagcaaagatgaacggtctcctcccaacaaatttgtggacccatccacatctttatgtgtgatattcctttgcccgtctatcgcattcactttcattcacaaaccaaacacattcaaaacttcgattgccatctcccatccacgcgatatccatccaaacaaactaatattaagtttgctagatggagctcgtgttatttttcattttgcacacaactgggcttccgttaatatatctgctcagctttcggcctgcaaagtgagaaaaggaagaaatcaaagcaaagacaaatgcagttggatagcaaaagttttcttctatatacgtaggcagaaacaatccagcccttatctctgaccgtaaaatctatccgagcaacttttatgagctgtttgcatcatttcagaccgggaatctactttcttcaactttgttattatctctctttacttccaggaatctacttcatttgctttttcatgaattctccaatgtgacaagatcagtttgttctgtaattttaattgttccctggatcaaaagttttcttgtgcatagatatgtgtataacaaacatcaacaagctttatataggtaatcaattaatcagaggaccatagtgtgcaagtaaagtaacaaaccgtttgatagttttgcctttttatgtcctttttgtatatgtagattagcccccaaaactgtagtatgcttattaatttaggacaaattggcatggaagatcaataacaaatgtttgtggcatgcagtgaatatagatagaatttatggatttttagttgagcttcttgacgttacaaacttaattatttacctgtacttttttataaactgcacgagaaaagttaatttgggagtatgtctgcagtggaatgggatccttggctactgcatattgagctacagttagttgcacttgaagccttcttccacgtccgattggaatttggaatgggacatccggcataataagctacactgctacagtaatctgtacggtatttccaaaaaaaactgtaccgatagttgatctatacgtactgcattcttttaagggttatggaactcttcccccgtatggtatgtaaaacaaaacgatagattggtacataattaattaagtatttattatttcatcgtgtcatagtataaataattttaaggtagacacgggtattaaaaatataggtgaaaatgattagataaatattgtgattagtttaaaagaaaaggtaggtaaagaaattaaatagagttggttgaaaggagggatagatggagaaataaatttattttgggataattactatgcaagaaataattacattttcacggaggtagtaaaaaacttgaaaatgaattaatatgatttttaagtaacttttctattgtttttttataaaatgcatggtttaaaaattcaggaagcgtgtgtgctggaaatgaaggagtagaagttagtaaagtggagaaaagaacacactgctagggtgtgttcgaaactatgggttcatctttaatagactactgagtagtttgtacaggacatgaggagaagggtcacattgcttggagtgttttttcttcaagaatgggttgttcccagtttgagtttatgcctttctagctacaggaacttttgcatgctcatgaatctctcagttgtttggatcagccttttggtatttctgaattggataaaattgtaaagaatttacccatagatagagctcctgggcctgatggttttaatgggctgtttgtgaagaagtgttggccaatcatttgtcaagattactacaaacttgcagctgaattttactctggcactttggacttggatcccctaaatcactcttttatcattttggttccaaagaaacctgtccgtgaaggaataaatgactataggccaatatcactcctaagaatttctcttaaaatcctgacaaaaattctggctgacagactgcaaaaggtgatattagaattaattagttagaatcaatatggcttcataaaagggagaactatacaagattgcctagcttggaattttgaatttcttcatcagtgccatcattccaaaagagaaatagttttgttaaaattggacattgagaaggcttttgatactattgaacatgaagccattttgctaggaatggaagctatgagtttcagtgttacatggcttggatggataaggaagatcttttcttctgcctcctcctcagttctgataaatcgggttcctggaaacaattttcattgcaagaggggggtgaggcaaggtgacccactttcacctttactctttgtattaggagctaagcttattcaagctattgttaacagagcttatagtatggggctcctttcaaagcttcttccttcagatattgatccaaatttccccattgtccaatatgctgatgacactctcctctatttgaaagctagtgatagagaactttttattctgaaggctttattacaaacttttcagctggggactggtctgaagttcaatttcaataaatcttgtctcattccaataaatgttgatgaggggaaagctcagaacttagctgcagtttttggatgtaaattggggtatttgccttttacttatttgggtttacctcttggtaccactaagccagaggtaattgattttgcacctttggtggatagaattgacagacggcttactgcaaatgcttctttcttgtcttatggtgataggcttacactggttaattcagttttttcttcactgcccatctactacatgtgtactataatgttgccaaagacagtgattgacagtattgacagagcaaggaggcattgtctttggagaggctatcattggcagcctgggataaggtttgtaagcctaagtgcaaagggggccttggagttctaaacctttctatccaaaaccaagctttgctcatcaagtttttggataagttttacaataagaagaatttgccctgggtcaatcttgtttggacttcctattatggtaatactatccctcatttatcaaatttgaaaggctctttctggtggagagatatttgcaaattgatggatgtcttcagaggtcttgcaaggtgtcatctgaaaagtggaaataccggttcgttttggtatgatgtatggaatgatcaatctcctcttttttactctatgccgaggctatgctcttttgctcaggaccataatgtatcagtctccgatttcctatccatcgaggcagaaggcaatttcacattgccactatctatctaggccttccaggagtttcaagaacttacttctttccttgtggatgttgagctggtcaataaaaatgatgtttggtcttacatttgggggaatatgaagtattcctcatagaaattttatgctctaaacttcagagctgttaagccaacagttcattacctatggctttcgaagtgtaagcagtttctaaaatgaaggtgtttggatggctactcttgatgaatagattgaacaccaaatttatgcttgatcataagaattgtgctcctccaaattatggcctttcttgtgttctttgtcaatcgacagctgtagaagacttaatacatctgttctttctatgcccctttgctcagaattgttggaaccttttaggcattgcctgggatacaaccctttctttcgaaggaatgtttataagggctaagttggattatcaggggagctgttcatggagaagtttctttatgctccttggaatatctggaagtaaaggaatggtttcattttttgatcaaaaaattcctttttgtcttcttggaggcgattcttaaagggtgacctctttcttttgttgtttaggattaatgtgagatatcacgatgtaatcataagctggatcaatctgttgtaatttgttctcttctttattaataaaattatcttaacaacttaaagtagttttgcacgtaaatcgggcgctgacgtcatcgcctgatttccctcgctcccgtcggacgaccgatgcgtagtcgcgtcccaattataatgtgttttttcattgttttcttttccagatttaacatttaaactgctaagtgtataaatataataacttgactctaaaattatttttcattgtctcgtttattttccttcatactattagccgaagccaaccaatttgacatttctattttaggacactttgaaattttttcgagaagaagactttgattttaggactgattttacgtggtttgctggtcactctagttccctagctctatttttatgatatttagaaacataaaaaaacatatatatgtagttattttttaaaaaccaaggtcaaaatttcagaacctttaaaaaaatatttgacaagcatgacattaacggaagctaataaaatataatcaaaatctaaaaccgtgaattggaaatagcccatccggatttcaattctacgctttataatggaactatcccatctgggtttaaattctacgctttagtgataggtactacctcccatataaattataattctaagttgtttaacatatattaaggtttgagaaggaagactatgatgccccttattaaatattgtataggtaggagtagaagggtagttgagagtaaaatagagagaaatttgaacgattagtggttaatgaggccattattactctattgtgataattattttgaggcgaattcaaatcctagaaatacaattgttatgaaacagaaacgtatttgtcactatgtatacattaataagggtgaatgaaacggtctttagaagaaaatgaaaatcgaactggcgaagattctcgggagataaatgccagatgctgaaaatataaacgcagggcgacaatccaacattccttccagagtttttccacccaccagcatttaccgcgcacgcattccgaggcggccccccctcatctcatcaagtctccatctccttgttttcttctgaccaaggagggcattttcgtcagaggatgaacatttccaacggcccaattcttccccctcacatccgtttctgaattctcatcagattcagatccctttccttctgctgtaacaacgtttcctaataattttttttgattccccatccagagaaagaagtaaataattaagcccaaatcttgcatggtgaccacgtgtcagtgacacattctgtcagagaatgggattagacgatttgttaaccacaaatctctgacagaactagagtgagaaacaatctctgccaaaatctagagagagaaacaacctctgcacagagagagagagagagagagagagagagagagagagagaggcctttgtatagtacagttgcccactcatctctcgcactcgcaatgcgccttttgatgtcactcatggctgctctcttttgatcttttcctctttttcttcttcttctttgaagcatcatcaactagggcggtagggcctctttcctttgttcgttttatctttatagcttctctctatctctctctctctctgtgccctcttcttcctagccgaattctgctggtctccattgcggctactgttcttggggttgccctctctctctccttcctttggttttgggcggttttcttttgctgaaaaaaactagttcttgattggttcttgtcatctttgggaggacattgctctgggtgtgtgtcaagattgtgctgggagcataaagctgggatctttggccaggttcttgactatctaaattgtttgttgttgctatgtactaattacccttgcatttgggagctcataagtcataacattacttttctcttttgcagattgtagagggcttctggttcttgtcactgggggtgctttagagcatttcttggtgtccattactgttctgggtcatagagtttccaatctttggcaattactcggaggaattcttgagctgtgtgctactgtttcctttccctgataaatcaaccaagggaagggaaggctgtatattttccctttcttgttcttgatctttgcaataattttgatcatcttgaagaaaagaagtgtaaagtgtttggctgtgaaatggctgaggtgaagcctgaggacatggtccatcatccacccatggaccagctccagggatttgagtactgcatagactccaatccatcctggggtatgtagtgttacactgcactgaagtgttctatgattggttgatttgtattgtagcatagtatatgttactaaccctgagtggttctggttgttgcaggtgaagcaattgctttgggctttcagcattacattctttccctgggcactgctgtgatgatcccaacaatgctggttcctcttatgggtggaaatgatgtgagaattgcttcatttattaacccgttttttatgtgcagtagaattccagcttctgtatcagttgtcaaatgctacagcacattaatattgcaggaccaacatatgactattcttactaaaattttttgtttcatttgcttccaataaaagcatgacaaggcaagagttgttcaaacactgctatttgttactgggataaaaacactgctccagacattattcggcactcgacttcctaccatcattgggggctcatatgcatttgttgttccaatcctctccattatccgtgacccatcgcttgcgcaaattgctgatggccatactgtaagtatgcaatgatcttcaagcttatttcaaataggctattgttaattatggccattttggtactggaaaattttcgttgtatttacctaaagtatctgttttggttcatttgcagagatttgtgcagacaatgagagcaatacaaggctccctgatagtctcctcgagcattcagataattcttggctatagccaattgtgggcaatttgctccaggtaccgcagctcccgcaatatgcttgagtaggacgtacgatgcctttatctgtttctcccctaaaaaatattcttctgccattatatgtccaaatctgtgcaaacatttatactgagggcatttatttgacaaactttgctggaccgatatgacattgatgtgtgtagatattgcagttcagatgataaatattttaatcttcatactagtatgactagccggccactttatgttgttctcagtttgagtagtgggcatcatgactttagagaaagtgaaaatatgctagtatactaatcaaagggagaccaagatactcaaaagtgatgggatatgtttgctaccttcatgtcgacgataagaataagatgacagtagtttgataccatgatgtgcatgttgcaggttctttagcccacttgggatggttccggtggtcgcgcttgtggggcttggcctattcgagagaggattccctgtggtaaaagctctaatagctacccttacttccactctgtatgacagtaccagtcaattcaatgttaggttcttgcaattctaaagtatgcccacataatccagaaaaaaagaatattatctcaacataacctttttgaagcatttgcttgcttattttgtactttctctatttcatattataagttgattgactttttccttagttaaagttctttaggtttgaccaagtttatagaaaaaattattaacatctaccacaccaaagtagtttcattaaatttaatattaaatatattttgttaatatgtttattttatattgaaaatattagtatatttatctctaacttggtcaaacttaaagaaatttgactaaaaaaagtcaaactatttataatataaaacggagggagtaccatataatttatctgataagttaaatattagcattattattattattatttagtttatttgaagcatagaagttaggatccactattattattggtttatttgcatcatactcctagaattcatgaaaattacccaacttagtcgtaaacattcggcatgaaaaaaggggttgattgttgcctatgctaagctgcttcgatcattaattaatcctatggaaacatgttcacttaaatatttacttccaacttggcaaatttgactcctggaacaaatcaattctttgcatgagtcatctctgttatcacctttttaaagctatttatattacaataattgttaacccgtacttaatttggttgttacacattatatcagattgggagatgtgtggagatcggccttccaatgctcatcctgtttgtcgcgctctcccaatatctgaagcatgtaaatgtccggcatgttccagttttggagaggttttcgctgcttatatgcgttgctcttgtgtgggtatatgcccacatcctcacagcaagtggcgcctacaagcacacagccctgctcacccagttcagctgccgaacagaccgtgccaacctcatctcttctgctctatggtttggagtctgccacattagctgattaatttttacatccacattttacaacaaactctcatgttcaatgttttcactgtctcgaaggataagcattccgttcccgttgcaatggggtgcaccaacattcagtgcaaatcatgcgtttggtatgatggctgccgtcgtggtgtcgttaattgaggtaccttgaaatacttagcaaatacatggtttatcagagcatttttcagtgttctgagaacatttcaatactgcagacaactggagctttcatggctgctgcccggttggcaagcgcaacaccaccacctgcatatgtgctgagtagaggcattggatggcaggttagtggtcttctcataggttgattcatgaatcttaacttggaatacccactaaattagttacatgttcataaacatttaagaaccaaattttgtttctggtaaagaaatgtaaatttttggatggataattctgctagtgataaactcccttttaacttttctgctcgaatatgtcaatttttcagggaatcggtaccttactagatggtctatttggcactggtactggatctactgtttctgtgtgagtgcatctgctgtactaatactgagttttcaccctatgtttgctctgtaaaagcacccctaatcttttgggtgttattcagtgagaatgttggtcttcttggatcaacaagggttggtagcaggagagtgatacagatttctgcaggattcatgatcttcttctccatgctaggtagcatttctccctagcattcaacacacatttttgctgtttttttgggagttctgaatctgtcatggttgtaggaaaattcggtgcactatttgcctccattccattcccaatatttgcggctatatactgcgtaatgtttggcattgtcggtaagcagcccaaacatacatgacaaaatgattttttttcgctttttaaatgtatttaatggacagtacactcattttattgtgtcttcagctgctgtgggactatcctttttgcaattcaccaacatgaactcaatgcgcaacctcttcattgttggtgtctccctctttcttggcttatcaataccagagtacttttctcggtataccacgagcgcacaacaaggaccagcgcacactaaggctggatgggttcgtacttatatactctctaacatttcaatttccatttggaatgaacagcatacgaaaatgaatctatatctagtacattgcggtaacacaatgctaattgactgcaaaaaaaaatgtgatattgcctaatgttattccttatttgttgcaataaaaataaaacttagacaagaagtcaagaacattatcatgattaatttcaagtccaaaatagaaaagtattgatattggtttcatgatttatatgctattcattttctgacattggttctccattgttcttagaatatttgacattttcctgcaagtctgttcattgtacatgtttacactggaaaccagaatttgaattgtgctgctcttgtgtgcagttcaatgactacatcaacagcgtcttctcgtctccaccgactgtcgccctcatcatggcggttctccttgacaacacactcgatgtcagagaggcggcaagggaccggggaatgccatggtgggcgcgattcaggacgttccgaggcgacagcaggaatgaagagttctacaccctgccattcaacctcaataggttcttcccaccatcttgagcagagcagagcagagctgccgaaattcagagaatgcaaagacaaagttccagatgcaccaagcagtgaaatgtagtctgcttttgatagggtagaacagaaagttgagctgacaaaatgagcaattttaccagcaggcaaggaggaactctcttctagctgtccacttgtacatagaaacgattcgtttttcttttcatcagcttcaacaccgaggatgtttgattttgctgtaagcaattaattaatatcttgtgaacaactggtcatattagtttgaataagaactgttagttataatttttttatccattacatccatctgcaactagccatatacaactctttatttttcttttgttgaaattcagatgtacatgagcacatccctatggttattggtgacgatgagtgatcttaagtcaggcgaccaatttgcaccaaagtttgacaaaaaattttcatgtcggtcatcacagaaatagcaactcactgaagcaaaaatgtgttctgagccacaaatcacaaatgtaatggaccaagatgtagcacggaaaaaagttaaaacattgttgtgctcatctacgcacagtaaaaactttgtttgtaacatggcaattgtcaaggtaaaaaatgtgtggaagtagatctgataaatcatgtagccaatctctcatatgcctctgatttttgctcactcccaggctcccagccctttcattggtagcccttggctgaaagctagtgttgaatatataagcacatgcatattgatttaatttattccataaataaattatgacattgcagatgtaaattagcataatcgcatcatacgatctacacatataaacaaatcgaatatgtgaaacatagtgaatgcgtaccgagggttttggaagttcggctgcatagtaggaaggactcgcgataccgagcgttgacgacggcgtgcatgtcacaccccgatctggcaccgtcgtacaacggcacctgataggagcgtgtcgtaggaaaaacggcgcgaaccgcttcctacgaaaccgcgatctcagtaccagtcccaggacatagcgctggtacccacggtgacaaatatgaatcattgcaatccttaaaataaatagaggacttatttaccttaacttaggtttgcagctcagaacagcccgagaatgcaaccgacgacgcggacgaggaaaacaccaacaacagcagcagcagcggaaccaacggactaacacccaacaccacaggcgatggctaggaaccaggacgaaatcctaatcttcacttcactccgtcttcacttcaaggcggaggaactatatatatatttatatagagcaagggtgagtactttcgtactcagcaagtcacgggaatttaggtgtttgatgcaagcttggaagagaggcaaggttgttttgcaaatctttgttttgaaattattttgaaatcacaaagtgatttatttctttctaagtttgggccgaaaagagacttgcgtctcgattcgactttaggagatgtttttcaacagctcatttggtaatgtaccgacctctcaggtcagatcattatctctcggctcccagagtcattccacttgattaatcggctcccagagccttttcattttctcggactcccagagtccagctgcccatcagcacaacaatccgcttccacttgggaagcctagtctatgatgtccgtagacatcccgaatcacacagactcgtttcttgaccactcaggtcatccatatgccacataggctgattctagtaacgattcccacaccacaacaacttttcacaaagcacaggcaaacaaatctacgctataggaaacacctcacatccgcccatgaccgtgggcacggctgttcgaatagttagttaacctctgcagagggggtacactttacccacacgacattactaacccggatcatccaacccgtggagaacagccacgtctggtgaccttaaggctttcatgacaaggcatttcaaaagccgacacagggtcgccatatgccaacgagaggagtcccagactgacaacaggttaggtcccagaccatactgtgccaggaagcccgagggttctacccgacaccaccccattgaatacacatgtctcttggcatcaaggcttccctggtttgctatttactcagccaggggtgtcccattgcacccgtgtggtcgcacttgttatatgctcggatgaatttcccacaagaatcggtccttatatgcgaatacgggacagtgccacacaggcacaacccccgcatcgcgagttttcacaatttattttattttcaaacacaccgacaccacatgtcgggttttaaaggcttctcaaacccatttcccaagttttcgacaaacaatggtgtatgtgggatatttggtatacgcgctcagagagcacgaataccgaggtaccacaaaggtggagcgacaaggagtcagggtagtatagcctacaggaattagtgcgactactgggtaggtccatcggtttgacacgcaaaccgaggctaagcaagttaaacatgagtgattctaataatgcaagttgcaaacaaaataataatgattttccaattataggagaaattggtcaaagggtgacttgccttgctcaaggtcttcacgaagcttcacgaatcttcgagaaaacctgcgatcaacgaaaatccggtaaccgcaactatacgcaaacaatcaaaaacctaaacaaaagaccaagaaaatatcctatttagactaaataatagtgccattagatagatctcaattttacggaattactggaaatggaacggagtcaatcggaggaacggatgaagagatatgaattttggaaggtcaatggatttttctggacaaggaaatgatttatcggaattttctggaatacgacaaatgatttatggagtttatagaaataatattctcaagaatattattgacagtcactgacgtgcaggaccaagggaaatgatttatggaattttgggaataaggaattgatttatggaacaaaggaaaaaggatttattaaatcccttggaaaagaaaaggaaagagggatgtcatttagacttcctttgggcggctagggcgcggcccgaaggctattgcggctcggccgaaccaaatgggctagcgcgggcgcgaggaggtggcccattaggggcgcgcgggagagagggagcggtccggtggaccgagtgcacctcgtggggtcccgggaggggcccgcttttcggtgacgcggctcacggagggattggtgcacgcaagggcggcgctagggtttcggggggggatggcgcacgggcggtgcgccggtgtggatgggagtgcggcgggcccacttgcagtcgctcggcttactgtggattgcacgcacaggagggaggacggagggaggggccgaccgggtcggttgactcggtcgtgccgaggtggcgccttcgtggcatgacatgcgggccggcgggaagaggaagaagggggaggccgagatggacggcggacggcggcgacattcgctggggcagcacacggagattcaagggagggggaggacaccggagtgatgggagggacaggaggattcaccggagggaggctggcggcgacgaatcatggcggcgcacgccagcagcgagaaaagggggaaacggcggagggacgacgaggattcaattcaaggaggtgggagcatctccggggttcaaagagtccatttccagcgtcggatggggcagagcgacgccgtggaggtccggcgatgagcggcggcctccgggagcgggcggcgacggcggcaagcctatggcgggtggtggcgaggctaggggcttcgtctacgcgcattcgggagcgctaccgagctaccgcgcgagctaaaggagggagagggcaagcgagaagggagaacggagggaggaactaccgagccgagacgggcactgtgacgagcagccgacggcgcggcagcgagctctccggcatcgggccagggaaggggaggaagacgggtgcctggagtcccgcgtcacgcgtcctcgcacgcaccggtctccccggtgctcggcggcggacggcgactgcgagagcagaggaagggcgacaatcgcgcggtggagtaggagtgtgaagcgggagggattgagatgggaaggggagctcggcttcggttttataggcacgggaagtcggttttgggggaggaaaccgacttaggtggtcaagggagctcggctggcgcggcgcttgcggtcaaggagcagcaggaggtggtcacgggcggccgggctgagaggaaaaaagcaaaaaggggaggggaaaggagctcggctccttgccgatttgggcgagcagagggaggagggagagcgcgtgagagaggggagccgaggctctgcctccacgtcttggacgcacgcgcgcacaggtggagcgagtggcagggcggcatgggcggctgcgcggcgcaggcggccagggcggacgtggcggcgaccggacggtcggccacgcgcgggtgagcgcgcgcgcggcgcgagggtgcggtgaaatttgaaaaggcggcggcgggaatcggcgccggtgggggagcttcgacgggagagagaaacggagagagagagggcgagcaagagaagagagagagcgagcgagcgagcgagagagagagagagagagccgctctctctctctcggctcggagagagagagagagagggcgagcaagaggaggggggcacggctgagaggagggatgggccgagggagtggaattcggcccacaaaaatagagggaggcaaaacggactttgacagagaagttgaattggagggaatttgaatttggaatttgacttggacttcggatgagagggaggagtcgacgaagggattcaaaatggggatttggtattctcggaaccgagaggaatattggcaagggattcaaggacagaattggatttcgcagacttgaatcggaagagaaattttcgaggtgaaggattttgatttcgatgagagggaacaacgggattgaattgagatccttggcacaacttagactcaacactcaaagaacggaaattttcgcaaataggattttgcccaaaatagtttttaacgactcacgaaaagcggagcgttacagtgcagcacccgagcgaaggggaatatgagttgttgtggacgaacaacaagcagtcgcacgacgtgcttcctaaaaatcttattgccggcttctcctagtataggacgtcaaaagcgaaggttccggggacttactctcccgatcaccgatgcaatacagagtaggaggaaaactttagattgatttcacgtgttgcgaggaggcgttggcttggtttatatggatatatcatgatgtttgatcaggacgcctgtatgatctccacaccgtgtaactgaatcggatataatttatccagactccatgccgctccacacaccggattattcagtgtgtatccaaaaccaaaccaaattttatagaaaaacaaaactgcaaaaaaaaataaaccgcattcgtgcaagggtgatgaacgaattttgacggactattcaattgcatgtcgcctatgcgcgccgcctagccatgccaagccaggcgagcgagtacatacatgtgttgctcttgttctccccatcacacatgttggttcaattatgagatagactgaggtatgtggaactcaatgaaagcgcaaaggacgacatcatttggaagtagacagaaaatggtcaatacacgtacggtaagaagtgattatttggcgcaattcaatggcactacttccactgcaattttttccatgatttggaaatcccaggctgaaccaaaacatcacttcattgtttggctctgcagtctttgcagggactcctttgaggatgcaacacatcttgcagaagaatgcgacttcacaaaatcggtctggaaccaaatctgcacttggcaaggttaccggcatatacacacggactcccaatcaatttcagactgggtggaagcactttctaccatcaggccaaaaagtgaaagaaagaaaatcataggaacctgttaaccacttggtggcatgtatggttggaacgaaaccgacggatcttccagcagaaatcgcaaccggcgatccaagtagccttctcgatttaggaaaatatagaccttttgtaatttatctgacttcctttttttaggaggtcctagctgttcagggctaattcccagctctgctttgttcttgtacttaactcaatcttccccttctaatatatctggcaatgctcttgtgccgtcaaagtttttcagaaaagcagagtatcctaaccatggaagaaactagtggcataaattagggctagaaacctactaacatgaagcatggatgaacttaaaattagcaaagtattgtaagagagaagtatcaagtatgcatgttacccgatcggcaagactccgacgatccctcccggcggagtgccgtcaccgaggaatcctccgggcgagaagccaacgtccctgactttctcccgaaatctccctccattcacagactgacctacacaactatttctgcagcatggtgcgttcttgttctgcttcccgaacttggtctattcccaaatggtaggcatgcttcctcaatggatcaatgtcgatcattcaatggatcaatgtcgagcttggttatcttccttggatgctcccacatgtgcagtcgaaggtcggttgccgttcgggccagggcaacaaggcccaatggggccggtcagcgtagctacttgttgtaggccggtcggtcctccaataaatcggggaaaaagtacatcgaaagtccctcaacttgtcatcgaattacaaaatcgtacttaaaccgtaaaaccggatacaacgcgtcccccaacttacaaaactagtgtagactaggtctcttggcggttttgactccggttttatccgacatggcagctgactcagcgtgggacccacatgggtcccacatgtcagcctcttcttcccctcctctcttcctctctcatccctttccacggcgacggttacggagagcagctgggcacggtgcggcggggtagcagctgggcgcagccgatggccagcgggggaggagctaggcgcggccggcggtcagcgggggaggagcggggcacggccggcgagggtggagatgggcgcggctggcaaccgccggggaaggagctgggcggcggcggcgggggagaagctggacgtggtggttgtcgtcgtcgtcggaggcggcggggactagaacgacaacgacaatggcggcggcgacggctgtgaggcggcgccgcggcgcgaggagaagcgcccgagaaggaggccatgcggcaggctgaccgcaacgtcggcgccatcgtcatcaatccgctcttgccaccggggccggtggacaggagaggagacggcggcggctgaggcgggggtgggggcaccggagccgcggcgtgacagtgcagggtgggagctgggttgcgcagggcggggaggagggcaaggtggttcggcggcgaggtggggagagcaaggagaggacgtcatcgacgctgtcgggcggcagcacagggaggagtggcgcgtggtggaggggtcgtgggaggtggtggtgcaagcccaaagattccttcagcctgatcttcaattggatctgtggtcggagctccctcatctggttcgggcaagtagatgattagatgggattcaggcaaggtttgacaacgcacctcatggccgaggagaagctaggctctcaagagactggcaagctccattccgtgcagccatgaagagctggggatccataaatacacggggagggggaggtcgtcttgggtcgccacgttcttgcttgacgccatgggcacaaccatcggagaagcaacggcttccccactcaaccagatccttgaacccctcacatccatcgcgccctgacgccatggaaggcctggctgctacaggcgcagcatttgcctcc

SEQ ID NO: 17382 - DNA, 18571 bp, Oryza sativa
cgtagttaacaaccccgagaaaagtggtctatttgaaaagcaagaaatgttgctgcttcaaggagcccttgatttatttcaaaatagacataatctggagttgttttatgagtggacaagtgtgggcggtttaaaaacctctttgttaaggaaataaagtgggttggggattcaggctagaaaagttaaaaatcttgcaacaagaaatagaagagtaacttttgtttatataactaaaatgcgaacagagtgacaagagtgtgtggaaatgcgggaaatgtttcttcatgccaaaatattttgtgaaacccaggtgtcgggcagttaatggattttggggaagccctctccaatgtttttaaaaaagaactctgaacaaatgcacggtttgatgatcaatgatctccccgactttgatcatcaccagagctttgttaatcgctaaccagttccaaaatgctgccctaggagaggtcctctttcgtagacgttggggtatatgacagtacgaaggtaccactggagtccggcctcccccacgggccagctgccctgcccactgccgaactgaggagcaaagggagagaaaaagaagagaagggaggaagagagggaaggggaagaaggggctgacatgtgggacccacgtgggtcccatgctgagtcagctgtcacgtcgaataaaaccggagtcaaaacccctaagggacctaatttgtactggttttgtaagttgaggaatgtgttgtatctgattttacggtttaaggatgattttgtaattcgatgacaagttgagggaccttcggaactttttccataaatcggttggtctcttttttgatccatgggtgagggaagccggcctgctggccgtactaggctagctgaccagatcaccagatgtggccggtctacaaggctagtggctctttccgtgcattttcgcatgagttccatctgtaactgcaagatattctgaaaaaaaaactcatggaattcattagaaataggcgaactgatcaggataacgtgcatgtatttaatattttgttaaaacgtaggtggtataatttgggtttaatatccacctgaaagggcctgtaaaatttgactttctcaggaagttctctataggaactgcccataatttggagctatacaatctcaagagaaaaaaatcataactcattcaattttttcattaagacgaatagtgaaatgtattttaaaaaatcaacggcatcgtatattaaaaaaaggagggagtaaaaaggagaaagtttatataacatctattgtattaggcttagtgtgcttaactgtctatgatataaaatcaagccggtttttgtatattctgaaaatggattaattagatatctcatggcaaataaaaattaaagtatagcgcgccgggacaacccgaataaactactccctccgtttcaaaatgtttgacaccgttgactttttagcacatgtttgaccgttcgttttattcaaaaacttttgtgaaatatgtaaaattatatgcctacataaaaatatatttaataatgaatcaaatgataggaaaagaattaataattacttaaatttttttgaataatacgaacgatcaaataagtttaaaaaattcaacggcgttaaacattttgaaacggaggggagtagcagtggttaaccccacacgcaaaaagtgctttggctgcaaaggaggaagagaaagagtgttgaccgggggagaagagaggagaagccgggaagagggccgggatggcgtcgagcaacggagagcaacctccagaatcgccgaaggaagcaaatgctgcgcctgtagcagccaagcttgccatggcgtcagggcgcgatggatgtgagaggctcaaggatctggtgagtagggaagacgatgctactacgatggttgtggccatggcgacaagcaagaacgtggacgacacaagacgacctccccctccccgtgtaattatggatccccagctcctcatggctgcacggaatggagcttgccagtctcttgagagcctagcttctcctcggccatgaggtgcgttgtcaaaccttgcctgaatcccatctaatcatctacttgcccgaaccagatgagggagctccgaccacagatccaattgaagatcaggctgaaggaatctctgcgactgatcagcaagcctctggtgctgtatattcgctctcgctcctggagggactgactcttgactcggaccagaactccgcgctgcatgtggtggcagcctccggtgacagccaggcgtatgtggagtgtgcgcggatggtgtacgaccaggcgaggcacctactcggcgcggccaacaacaacggcgacacgcccctgcactgcgccgctgcagctgggaaccactcctcgcgctggctgctgctgcgcctgcgcgtgacagcagcggtgcagcgagggtggatgaccaggagctcctagcaaggaggaagaacaaggtcggtgagacggctttgcacggggcggtccgtgctggccacagcaaagtggtggaggtcctcatgaaggaggatccgggactggccggcgttgatcggcacgacggcacgtcaccgctgtaccttgccgtttcgttgggacgcttcgagattgcgtgggatctgcttgatatgagctctaggaaattatcttactccggaccagatggtcagaatgtcttgcacgtcgcagtacaacacccccaaggtatgcgccacattaccgtactctctttgttgcccttccattacatcagtaataacaaaataattatgtttgttttaaaagatcaattaaatccaactcattatatattcaacaatgcacagcaccgttaaacaacctgtaaataaagctgtatcgaaaattatggttttgaggatatcatctaattaagattgtttgtataaaaaggaagagattcgtgatccccctatatatatactgaggcaaagacttttttttttagtacagattaattaatttgggtctcttactccttttatgataataactctatttttatcttggatttgtatatacttttggatataaagagcataggtaggaagtagacctaatcgactatctcgtcaacatgtttgggtatgggtttgttgcgatctctgtcatgctcatctgattagcttttcgggagtttggcttagttgctttagagcatgtttaaaggtacgtagaactcggtatgagctcttacacggtacatgtttatttagaccatgtccttacgatagttgaaaccattaacctaaaaattaatttatttttattttctttttttcacccacatccaagaaagtttctattatatatatatatatagaggctataagaattgttatttagccattgttaaccgtaacaataatatttatcttttctcttctcttcttatctcttccatgtcagcaaacattcctaatattttgcatgtccttacccctcctagcaggcgcaggacattctatttatacccataactccatccaatccttgtagggtttgtggagataaacttggtatgtttgattttgtacaagtagatgatcatcttattagacctgttttgaagattatatccctttcatatactccctccttccctaaatgtttgacgccattgacttttttaaacatgtttgaccgttcgtcttattcaaaaacttttgtaaaatatataaaactacatgtatacataaaaatatatttaacaataaattaaataataggaaaagcattaataattacttagatttttttaataagacgaacggtcaaacatttttaaaaaaatcaacggcgtcaaacatttaggaaaggagggagtagttcccacccacatgatttggtacctttcaattcaccttgggatcctgtccgaaagacaacgaaacagcatcgcacccctcaccccagctttatcatttgcagggaaggagggatgtgtcacggagagggagggagaagaggagcaggtagcaggtggcttgccgctcctaccagccaacaacggcatgcacccccgccccaagccttaattccagacttggtaccttcgtaccaaggtttatacgtgtaggtatcatctgtgttaccctaggtattaggcttgatgttgtgggtgccatccgtggatggcatggcgcacgacatacctatagacacaagccacattgagatcacgccaggaggaagccatacatctagtcacgtataacctgccagattgcttcatcgaaattagtctgttgggctagaatagctagcatgctccgcatttatgctcggtatgctacatctcaaagctatacatataaactggattagatttattatctttctcgggaacctaaatcaatacttgtcccgtttcctcttaatcccatcttgcatatatcttggtatatatcaaccataccctatgtccataaaatagcagtcagacataacccgccgataaaccgcatactctctcccttttaaagtacttatcattctagatttatcctaggtcatcgtacattttaatactttattatccatttctttaaactcatatagtatgctttcataatacataattcacattctcttatcatttcaaattagaaagaacgacaaatattttttaacgaagagagtacaaccggctattatgaaagcatatacttcctttgacatctcgccatatttttttaacgaagagagtacaaccgttgatttaattgaactgcaatgggtcaacggggaactgcatgaagtaattgttcaattccacgtgctcttccaactatctgcccatggaaagacatcgtacttcagtacttgcttacgccatacgcgtagtttgactgcctcaacgtcaatgagtaaggcctggtctactttccaaatttttttcccaaaatgtcacatcgaattttcggacacatacatggagtattaaaaatagataaaaataaaaactaattatacagtttgcatggcaattgcgagacgaatcttttgagtctaattagtccatgattaaccataagtactacagtaactcacatgcgctaatgacggcttaattaggctcaaaagatttgtctcgtggtttccaggcgagttatgaaattagtattttcattcgtatgcgaaaactcattccaacattcggtcaaacatccgatgcgataccaaaaaaatttcttttcgcgaggtaaacacactctaaacagtgcaactggatctaacccgacagcttgatcggtataaataaaatctaaggcaaaaatcaatggttgaaaaattcatgtgattacatgtacatagtgaattcaatttaggggtagtttggatatacatgactaaactttagtccctgtcacatccgatgtttgcactaatttagtgtattaaacataaactaattacaaaactaattacacagattaaggctaatttgcgagacaaatctattaagcccaagtaatctatgattagcacatatttactgtagcactatacattgttaaatcatgtgtgtaattagttttgtaattaatatatgtttaatactttaaattagtttctaaacattcgatacgatagtgcctttagtacgtgtatccaaactacaccttgccttttgggcttccgtgggctttggtgttttcctgctggcaatatcccatcgccagtcactgccatcagacactacgagcagcacagtccgccgccaaaagcttaaggaagggtgtgtttagatctagacgcgcaaaagttttcgcgtgtcaccttgggtattatataggatgtcgtatagggtgtatgagcactaatataaaaactaattacagcatccgttagtaaacagtgagacgaatttactaagcctaattaatctgtcattagcacacgtttactgtagcactatattgtcaaaccatgaagtaattgggctcaaaacattcgtctcacaaagtagtctcaatttgtgtaattagttattttttagcccatatttaatacttcatgcaggcgttcaaacgtttgatgtaacagtgtaaaattttgtggtgggatctaaacaagcccaaaatggtaggagggcaaagaatgaacagtcagcacaggaaaacaaccaaaattttgacaaattgaccctttaagaaaacttattttgagattgatccatgctaaaaaccaattgaaaaataagccatcggctgagtgacatcgagtttggcgctgatatataacatgtcagcgccgagaaagttgaccctaagatctaaaactctttgccgctgaccccacatactagcatttaacaatataatttttgcctcttggttggaagtttggtagtggtttaatggtttagttgcttgcatggtatatgcaggtcttgtgtttgattcccgtcggccgcatgtataagccatttttgtcacttttttctctcttctttttaatctctcagtagtttgcttttaaaacaaacagatgatttttatctctttttattctctcagttggctttttaaattccttcttttttattctctcagttgttggctttaaaaaaacaaatacttttttatctcttctttttttattctctcagttggattttaaacaaaataaatgcgacattgattattctcagttgtttgcttttagtaaaaaataaatgcgacgctagttcaagaaagcagaaagagaacatacactaatgaaacaataaaggaaaaaaatgcatagcagaggatagaacccaagatatcttgcatgtctctcaccactaggctacacttgcatcacagattactaagtgttgcttccatttttaaccggtacatgaggtcagcgccaaagactggcgttgatcctctgccgcgtggaatgcaccgctagctcatttcggatcttagcaccaacatttccaacactgagacgttatatatcagcgccaaactcgatggtgctgagccgacggctcatttttgcaattagtttttagcatggatcaatctcaaaataagttttcttaaagggtcaatttgtcaaaatttcgggaaaaacaataggtagaactcctgctccatccgcccctaaaaaacgaatatagagtcggatgtgacatatcctaatactatgaatctggacagatatatatccagattcgtaatattaggatgtatcacatccggtagtagattcgttttttatgggatggagtgagtatatgattaggaggtccaactcacttaagatagaaacaggaagattcgatgggaggatggggaatagaacagaaaactattaaatttctgttgtcaacttttaggctaaaacctaaaatgcccttgtttataccggcagtacattaccaccatgtaatttgtaccacaaaagtcctctttttgaaattgaaaaatctgaaacgggccaaattgaatgtgacgaaatatgagctgacggctaactatattaattgttgattggctgactgtttgcttcagtaaaatgtctatatataaaccccaaactgtttgtgttgcttagcccccaaagtaataaaccaagtattttttatctcgatgtattgaaaccccggtttacttaaccccagggtggttttgcacgctggtttcaccatgctgccagtcaagcaacctccaagtggttaatgtgccaatcagcaacatgagctgattaataatattccttcgtcgtccttggcaaactcaagttgagtggaagaaattggacggggcttcgaaggagaccgggagataaattaaggtagaggtctggggcactatgtacaaagtggttcaagtcctacgtgtcttgactgctagcgtggactgccagcatggtgaaattagcgtgcaaaactaccacaagagttatgtttccatatgtagatttaccattttcccccctattatagcgacacggtattatctccttaatgaaccaatggaaggaagagtagaaacacaattaaactaatggagtagaagcctaggaggaagtagaagacaagtgaaacaggcaacaacctgtggcactgctcatgctgacatgcatgctgcaggccacacagctgataggttgcttaatcatttttaaaagaagatgataggcttagtttgtttttgaaacatgtttcaaaaataaagtgtaaattaaaagcaagatgtttttctttctataattgattgtttaggggctttattttttataacaaatcttaaaaaccattattgtttaatagacgtctttatttgtacagccttcgccctctaattggttcgtgtatatttacatgtaagcatctaagcactcaaattaaaattatgtattggttatggtaatgggtattctagtttaagtgaaagctaagaacttattttctaagaattttctaagtttttctatagttagttcactttgctcccttttatattttctagtttctttatgcaatcttattttaagttcatattttgtgagatgacaaaatagtgacagcgtgttacaccttatatgtcaaccattttcgaaaaaaatgaatcaatttttgtataaacatctaagactaaaatatgttctcattatttattgattgatggattagaatgattcgagactatgttaaatacacatacttgtagaatccaattctattgcacagtgtaggagacaacccatataggaaaattttttgcaagtatgcgaagcttctcatagcctagcaggaacacgattggatgatcaaatataactatgaaagcatcaatttttttggaatatgatttttgatgattgtttccatgatttaattaatattacgaattatgtactcgaagccaacctctctacaaataatttgtttagctagactacactgggcaataattaagtacaatgagattatataatcatacatataatgcttataatgcctatccacttgccataattatcattgttttcatgctatattagttagaaaccatagtttatgataatcttttaaaataaatggctaattttatcaggttatgtcattcgattatttataactaatttgcagttaaagaaccatattaacacaactaaattaaattgtttgtatttttacatatgtagattcaaattagtgttgtatatttgctaagtaatatttgaaactataaaatatgatttgaatttttaaatgttgttatggaatttataattacatgtcaaatgtcatctgccacattgtagcttgcactaaaatatagccaacataattcatcaaagtaaaatcacaccaaaataagtgataattacataatttgttttagtcaaacgaatgatgaaaacatagatcaaaagtcaatagtgtaaaaactggaggtaatataaatattttgtggcaaaaagagcagggccggctctacatattttagggccctaggccaactccatgacatgggcccttaggcatacactctctctatatatacacatatgcactttgaatttttaaagtatacttttaaagcattcatccgctaatcacgctgaaaataaatattgataatatcctctatatatgttgctaaaaataccaaaagagcattaaaatggaattactacggttaccttgaaatcttgactaaggatcaagctccagggacttcattaataatacttgacaaaagataagatgacagacatccatttgcttctcataaaaaaatactccttcggacatttcttgatgcaaaatcattaatgatggtatcaagatcaatattgtccaagacatttttctcaatgcaacacatagccaagccatttaatctttcttgtaacatggttgatctcaaatagtttttcaataactttaattttgagaagcttctttcagctgaggctactatcacaggcacagttaaaaggataaatgctttttaggtaacattgcaaacctaaacgtatagatgaaactgatctttaattagtatttactagttactactgactgattaatactttgctagttcaattcaatggagtatggacaatatggttgcagcacagcagtacgcaagtacctgtaaattgaaacctgcagacactctggaagtaggcagattcacattgtgtcagcggtcgccggtcggacgatgtccagggcaaacagtcgacagacaaaggcacaaagctgtgaagggctgaatgctgaagggatcgccggcggcccagcgtggggtgaacttgcagaggcgccgtggagggcgcagggcgatggaggcggattggcggagactgccgccggtagaggagaggagacgagaagactggaactcggacggtcgcgtatgcccgacgattcgatcagaaacttgtatacatgtatatggtatacctaatacatacctaggtcttctgggcccctacttttcctgggccctaggccatcgcacttcttgccgtagcccagagccggccctgaaaaagaggagatacaagtgcacgtgagggagagaggagagggagggattacattctgtttataatctaatctaatctaatggtctaaaacaatgagcccaccaatttaaatgaaaaaaattgagggctagatgtttctaatctattagaatgccacttggtggtttagaagcgtttacagaaatgccacattggcatgagaacgcttgtagtatgtttaatggacttgttcaagataaagtggtataattcaaatatcataaaatttggtgttatatatgaaaaatgtcatgtttaagagtgccatatgttaattttggcagtgcagttggatgctgaaagccgacagagagaaaattaaatcaaagatgaccttttgttagggatcgatgtggaagaacatgactgtattactgtaatagaagtttattaaataatcttaacatcttagagatatttcattctagagatcttatgtctccagttggttgtaggtagattggacgtccagtatttctatgctaacatggccctccgctattgcaaggaaccctaggaagattgattaatttagttttctaaatttgattttggttccatttgccctttgggcttgcttaactgatggtatcacctgctgcagcactgtctgtactgttagagaagtgcaagaatgtcgaggtcaatgtacagcaagaagaccaacaaaggagtattcctcttctcttgtacctcactagtcaaagtgacaaaaatgggagcactcctcttcactttgctgcatcgttgaaaactagtattgaaggtttcacatcgagattatgtgaacattttcgcccgaaacaaagcccaacaacattgcttcttggactcaatgaatctgctatatatcagccagacaacagaggatcatatcctatacttgttgctgcctccaatgggatactcaaggttgtcataaccttgctcaaaaggtatccagattgtgccactttgcgtgacatccaaggaagaactttcttccatgttgccgtggagaagaagcggcgtaatatcgttgcatatgtgtgtgaaaggccaggattttctcctatcttgaatatgcaggacagccatggggatactgctctacaccttgctgtcaaagccggtgttttttcaattttcagctcgttgttccggaataggtaggtttgcctgaatttatcaaatgaggatggtttgacacctcgtgatctttcgtggattatgatacctgcgaggttgtactctaaaaaggtaatcgttctctgccttttctgaccataattatcccatataatacactacagaggccgagtttagttccaaacttattctttaaacttccagcttttccatcacatcgaaactttcctacatacacaaactttcaacttttccgtcacatcgttccaatttcaatcaaacttccaattttagcgtgaactaaacacacctagagttgatgatactatacctatttaactaggctaccacatgttaatctttcagaacccacgatatatgataagtcaactattagcactttctggaggtactgttggttacagtcgccaggaccacttcttcgaaaaatacagcaagaaaagagacgaagtaatcgattcaaacgatatgacaagtgcggcacaggttctcggcatttcttcagcgcttatagcaaccgtgacatttgcagctgcattcacgttgcctggaggttacagagcagatgaccacactgatggtggtacaccaacacttgctgggagctacccttttgacgcgttcattatctcgaacagcctagcattcatttgctctttgctagctaccgtgagtctgctctactctgggatacaatcgagggacatctccatccggcgcaggtactacgcgttctctatgctcttgatgcagagttcaactacgagcttcactgttgccttcgccatgggaatgtacctggtgctagctcctgttactcttaatgcagcagtgtctgtctgcatcatagcatttgtttctctgctacctggaaatatggaaatcggggtatccctagctatcgcaaacacattgaggattagattgggaatttgggcagcgatgtcccaagcaaggccagttctcctgttcacgtggaaaagagtttggtcctgcataattatctttggattgcctggattgatgaagattcatagaaccaaaatggcttgattggcgtgtcacctttttttctgcattgatgtactttcttaatatatcctttattcggagtgttagaagtacatttacacaacatcgtgtatgacagctttgctgttacccctctgcattttaacgtagaatatacctacgatcttaggcagaagatgaaagaggggaattcagagtgtggcaaataagttacagtgtatttactactccatatatactgtaagttttcataaatgtgtgactgaaacttttttatgttccactgttttgaatgaaaaacaaatgtttataatattatctaatcaagatttttttttcattttattggccagccagctaattattatttatgtgcttgatatcacgttcctccaatcgtttgatgatagaaatttgctccaatttaacaaaaagtaccaaatcattttcgatcgttggatctaacaatgcccatcctgcccagctaaatccaacgatccagtatcgtgaggtactagtacctcgaggtactttttgcaagaccagagcaaatctcttattgctaatcatgagacctgtatgtccggactaatataattaagggttaattggatacatgccattataatttttgcgatatgcatgacaacacaatatatgatagttaagggcatgtacaacaataactataatgaattaatgatatgcatgacaatacaatatttattattactagcttggatgagagagggggaatagagaaggatggcttagtcacaacacatatatgagaaagtagagaagagtagtggtatggaatgacattttgtctcttgggcatatccttttgtaaataggaaattttaagtagtttggtgcgaataatattctagttagtgcattgtgttagagttgaacatgccctcaagtcttgtttcaaatggaatgatttctattgctgcacaatcaaagtgtgttgattgttattttgcgatgaacaattggtatatgagattattgattttgatattgggagattattggcaaagtggttttggagatgattgaatttttaggtgatgaacaggagattgctgacagtgtggactggtcagaccgggcagtggttgccggtcacatcggctgtacgtgtgcagtcagaccagccagcccgcggtctgaccaggccacattgtgttaatttcggttttaggttgtttctttggatatctagtggataaatcatgtttatgacttctagatggatactttgcgtatgtaatactgttgtgtgctaacaatgagttaagttggagagagcttgtgcttggatatggtttctttgttgatgcatgtgtaggtgagtcttgatgccttgggagagcgttgccggtgatggatgatgagtcaacttgggagaagatgacatccgaatgatcaggatatcatgcgggatgctaggctaaaaatcaataaatgtgcgtatgggatgcagagttgaatttggagggagaccgaattcggtacaattacagtttgtaagtttgtttcttgtacgggaaggtttccttcgggattaggagttattgtataaggttggttaattcgatgctttaggctacctacctagggtatgaatagtgagggaggcctcccggtatcgtttttgagagagttgagtttagagaaaagttagggtttagagtttcattgagatttttgtgaggagtgttgttgttgcattttgaaaacacagagagaagtaataaattttcaatctatttcgagagatcttcgatttgtatttgctcgggttctgcggtccaaccggcgggacacatgccatcagactggcaggaatacgatggtcagaccggtggcaacgacaggtgacagcggtgtgttaggcggtcagaccgaagctactacactgctcagaccgaaggtcatcgagcggtcggttcggcgcatctactctagtcgaaccgatcgccatcgaattgatacaacttttaattccgccaaaagttttgctttttagtactacaaccattcacctcctttggttggcttggtatttactgttcaatcctacaagtggtatcggaaccttgttttttccattagatttttatcgatctagagttttagccatggctaacatgcttacaactaagccacatgttttcgatggattggattttccttattggtgtgaaaagacgatggaatcttacattatggctcaagattacgatatttggaaaaatcttgctaatgctgatgagattcctgatcaaattaatattgttgctttaaagattgagtttgaatataattgtaaagcatgtaatatttttctcagtggaatttctcgttttgactttggttgtgtttctcatcctcaaactactcgtgagatttggattgttttacctaactttcatcaaggtacttcaaatatcaaggaacttcataaagatcttttcaaaaatgattacataaaatttgcgatgaaacctggtgagactttggatgattatcttgctagatttaacaaagttttgagtaatcttaaatctattgatacatcttatgatactaattactcacaatatgaggtttctcgttactttttaaatggccttgatatttctatttggtagatgaaagttatatctattcaggagtctattgatatgtctactttgattttagattcactttacactaaacttaaaacccatgagaggaatattcttttttgtaaagttgactttaaatctagtgttttggtttctccttcgacttccttggatattggtgcttcttcgtcaaattctaccgctcttgcttctataaatgtcatatccgatgatcaacacgagcaactcgaggaggacttggctttggctattgttggtatttattacgagcacaaaataatctacaggcgcacatataccgttgtagctttcacccaacagtattccagggtattgtatccacaggaaacgtgtgtgaacaatctaataacagaattcatccaatgacaacaattaaatagtaggccaaagatagagatgattcctatgggttaattatctaaattaagtttaggtaaaactctatcaatcgctttcggcacaggtttacccctagtctaccaaggagactctggcctacaactctatgttgtacttgaacatggaggattacaaaggatggacagggttatcaccacctgctgtctacctctacaacccgtgtagcacacagcaaataaaggtaacctctagcttagacatcatgtccacgctattaattactaccctaatctcggatccacatagaagattaaggtactctacctaagagtgatgaacccgtaatgatgagaatatatcttgcataaataataaaagtaaataccaaggagatcacaaatacttatcatctccagccctcctccggaacacccctggatgaatgtcgacatctccggtgctcctccgaaccaccccctcccccgagagaacttcgacatttgacacactcctttcagagcttccccacactcccttccaatattctaattctactagagagtagcctaaatgtataagtgagttgtactccacttgttgtgttgtgccttgagagtgaaatggagaactcattttataagacaactatgacggttactagggcgataaccatccacaaccatcattgggagagcatcgtagtcccccacgtggcagcagatggcgaggggagccgatgtcagttcagctgaactaggagttcgatcgacccttggatctaacatcttcagtcgcgtagacctgaatgcactcctagggtcggtgggaacctccctaccaaagttgggcctaagaggccacaatggtggttcgatcgaactcctagataggttgttttcagccgcactggtctaaatggcctcctggggtcggtgggaacctccctgccaaggttgagcccgaaaggccacaacagtggtttggctgaaccatttttggcccttctcggccaccccttttgtcaggtcactgtccagtgggcccccatgacagtgcacgagggttttgctacggtttgtgggccctccaaatccatgtactcgcgtctgattagccggaggtttgttttattgcatggcggatggttttcgtccataattcacctacatacaaatattcagcaagacttgtgaaaatggtcagtaataaccactatctctaagtttgatattccattttatattctttcatttgtttttatgcgtgcattgattattggatttgctacttaaggaccgtcaacaacacctcacacttatcctttactcatctttgagtaaagctcatggatataaaaaatagagcaaggacttcctgatctcctatttcctgtactctctcctctttttctacagtttgtatgtttgctgctgtgggagggagattcacttcacacgcagtaggatggatgcgtgcgtgcatgtgcaatgcatgtgaaagagcatgtagcctagtgattgcagtgacctgagtagcggtcgtgagttcaaatcttcataggctaagtttctaatttaaaaatgttgtatatatcggtcgtatttgaacataaagaccgataaaaaaaattactcttctctaaaaaaataaaaaaagtaatgcttaggcaagcggggtggggggtgagtgcctgtttggttgatgccctcgttagcatgccggagaaatttgcatgcgtgataggcatataagatgcggataaattgcctggccaggcagcctgacaccttgcttgtttggttgtgcacctctgcctgggaggaaaaaaaacatgattaggatctagattggatctgctaactcacatactagttgaatgacaaatcttggctttttaccgcccctccaaagaattcaacgtaatacccagtttttttttaacaacttgcatacatcaataagaaaaaaagaacagaaaaacacatgaaaaaattaatccccaaatccacgcatctatcataaccttcaacgattcctcccagctagttgccaattgattcaatgaaacaaaccgttgaagccttcagtgtcttgcatccggcgtgggcgtgtggctttagcgcatgcttctgtgaaatcattgtcatgattaatatttgtgatgaacaattggctattcaaatgatttaatcaaagaattggtttgagagtttgtgtgaatgttggtatgagtgcgtgtgactaatgtgggtcaggttgtgatatctgtgtccagaaacggttgttttgtctgattgtgtgcaggtgacttgaggtcagccctagtcaatggtgaggaccgggactatgctcagggaggagcagaggtctattgcggtcgggataccatgtgagaaggtgactagagtctggactcttggaggtcaactttggtcaacggtggggatcgggactagactcaaggaggagttgaggtccagacagtcaaggataccgggtgacgaagttggatacaagatggcatacggtggatagacatcgtgtggattggataatcccaggcgttaccataatgaatggccgcaaggcacatccccctttaaccagatggaataatagcaaaaagatatgctccgactagcccttaggaacatgtgccaagccctgagtgtcgactggagaggaacgcggattttacctttatcgcctaacagagttaaaacaaatcacccct

SEQ ID NO: 17383 - DNA, 823 bp, Oryza sativa
gagatagctcttcacatcagtgacttctagcctgtgacgaacgccatgcctgattgagatggggatactttaggtaaatacaacgaaaattttccagtaccaaaatggccataattaacaatagcctatttgaaataagcttgaagatcattgcatacttacagtatggccatcagcaatttgcgcaagcgatgggtcacggataatggagaggattggaacaacaaatgcatatgagcccccaatgatggtaggaagtcgagtgccgaataatgtctggagcagtgtttttatcccagtaacaaatagcagtgtttgaacaactcttgccttgtcatgcttttattggaagcaaatgaaacaaaaaattttagtaagaatagtcatatgttggtcctgcaatattaatgtgctgtagcatttgacaactgatacagaagctggaattctactgcacataaaaaacgggttaataaatgaagcaattctcacatcatttccacccataagaggaaccagcattgttgggatcatcacagcagtgcccagggaaagaatgtaatgctgaaagcccaaagcaattgcttcacctgcaacaaccagaaccactcagggttagtaacatatactatgctacaatacaaatcaaccaatcatagaacacttcagtgcagtgtaacactacataccccaggatggattggagtctatgcagtactcaaatccctggagctggtccatgggtggatgatggaccatgtcctcaggcttcacctcagccatttcacagccaaacactttacacttcttttcttcaagatga

SEQ ID NO: 17384 - DNA, 2104 bp, Oryza sativa
taagtagcaacatttttagaatgaatatagtagtttcgcttgtggttgcactgatccgctgtaaattttcttgtggttgcatgatccgcagctcgattgtaatcccagggatgatcgatcattgccaaacattaagttttggaactttttaattgatttaaggtggctttcttttgtaggagagaggttttatttataaaagcatttcttttttatttttaaagttttgtacggtttatcggtaggcatatgtagctccgatcataaagccatacgtacgcacgtacatttctcaaccgtcgatagatgcaagtgttactagcttactaacactggtggagaaaccctttgtagtcccggtttgtaacccccctttagtcccggtttccaaaccgggagtaccaatccgggactaaagatcgctatctttagtcccgggtgaaataaccgggagtaaagatcgatctttagtcccggttggtaacaccacccgggactaaagatcgagctgaccttttttttttgcatgcccctgttgctgcatggtttatatatatatatatatatatataatccatgcatatatatgtttcaatacatatatatgcatacatatatatatgtatatatatatattatattatattatatgtatatacattcataatatatatgtatttatacatatatatatatgttatgcaaatgcatatgtatatagatatatatatgaacaaaatatatttacattatagaaaatgtgtacacatgcatatagaaacatatgtagtcatgtattaattataatccattatatgtcctagctagctacgatttcgacgtagtagtactcgctgctagctcagaagctaaggaccggtgaattgtgttttcgtcgtagtagaattcacccttgggatcaaggatttcttcgttgatgaatcccatgagttgttcttgaaccgccgcgataaattccttgtgtgtggtcaggttatccctcatgcgaataaactatatgagtgtatgaaattgattagtaattaaacaagaaatcgctacgtaatgaaattttgaatttatttgtacgtacatcgagctctcttgtggtgatgatttggtctgcaaggcagtggcaatactcgcacacgtaatagccgcacaagttagttccctgcttttgctttgcgcactacaaataaatgacaaacaacgagagatctaattaatatacacttgtatgtatttgaatcggagaaatataaatgtagagcatgtgtactcacaggaaatttgaacttccgcctaagtctttctctccatttgccgcggaccaaatgacggaaccgataccaagccctacatggagtttaaagctatgattcgtagtagcaattaacataacaaggatttcttaattaacaaaggaacttatgaccgtacctgtctataagttcgaaaaccttgtcaaacgtagactctttttatccattgagtcatatacgttgacggtgcaggcctccatgtcgatgagtaaaagcacccagtggaatctgcaatgtacgtgggatgcattacatatgaaacacttagcaagttcgtacgggaatgaaatttggtatgtatgaagacagtaaaattaaactaactctgtgttgtatggcaacagtatgaacgtcttgtaatgctgcgccttcaggagatggacgagattgtcctctgtttcttgtggatattggtcgagcattgcgacgtttactttccgagggtcgatgaatccagtatcgaaaaccctccgccgtcgggccctttgaatctccattctacaacgataaaagggagtatattattttctatggtctacttatatacaaggacctaattaattaaaggagacgtatagtaagaaatctaactgaacgatatacttacaaaatccagcaactcataatagagacgtcgagggcgtccagctggtatagttcgtagattcccctgaaattgatccagagaatgtcatctccttgcaagaagtccgtgtccatgatccccgctccgatcatctctctaccggtggcgttcatctccatgtacagctgatgga

SEQ ID NO: 17385 - DNA, 696 bp, Oryza sativa
atttattttggttgatggcatttaactgacaaatacatgatttctaggaaaatattatgcactctgcttgttctattaagaataaatattattttcttttatgagcaaagtaatttcaatctgaacttgaaactgtagttatcctggtttgcgcgtggcatacattgacgaagttgaagagagagacggtgaaaaggtgcagaaggtcttctattcagttttggtaaaagctcttgacaatcatgatcaggtaatcatttccacaaagttgaattaccttgatggcattttgatatgatgtacatctcgatagagcttatttacttttgtatactgtgaaggaaatataccgcataaaattgccaggaccagcaaaattaggtgaaggtaaaccagaaaaccagaatcatgcaattgtctttacacggggtgaagctctccaaacaattgatatgaaccaggtgaattgaacggttgttctaaaaaactgaagagctatgctgccactcaagatatatctaatctgttgcattcttaattatttttaggacaattatttggaggaagctttaaaaatgcggaatttactggaggagtttcacgagaaccatggtgtgcgccaaccaacaattcttggtgtgcgtgagcacattttcactggaaggtctggttggatgctttgcagttgttactgaa

SEQ ID NO: 17386 - DNA, 677 bp, Oryza sativa
ttttccctctcgaaatggtggcgtgtgctgccgtgccggtcagttgtcccgtgacacctggcgcctgacgtcccgccgcagcggttgggtggcgaggttgtaggatcgaatcatattaagtaagccaattagaaggggtgaatagttgatatactcaaaaacccaaacttttagcggaaataaaagttaccctcaaatttgatgtagatcggtctgaccgaggttgatccgccggtctgaccgagctcatgtcgccggtctgaccggtgttgatccgagctcatgtcgccggtctgaccgcctgaagattgcctgccgcgtgtgaagtcgccgccggtctgaccgcctctcctcagtcggtctgaccgccgcctgtcaccggtctgaccgccggtatgtcgctggttagaccgccgaaacccgatgaaacacaaatcgaagaactctcaaagtagatgacaactttattacttctctctgtgtttacaaagtgcatcaacagcactccttacaaaaatctcgactaaactcaaaaccctaactaaactagcaactcaattgctctcaaaaacgataccgggaagcctcacgctccccctctatttatacatgaggtaggcagcctaaagccacgaaccaagctcatactaagagtcctagacaccttaggaaaccct

SEQ ID NO: 17387 - DNA, 1271 bp, Oryza sativa
caaggaagaaaacccaaaggagctcatcgacaggttcttgaaattctctcaggaactggatcatgctatcttcatcgcccaatcacagaccaaaattaggcatgtaaaagcatgtggttccaattcaacatcctcagcttcaaccaaagctgctttgaaggctgcattggataggaagcagtctgccatcttatggatcagagaagccattgaagcagacctctcacctttttctagccatacaagacccactgaatcaccaaagctatcactggcagagtcaaagcctatgaccccattgttctgttgttccaagccaaagtgcaactgcagcaaaaggtcctcaaggaaagcatctgatggttcctctcaaggaagtaacatgagtgctgccatggacctggctgtagcactgagatcagagtgcaactgttggttcctcaagtacatcgacaagttcttggacgatatcgaaagcgagaccatgtatgcaccatgtgattcccaagttgcaggccttctgcagcagcttaaaagggtggatgactggctcaaccgtgtcgcgctacatgagaggatgctttcggttgaccgaacaaacaaggatatcatgttttctgaagaagaggagagcgatgcgtgcgagagggtacgaaaaaagatttatggagcccttttaaggcatgttcaatatgctgcaatggcgctagaaggtctaaatggtgtaattgatgaagagaaggacgagagaaaataacagttactgtgcaaagagctttatcaatatatagaatgaacaaataaattttgtgtagctgcagataatataagtttaccatcgtcagaattctagctggtagaagcatgttaggcataacttccaaatgctgtctgataaatgttggatgctctgatggtattgttgcaactattgctaatcttgtctgtgatgagacatggcatccaaaaactaacaattgcctcaagtgcgactttaaggccatgaaagatctgaatagtactattggtgaacctaagtaggacattgaaacaaagctgaggatatctggtgcaatttacactctgatcaattacttgctacacttgtcattacatacttgcatacatgctcatgactgcatctcacatttcattacatgttcttcggtacatttcaatttgtgttgatgtactggtgatgtcaattgtcaagtgtactgcctttttcaaagttagggcccctttgaatcaaaagaattatgaaggaattt

SEQ ID NO: 17388 - DNA, 1048 bp, Oryza sativa
tatgtgtcatgaaagtaaatggaagcaaaattccagaggtgctactggaaataggaaaaaagttgggaagtaactaaatgtagtgaagccaataggtgtattttggtatgccaacttataaatatgcccaagcaatgtgcctttaagtaaaataaatggatgtctttcctggatataacaacaatgaacatttttttttttgctcctgctttctagtatctacattactctatgtcatgtggtttcttttctattagctacactaattgtataaataactgcagaaacgaatttatgttgtccgtgggatgcatgaaagcagtgtttcactttttaagtaagttagtttttttaattgtttgcttttttatccatgaaaaaaaaactcattctcttgtattcaactcaaaaggtatacactattttggatcttgctgctatgctccaagtttgcattcagtaattttgtccaggtaaattttacacttggatattttggaaagatgatttgacaagatggctctgatgctcatactaatttacagataaaacctctgatcaagccaacaaaggacataatgaatgttcataatattcattatgagtggcatgaattctttccaaatggtaatcaatgtttatttttggggagtgttattatgtatttttccaaactgataatagctgttgtcttttcagcatcatataatgttggtgctgtcatgtcgctctgggctcctgtactcttggtatgagcttatccaacttccatattagctgaccacagtgagcagtggggtcttattatttttccggggtcatattattcatttccttttcttttgaactcatgtactaagtcataaatgttcacttgcaatgccttcaattcttgtaggtctatttaatggatacacagatatggtatgccatcttctctacaatatctggtggtgtgtctggagcacttggaagacttggagaagtaataatgaatcttgaacttttacctgtaactagttgttttactttaggaagtcatgaacat

SEQ ID NO: 17389 - DNA, 534 bp, Oryza sativa
aacaggcgcttttcactctcaaagcgcttcgctgaggtcccaaataatagtaacaacattttttttcatgatggatcttctaaaccctcaaatatttatactacaaaattgattgcacaggtttctcccagcaagagaactgaggctgctaagtttgctcagttgtggaatgaagtgatatgtagtttccgggaagaagatcttataagtgataagtgaggcccctggctcatgtttaggaggaaacatgttatcatttgctcatagcaatgcgtttaatgaacttctgctattcagggaaatggacttactggtggttccttattcgtcagaccccagtcttaaactgatgcagtggccactcttcttgcttgctagcaaggtttggcagaataaaattaaagcttctcttttctcctccttacgttctgtgttcaattgcatgatcgcaatttattttgtgggaaactctgcagatacctatagctttagacatggcagcacaatttcgaccaagagattccgatctttgga

SEQ ID NO: 17390 - DNA, 641 bp, Oryza sativa
tcggtacccgtgatgaatatggtaccgcctcaaacatcaagagtagagtcaatcgtcagtctgttttggctgccattacctcagctcagcagaggctgaagctctataacaaagttcctccaaatggattggttctctacactggaaccattgttactgaagatgggaaggaaaagaaggttaccattgattttgaacccttcaagcctatcaatgtatcactgtatctttgtgataacaagttccacactgaagctttgaatgagctcttggaatctgatgacaagtttgggttcattgttatggatggtaatggtactctttttggcacactaagtggcaacacacgtgaggtgcttcacaaattcactgttgatctcccaaagaagcatggtagaggaggacaatctgctttgcgttttgctcgtcttcggatggagaaacgccataattatgtccggaaacagcttgagcttgctactcagttcttcattaatcctgctacaagtcagcgtaatgtttcaggcctaatcctcgctggttctgctgattttaagacagaattgagtcagtctgacatgtttgatcatcgactaaaaacaaagatccttaatgtggttgatgtttctggggatcctcta

SEQ ID NO: 17391 - DNA, 651 bp, Oryza sativa
gcatgggactggatatgtcaaaaagggagtggattcattatagacctggagcacagttaagaaattacctgtcggcttgttcccctttgtcgagggcacgaacgtagttctcgtagtactgctggtagaagctctcaatttcgcgggcatcggtcttcttcacgcgtttcgcgagactgggactgttatcctgcgggttgcataagattccaagtgaagatttatagcaatggaccaaacattagacttaaaagttgttgcacgactaagctttgtggcaacttatgactgccaaccaaacaagccctgaactcaaataatttgggtggaaatcaagataatgaatacatgatcagtgcaaatggaaaataataccatgtgaaattgatgtatcgactcaaaatcatgatcgacaatatatcagattttttttttttaaaaaaaaaagagggtactccaaacggttcgtcgcattactgaaaaaggattacaagcataataaataaaatttggtcatgctcaattaccagaagttaattagaacataaaacatctcatctgaaacaaaagaaaaaacagcatcacacgtcattctggttctggaaaattgtgctttgtgtagcaggttgttcaatgaattcattttgcatg

SEQ ID NO: 17392 - DNA, 31796 bp, Oryza sativa
taattaggaactaaccaagaataattctcacgaagtaaatcttaattactcagaatgatatttctattaaagcagaataattaacaaagtacaagaaatagaagaggattaccgaaaactccgaaattcctctgacttcttctattttactatctccctaatttagtatacaatatagtacaatgagcctcttatatttcagctcaagcttggagtgtgtgtgagtgaagtgagaatgggagctctatttatagtcaggtaatggcggttataactatgtgaattgtcggaattgcccggcaaccgccatcaagagagcatctggagcgtccataccaaaacctggatccaatggtgatcaccagggctgaacctggattgggccagatggctcctagatttggtctgggcctctttctcactctgccttatccatttctcctgtagttgggcccattttctgatgttttgatggagtttaagagcccaactcttgtatggatagaattcttattcactttagtctaaatttcctcccaactttagtggtttagtacctgcatccaaatatgcaccaacactcgtggaatatgtcagaattaagccctaccactatgttggatgtatcattatctaagtattatgcaggtattggcggcataaaactagcatttaatagctgccaagacagagcaaccgctgtccaccacaccatgttgccgccaaatccgcaccctcccacgcgcgcccgcacgtccaagcgtgtggaaccgggtcccctccacgtactttgccattttccccactctcgccgcggagataggcgccggtttgcctcgacacgcctcacgtcgccgcccccactttaccggtgacttccgcctcttccagcctcgtatcgcacccctgagccctataaaaaccctccccagacctccctcctcctttttccccacttgcctaagctcctcgcgctctctctctcgtgctccccacgctgctcgccgcctccgccactcaccggagctctctggctatgcgtcaccgctagctccgccatcccgagtagaaccacggctgccactccaattccgcaaatcgcaactgggtcatcctcttccccatgctaccgaggccgccgccgcattcgccacttctggccggcgatagccgtcgaccggtgccaccccaagccatgccgtttcctccactggctctgcagctttaagccgcacctaggccaccacttccccgccatcgggagcagctgaaaccctgcccttatcactaaaggtgagctctacccagtaccgtcaccaccagctgtcgtttctagccgcgccacgctgtttctcctctccctaatccctcctactccttccgcaggtcgagggcgacctcgtccacccttcgtcctcgtgaaccgccgctgccgttcttcgctgccgctaccgttcttcctgccaccttctcgccgtcgcaatggcacggtcagagccatctccccctctcctcttgcccgtcgccctcaacgcgccttctcgcaccgccgccgctcgctgccggagtattccaggccgcgcgcgcgccgctaccatcggttggtcggcattggccacacggtcctctcgctgcgccgcacctgcccgttgctgcccgatcggtcgccctggccgatctgggccgtccacgtggcgagcccgcgtggcaaagccgtgggccacacgtggactctgtccacagtggaccgttgccccttgtgccactgccgcgtggggcccacctttgatggactcggtccacacccgccccactgctgatgcaataacctctgaattcctttaataaaaataattaataattacgcaataaatcgaatttaattctagaaattcatttaaatggctcaaaacttctaaaattcataactaattcatacgaactctaaattgggccattcaacttgcagaatttatctaaaattgagctctacatgtttgtttacttttcatgtactgtttatttggttttattagagtttttcctcattttgcgtgccggcgcgtagattctgcgtttcggaagatcgcctccgcgaggaaaacagttcagaagattgtttgaagaagcaagacaagtcaaacattctccttgagcatgttgaacctaatttacaaatgctttaccgttcgcaaataaaattgcatgttttgctaattacatgggaatagggtttacctatctgctcgcttgtaccatatttacttgatatccgccctttgtcaattttgggtgataatttgactagttcgtgtcacttatgttgatcttgctataatcatgatatgcttcgccatggttaattaccaatatctcacataatgggataattacattaacattagcatcttgatgagctgcaagctcgagatatctggccatggttatttggtcataattatccaactaaaatatggcttaatggtgggctatgggtgcatggttttgctagtcacacccaaggaccggtttgcgggaaatccctggaagacttaatgtgcttaccacaagcaagtatgggcaattgctggacttgtaatatagctttcccctttctgatgttcccaggcaagggtgagcgtgatggagttcggaggagccctacgacggtctattaggctatcggatttacctaggcacgaggggaggctccctactatcggtttaggggtgggggcgaaacccgaggtgtagtgctttggttagggggagttatacgaagggtcttgtcacaatcactcaacatggtgacgtgtccggccgggtactgtaacatgccggtggcttgtgtcttatgggtactgttgtgcacctctggccagagtaaaactattcgaatagccgtgcccgcagttatgggcgatcgaccagtttcaccgtgattagtcccactttattaataacctgacataatgaactggtgtagttaaggtggtttggttgggcctgttcaacatagtgtagcgttgttcagtggagatttaatcctgcctttcaacaataaaataatttaccaccgcctttatgcaaatagccacagacctctatttgttacccattgcacgcctgcatcattggtgtggcttgctgtgtacggtggttatactcagccctgctattatacccccttttcagatttgtagtgcttctgagttggtcctctcccttttcacttaaatggtccgcacgcgaaaatgagcatattttcgcgtacggacctattaagagagccgcacgcaaaaatacacaccctctcttttcctcctacccactttaaataattttgggaaaattggaaccatgccattataattttgcaaaatttgagatatgccatcctaacccacatgtcattgactcatgtgggtcttacgtgtcattgagataccgatggcatatctcaaactttgcaaaattacaatggcatggttccaaattacaatttaattttccccactttctctcctctcctctctgtctttttcttccctcctttcctctatcgtctctatctcattttccccgtcctcattttctccgagtcccgacagcgtaggcggcgatcgtccccgcatggatccggcggccggccagcctctcccccttaggatcccgctcccctcccccgttccttccctcaccagatccggtggaggggaggggcgtcagtggcggtgtggccagaggggagcgcggaggccggcgggcccggtgcgcggatccggcggctggccgccctccccccgcgagatccggctcccctctcctccccttccctccccttccttccctccccagatccggcggagtgggggggggggcccgtcggcagtggtgcggctggaggggagcatggatgccggcggcaagcggcacggaggccgccgccgcctctgacgagggcgggagtggcgtccttggccgacgaggacgacgatgacgatgacaaggaggaggaggaggcggccgggagcggcgacgccaccgtcggatttgttttgttttgaaattttattttttttggttttttattttcccgtgcgggcgacttaagcacccgcaagaaaaatcacgattttcgtagacctttcggtatgtgcgggctgcccacccgcacgtgaaaataagattcgaccgcacggaaaaaccattctcctctaggccaacaacagccaaatgccacctagggtgttgcttgcaactcacatttgcccaactctggtttactggggatttaggggtttgtagacatcgacaccttgttgtcatgctcagggcatttcacagggcatttcaccgaatatatcatgctcatcaatgtattcagcttaagttcgatgatcatccttgatgatatattctctacggactaaacaaatgctggaacgaccttagacatattaccacggatttatggatgtcacctttgatgtaaagacccaataccaactacttgatgtacgtctcttggaataggttagggctgtttcccttaaaaaaagaaaaaaaaagcttaggggatttgtttcaagacaattattttttatttttatgaactccaatgtaatataaaataaatatattttataataaataagataaaataaaggtcaacttatttttaagaggaaggaagaataataggagtacgagcacaaatgctgtgcaggttgctcacatgtcaccttccgctgtcatttctacgcccactctctcttatcttgacttcgccgacaccccttgctgctagtacgcctctacctggacccgcacagtagtctgttgtcgtcctcgatcggatcagctaccggctttccgttgatatctccgcgcttgatggccgccgccgccgcggtcgcctccctcctcggcttcgtcctcgctctccctttctgcttggcggcgccgtccatcacaacgcatggcagcgacggcggcggcggcagctacgtgtcggcggtcggggaccccggcatgcggcgcgacggcctccacgtcgcctgggaggcatggaacttctgtaacgaggtcggccaggaggcccccggcatgggcagcccccgcggcgccgactgcttcgacctcggttggttcctccatccattgctcttctttcttctaatccatgtcgcgctcgcgagattggtcaagttaattggtccgtcgaattgacagtcagagctgggaaattcgcagagaatggcgtggacgagaacggccagccgacgtacaaggtggtgcaccgggtgaccgacgccgacaacaacctccgcgccggcgaccctctcccgggctcgccggcgaacatcacggacgtcgacctgtacgcggcggcgaaggagctctacctgggcgaccggtgccaggtgcccgacagcccgtcgccgtggcagttctggatggtcatgctcaagaacggcaacctggacaccaccgccgccatctgcccggagaacggccgcccggcgcgcccgttctcgcagacctcgaggttcccctgccccggcggcgccggctgcatgaaccagccgctcgtgttccacaaccgcaccgcgctggacgccacggcccggcgcctccgcggcgggctgttcggcacgtacgacctcgacgcggcggacctcggcagcagagaagtgtcgtactactcggtgacgtgggagaaggacatcgggagcggcggcgacggtgggtgggtgttccaccacaagctgcgcactgcgcccaagtacccgtggctgatgctttacctccgctccgacgccaccaagggattctccggtggataccactacgacaccagaggcatgaccaagatggtactacctctcttctgttaaaacttaaaagtgatgtccttttcattttcactttcactgaactgaactcaactgtgtgtcatgctcacgtccaacttaaattccagataagttttcttcacctcacggattcaattttcagcaaaataacatgtgattatttttatatattcctcactgaaaaagtacaaatatgattgctcttatacgattggtagttggtatggcgccttctgtattagattcacagaatattgtagcatgtcgcattcatttggtactttgctttagcgtgtggagaagcagggatttgtcccatcctccactacgttttctttatggattttgggtggactatgtccaaatttattatactaggatgcgtcacgttcatccaaaattattttgtgagatggacatttatggtgtctattattctaaagggttttatcatatctggttagtcttcatatttgaactgtttggggttattcactttgtagcctatttcaaccttacggtttaaatttggacattatcaaattttgttagtgttagatatatatttggtttgaagccttaccaacttttggtagaatttttaagagtgcaaatatctagaattatcaaaatcgggtaatggaacattgataagaatatatgtttagtttgttgaatttggtaaggctaaaatttggtagggttaaaagtggtacaaaagaaccctttgaatgcatcttcaagtgcaaaggtcagaattttgtttttttacaaaaaaggttgaaatgaagtccttttggatggagaaatgaagtactactagaagtatatctgactggaaaagttgcaattcgatagactgaccatgtcagtttcgaaataggagtaacattttttttcgtgaccaaaattagtagccttgtaagatcttctgactaaaaatgtgtaacgccaggtgccggaatcaccaaacttcaaggtgagggtgacgctggaggtgaagcaaggcggaggccccaacagccagttctacctcatggacatgggcagctgctggaagaacgacggccggccgtgcgacggcgacaccgcgacggacgtgacgcggtacagcgagatgatcatcaacccggagacgccgtcgtggtgcacgcggaggcgcatcgaggagtgcccgccgtggcacacgttccggaacggcacccgcgtgcaccgcaccgacgcggcccgcttcccctacgcggcgtaccacgtctactgctctcccgggaacgcgcgcgccgccgaggagccgaccacctactgcgacgcgtacagcaacccgcagccgcaggagatcctgcagctcgtgccgcacccggtgtggggtgagttcggctaccccacggcgaaaggccaggggtggatcggtgaccccaggacatgggagctcgacgtcggagcattgtcgcaggcgctctacttctaccaggtactcattccgtcccaaaatataagacctagaatcgtagatgagatgggatattttctattgttacgaatcagaaatatccatctgaatttagattcttatattgtaggatgtagggagtccattgcatttgtgcagttgatgttttactttggttgagaaatttcaatgcagaatgcagagataggaagtgatcgttcttctttttagcaaaatggaaaggattttgggtgagtgtgattgatgttgttttgcaacatggatgtaggatccgggcacgccaccggcgaagaggaggtggtcgtcgctggacgtcggaacggagatatacgtcagcaagtatgcggaggcagagtggacgctgagtggattcgacattgttgtgccggaggaatgcattgggtcgtcccaaggaggacccgtcagtcgatgtttgtaaagttggtgatcaacgagttaattaagaaacacttatagattcattattggaataatatcgtgttcccttccctcttttggtgtgtgcttggcacatgtctgtctttctgggaggaaactccaaatcgaacgtccgattcctccataaaaatcagatggaccaacggatgaaacattaaattatgcacgatgaaaaaaaattattaattgaaacattaaaaattgtgaaacacaacaagaacacacatgttggaacttgtcgttatcatgttggaactaccgatttgtagtgttcttcgtctttcaagtgtcttaagttactggccttctgtgggatgggccaagatgagaaaaggagagaaggtgatattctcggggcctagaaaaatggtcttcgagaaggcaaacaagcacaggccacggccaacaaggtaagagcagcaatgctggagccaagggattagcatggacggtgggcaagacagcggtgtcgtgactgacatctattgggccttcctgattggcggggcgggggcgcttcaagtacaacaaaactcctgataggtatcgactcaagtgtgccaattcatttaaaattgacaccaatagaaacaatacctatgaagagttctcaaccgacacctataagggttcatatagtagtggctgctcatcatgggaggcgagtagtggttctgggaagaggggcagaggagagggaagggaggccgattttgtggcttagttggtgctggaggtcaaaaagggagcacacatgggtggagtcttcgtcttattttgaaaagggacaagttcatttacacccttaactcttgtctttatctaaaattgaactcaaactctaaagttgtgtatccaacaaccttgttggtattttctacgcacacagataaatcctcaagcacacggataccactgtagcacttgccttgagagtattctaagggtattgagcacaagaaacgtgtgtgtatatctaataacaggattcaaccaaggacaacaactaaatagtaggcttagaataaagaggattcctatggattcaactatagctaacttaagttcccgcaaaaaaaaaaactagctaacttaagttaaaggtaaaactctatcaaatgtttcgggcaccgacccttccctagtctgtcaggctaagtccggtcttaagctctatgatatatccgaacgtggagagacacaaaggatgaacagggttgtcaccacctgtcgtctaactcactttccgtggagcacacaataaacgaagataacctctaacctagacactatgtctacactatcagaggaagcaaaggcggctcggccgaccccttaggcccacctcccagcctctctttcggctgggaggctacttgatgggcctccaatatcttgtactttggttgggctcaattttaggtggttttgatggatatgtgggcccttcaatccatgtaatcatgtcctgattgttaagaggtgtattttgtcgcatggcgggtggtttttgtccataattcacctgcataaaaatattcaccatgacttgtggaaatggttaataataactactacctctaagtttggtatttcattttatattcttttatttgcttttatgcatgatttgatggtcgaatttggtacttggagaagaacaattgttgttctgttcatgaagttcttggataattctacattgatatgtaggcttttagcatgaaaggcatatatatttggaaagcttatcaagtctactttccaacggatccaatggcacatcattcagagttttctatcaccagtaattgtaagttaaagacatgttgcacaagcagcggcatcaaagttggatgtgagccttgtacaacatgtttggatggggttctattatcccaaggcccatcttgggttggtatggagtctatttacaggttccctacgaattgaagccttccaaaacaagaagtttgaagataagaaagaaaagattcagtttgaactcggtttgggctagcttggacatacctggactaaaatgcttgtttctctcttgtctggagtctgttttggacgtgtgtgcacttgttggaaagctaacttcatgacccaagtgacggaggggccaacagaaacaaactccttctggttccactacacgagccaaaagaaattaacagtgttgtagagaggtttccatattgtgttgtatttgatttctagttagtttctaacccatgtatttgtaaaaatttgctcttgttcttctcctaggttttgtgctgccaccgcaaaacaaaagagagggattgggagttctgccatatattgttcttgcttttccttgtagggaattgagggggcaatagatccacttttgtttggtcgagtggatcaacctatcaaagctagtggtttttgcgaattcatggtgaaaggtgcgttgcaaggtaacgtattattcattcagttcgtgaggtttcatggtgtatccgaatcctacgtcacgaaggtcgggctttccagtattgaagtgctgaacggtgtacttcatgcgaaaacaacttattttaaaatatcagataaaactatttttaagtttaaaataattaaacacatttaaacatatgttaatattttttattttacgtgctcgtacttaatcttcatcatcagggcacagttcattggatgacatgcatgtaacaacagctgagtccaacagagaacgggttcgatgttctcatacattagatatccctcttcactcctcacgatcaactgtcaccatagacgatcctacagcagtcgtgcttatcgatcgtcgatcgccaggaatccactaaaaagatactttccatattaaaatataagcatttttaagattcagacatggtcgagatgctactttgactatccatatctatacaaaagtaatatgttttaaataaaaagagttacatgttatgatagtttgtttaatgataaatttagtaacatcaattttacatgattgatcttttttattcttttgttgttaatagtgaaagttaaaaaaatttgaattgtcactattttaaaaatgcttatatttttttaatctgccaacagagaagtgtacttcagacagaaggctctgataacaacattcttcgtctgctgcctgctgtgtaacgaagaaagcgggtgaactcataaaagcagatcaattcttttaccttagtcacaggattgcgaatgaagtagatgtagaatattatagcttttcttttacctagtcacaagattgcaaatgaagtggatgtagaatattataatgctgtttgtatgtcattggcaattccaataaccaggtttgctgtgtttctgcaatatagaagcgtcaatatactgccccggaaaagaatcctgccatctaaaagttatagaaagtcgatatgagggcaaatgatgtgctattatttccaaagtatcaatacatgaagaaacaatatgacgtcagcactgtactcataggcaatatctcgttttttttttgcgtaaacaactaaggtcgcagtattgcttatccacacacagcgatatatttcatccatatgttatattacctatatattaaatacagcatgatacatcaacaacatttgatattacatgccagcatcacagttgtgtagttatgtattctttttgttatcagaatgcgacaagcggaggtccattgactgcagttggttcctgaattcctcattctctgcgatgagacgctcatactcggtaagcaaaccttcagattgcttctgtaaagccaaggtattcgcttcagctgtttttagttcctcagttttcgtttctgacagacgcttgaattcttgcacttgctcattcaacctggaaatctctttctgatattgttgaatctcctctacactcccatgttttgcttcttctaaggtcctgctctgctttgttacagcctccatgtttttcttcatggtccgtaactccctgatatagtgatgtagccggtcaataattaacccaagaaacagagagtatcctgcaaaagaacagaaaaaatgtcaacattcaatcaatctaaaagttaaaatctccaccaatatattttagcacaagaataaccatattatggcacttatttcttgcctgagtccataccaatcgttaattaaaccaaaaacaggcattggagtatgttcaacctttttttgtgggaccttgaatacccaagtttaccagaaatcaacccaaccaaacccaaatatgtatgttatcactccaactaacaatatcaggaatttgaatccagccccaccaccacccaaagccaattcacctgacttcagagttcaggccttatagggaacacaacattcagtttgttcttccatgtctcactaataaaccgaataagaggatcaacagactacattaagtgaccaatgcatatagaatagcctctcgatgtaacgtatcgaggacaatgtgaagtcttctttgaaattgtgctcatgtgaagccacggatactcaggaggggacaaaaaagtaacactggcctagaattagtgtggctctctcttagttgttgactaggcatggcatgataggttagatttacaccgcattcttcattgcacaattgcacaaatgggtggattggatttgtgaggggagcagagtcaacacaaagttccttagtaggagaccacaaatatgtcagctaagggggtggggaacagctaaaattatttcaaacgcatttgatatctttttttttcccgaaagaccagcatttgataccatcgatctctgaagaatagtgaagatagaaggtctgtgcttttgtaatatgaagcttctcagtgacaaacttatgtgataagcaatcttgcaagctacaaacatgtacataatgcactacatgaaactcttagtcaccatgaaaacaaaaggctcaaaagaagttttaaacatctgctctgactagttactattctaggatgactagtggtcctagtggatgctggcaaaagtatacatgaaatgcaaaattcacgtaatgtgcaacggaattgaactatgattacagatagagaaaatgctacacttagcatatattatggtttaattctattaaaaatgttaatgaaatattaaatctcttgggtatgtaaaccggcaaaatttgtgaaacagtagtagtaaattttaaaacatactccaagttagcatcaataagtgggtttgcagttaaatcatgtttctttttcttcatttgaccaggaaggaaaccaaacatttactttttcctacttgttgagcttatagcattcatttccgcaaaggtgtcaaggccaatctaagatgtatcaacgtgtcaacatcaaaagttattgtttcattggatatcatctgacatgtgtactggccgtttccacctgtctggtaagtagtaacagaacagataagctggaacaattgagtgcatgtggctttgccaaaccaaagaaggacatgtcgtctcaataattcctttttatttaataaattctatcttgtttccatgagattaacaacttcttgtggatttacatcatctgaataacatccatatggcctaaaaatgacaaatcgacaatttcaattgcatgttcatgtttctttaatgggcacagtcaacctgtattctggcaaaagtacagatcatcaaacaaaaaactatggatatggaagagcacaaccgtcaaaactcaaaagacagtaaacagtctcaaaatgtgatcttcttgatgaaacctttggcaagagagtattgaattgtgaattgtcataactttttgagggacaataattgtcaacgttgttggatgaacaataattagatgaagaacatgcatgtgcaattggggttaggttgtcctatcaagaccttctgcaagcaaatttctcataagcacaatgcaattctttcacgtctttcctaaacaaaaacctccagaacattataagtttataacataataactattattactaaacatttatcgctcaattttccaattaaccagagatccccaatcaacgggttccaattagccgcggagaagaagaacaagggaaggtgacacatacccatgagggatgcctcgaggaggtggcggctggcgagcacctggtcggtgggcgtgagctggccgagatccccgacccggcgccggatcttggcgatgctgtagccgctggagcccagcacgacgagcatggtggcggcgaccgtcttgaccatgacggggccgcgcccgcgcttggcgcggtcgatggcgagcagcgcgaggcgtcggaacggcgtgcggaagagcagcacgagcaccagcgccgcctccgcggccagcagcgtgaagagcagctggatcatggctgcggtggcgagtccgtcgatccgtcgaacaggtggtgggcacggaggaggaggaagaggaggaggaaatgggggaggagggatgtggaagcggggggatctcgaggaaggcgatatggggagacgggatcaggtcttctagaagtgaatccagccgaagaattcacaatggacggcttctggaagctgtactcggggcctcttctttttgaccctctggcaacagatctataaaaattatagtttttggtgaagtacggcagctgcgctgcttgtcttgctacgcagtcacgttactgttgccctgttcatctgcttgctggccattggatcagcccatgcatgtttctaatccgatgcacgacgagtctttaggtcttttgcctgcttccagcgaacccattccccatcgttctttcccgtcccctgtacaaccacgccgccgccggtggtcgcctactcgccatacgcccgtcccatcatctggccgctagaggacggtaggaaatccatatcgctgtcaccgccacggtcgccgctgtcgttgccgccgtcgccgccgatgtaaatctcggctcaccacggccgtcaccgccgatttgaggtcgattccccaccacctcactaaactgttcccctgctcatcaaagcctatcgaagatccttccctgcccccctaaagttctaccattgcctcccaacaccgctgtcaccgccgtcgccaccgatgtaaatttcggctcgccatagtttccaccgccgatttaaggtcggatcctcaccacctcacgagactcttccgctgtaaataggtgagcacggattgctgatagcatcggcagctgcagcttgctcgacaattctgggacaagctgttcagcctctaggggcgaagccaggatttgatattaggaggtgtggggtgagaagccatgagaccgaataactaatatttatagcaaaggaggtcaaatagtcaccgtcaataataatcaatgcgtaaactagtcctttaacaaaatcttgaattttagctctttaataatatcattgaaagtttgaaatagtcttaatttattgctaaattctttcaatgtaaactattgaataatctcacaaataagtattatctattttactttgaaaaagatgagaaatcacaaactaattttgtatatcatgtttcttgctaatatttttacatctgctaactaactaaagtgataatactttcaagctacacaaataaactagataaatacttatcttagttaaccttaatacagagtaaaaacaggggatgtagtggggataggggggtgttggcaccctccggcacccccctagctgcgccactgtcagccccagcagcctcaagctccaaccgaagcgcccaatcactagaaggtaatgcccctcgatcctccttgcgtgtggctatgctctgccggactatttttgctgccattgctgatttgtgtaatgcacggttactgttactatcattggtagagctgacataaagatcggtggttgcgccggagtcgacaccagattgcatgtctcctcctcagctgcttctgagcttcattgcgtttgcccgtttgtatttagtgaactacatttctgtagtgcttatggtttttagaggaaggccatttgaaatccatgcctcctgagtttgaggctacattgtgcaatagtttggaagggaattggattgtaaaaataggtaattgatgtttgaactgatcctaaaattacaagttagcactttagctgtgcctattgtttttttttgccataacgtataaaatgtagctggaaccatttttatgtgctttcacattgttctcagattaggggtcgcgttggaatttgggattgctttttttagttttctttatgtaataagaatttaatgtacttccattccctaattagcagataacaacaaaaaggaaagcactaacaatatataattatcctttctacgctgagcaatgcatggaacaaactagccaaattggaatgacctttgttgacctatttaaattaggctatcaataaaggtttaaaatacaaaccatccaatgccgtgccacaaggatcattgcaatgtgctgattgcatctgctaatattataatgtgtcttaattaagtttagcggtccttccgataggctcttacaattgttatcgtgcctttagcttctatgacctaggctatgtatgctcctgccctccatgcctttccttgatttcttccttgatgtctaatgaattgttcatgctttcacacatccatctacagctcaggccatgcatcaatggctgagaatagtaacaagaaccaattagttttgggtgggtgcatagtctgagcatcatgcctgagtgcagtccaatattatcgcaatctgcgtgctgagaggaatgatatcttgaactaattatgtgataattgcaagatgtaatacatctcaacatattgtacataatgtcttcttaaatttatactgtttgcacgaagaaatgatgtgcttatgtatttgttaggtctacacataagaaagtcagtggtctacattgcaaatggaaagctaatctttagaatcagccatatcatttattgagttcctatcaatacattagtagcttatatatggaattatttatcattgttgattcccgttctacactgtatttggtgtttatcatgcttcgctttgtcagttggcgacttgacatgattggaaatatttttgccttttgatttctctgtggatagaatgacattatttgtttatctgtttcttcaggaatcaagatttggcttaaatgggggaacgatataaattctttagtggaagtttcagctctaacactgacttggtatgatgttgctgtacttatctatttccctcgaagatcttccctggtcgcagcaagatccgcccaaatcccccaatctgtacaaggtatttggaagaaaattggactataagactcaacataaacttccaggtttaacaaattagttatgcctgttgttttttatcatggattataaaatgtagccgttctttcagattgctctgtacgtatgatgaggttggcatttaggattgttcttttatttgcttaatatactaacctcctaattagcaaatctgtaatagtaataaaaaggaaaccggtaaggatatgtgcttattctttctaggctgagcaacacatgtaacaaattagccgattggaatgagcttatatgtcgataacctgatggattagttagttgacctatgcagccaatgtgacgtcaactacagagcatccggtattgtgttgggagtatcgttgccatccactaaatgcatatgttaaccctgtaatttgacctcacaatttttagtgctcctgccgattagctcttcatgtggttaaccttcctggtaccttttacgcttacgcttttcctttcctccactcctttacttgctgtctctttagttattcatgctttcttaccatccatctaaatggtcaggtcatacaacaatggctaagaatagtgataacaaccagctgattttggatgggcgcattggattagtgtcatctctatgtcaagtcgaacctattcttcgcaatccagaacgtaagcggaaggccgttgtattggaccaacaattcaaaggtcagctaacaaccgatgtttcgtacactcgttatcttttatttcgatttcgtggtgttacttttctggctgtaccagaacctgaacttgcaattttggttcaggtgtcttttgtgctggacaatcaagccaatcaacaagccatgttccagatgtatgcgctggagactttatatcaacctttcacctaccatcaaggcgaacaattaggcgcaggctgagctttgcttctgataatgtgcctatcccaaccggtgacggtctctcatcgggtagcccaacacttcgtgccgttgagaccgtttgtggtgagctctccattagactatgtcctctttagttatctctcttttttttttacgaaaaatagcaagacagcctcctactgtgctaccatattagtatagatattaaaaagttacaatatttagttctctctctgagctcaatgaaattaacatgcctatcactttgcgattttggccattatcattatgaccttaccctctaggttagtcccagatttatattgttatattcatgcaatatattctgttggtcacaggtttaccgcatccacctcgatgtgttgctgccaagtcgcgtaaaaaacgcaaggtagctatgatttgcaggagagaagaaagtaagaaaagacattctacactaataaccttatagacaaatttgttttgttagatttgtgatcatttggctgttgttccagggttatatgctgatactctctccctttcatctcggtctgttcggcggcgcaaaatcccaaatgataatattgtacaccaaccacaccatacacaactacgtcaacataacccaacctcagctgctcagccaggtggcgatggtacctaatttatttcttttcaattttcaataatgtattgtgatgacaagaaatccttaattcttctggtctatctttttcttgcaccagatcataggcagccattccccggtcgacaccgccgtaagttctattactttttttcaatcttactgttgtcatattcattaactatttcttagcatatgagaaacatgcacgctatgtgtgtttcgaatatgcctaggagatatatctcctcatattgcctcagactcacgattagttttacacaccactcgcctacagatgtcatgctgctcgactccgcagttcatcttgctggttactctatgatcaatccattgcttgtcgatgaggtttcattacaacgataattactatgattctcgccgcagctgattcatggcagtgatgacttccatatggtaatgataacaaagcatattgtccattccgttgctctatattttctctgtcaaatgttttcttatttcctgtttgtcttttttaactcttaggcactatattttcacctttataccttggaggacctgatcagacttgccgatattgtggtgctctcttttggtatgaggagcgtgcccgtggtcaaggacaggtaacttcacctgtgtacaacaaatgttgtaggggaggaagtgttcgtttacctccatacagaccacctccagaaccattgcttagtttgttgactggacaaaaccatgcattgtctgcccatttctttgataacattagatgttacaactctatatttgctatgacatctatgggcgtcaacatcataaggtctattaacgatggtggaggaccttatgttttcaagattagtgggcagttgtgccatcggataggatctctaattccaagacatggtgcttggccagaatattgtcagctatacatttttgatactgaaaatgaagtccagaataggatgggggttgcttccgttcgtggtagttttcagccaaatgaagatgtcattagatcttttatgaggatgcttgatatgaataacccaattgtgcaagtgttccgaactgctcgggatagattggctaaccaatcagaagaccactactttgtcaggctatttgctgtgcctaatcaacatggtagtgtttatagtgcccctattgcatctgaggttgttgggttggtggtcaatgatctaggaaccactgatcaaggtcgtgatttaatagtacaagatcatgcttctcatctacagaggataaaagaatctcactgcaagtttatgactatgcagtaccctctcctgttcccatatggggaagatggcttccataaggatctcaagtactgtcaatgccagcgctcaggagccattaagagatattatgtcacgatggtagagttttttgcatatagactacatgatagagttggtgacttcaacactcctttacggtgcaagaaacttactcaatcctatgaggttgatggtttttgctgtgttgaggatggtcgcttgagccattacagaattgactcatttcagaagaaatatagagccagcccatacaactctttggttcaggctgttagcaccggcatgacacaaggatcaacagcaggtcaaaagatcgttttgccagcttcatttaccgggagcccacgttattactatcagaactaccaagattgtgtggcactttgtcgtcggtttgggtgcccacatctattcatcacttttacatgcaatgctttatggctagaaatagtagaagctttagcacccatttcaggacagtattcctctgatcgacctgatattgttgatcgtgtttttcatatgaagctaagaatctttatggatgacatagtaaaaaaccagttttttggtccaatatctggaggtaatttccatagctccttaattttgcgcactatgttctattacataatgtatttcccgttgatatttcccatctacatccaaatttttcggctattttttttggcctgattttccccttcgatacttctcaattagttttccattcccttttttgtagttgtctacacaattgagttccaaaaacgtggattgccccatgtccatataatcgtgtggctcaaaagggacggacctcttgatgctgattggatagatgcttttgtatctgcatagctaccagatccatctgttgatcgtgttggttatgaggccgtttcaaggttcatgatacatggcccttgtggcagctcaaacaaatcgtctgcttgcatgaacgatggaaaatgcagtaagttttaccctaaagaatttacagagaaaactatagttttgcccaatggacgtatcatatatgctcggccaaataacaaaattaccacaaacaaaagtggtgtggatgtcgacaacgggtatgttgtgccccataatgttgacctcttggttaagtaccaggcacacatcaatgttgaaattgttaatcgtgatgatatggagaagtacttattcaagtacacaaccaaaggaccagattgtgctaaggttggaatacgggatggaggcaacgaaatacaacaatgtcttgattgtaggtgtatagcacctaatgaagctgcatggcgcttgctacaatttgatatccaccacaccgatccatctgttgaacgtttacctgttcatctcccgctagaaaataatgtggtgttttttgaagatgactatcttgaccaagtcattgaaaatccactaagcactatcaccaaattgactgcatggtttgatgctaacaggatatacccacatgctcgccaacacacttatgtggaattccctgaattttggacatggcatggcgatggcaagtattggaaacaacgctctaagagtcataagggcaaggttggtcgcattgcaaatgttggacctaaccaaggtgagcgtttttacctacgcatattattgcatgttatcaagggtgctcaatccttttctggtgtacgcactatcggtgacattcaatatccaactttccaatctgcatgcgaagcattggggttacttggtgatggctatcactgatgcagcacaatgggcactcccataccaactccgacaattatttgtcatgatgcttctattttgccaagtatcaaacccaaccaaactatttgatagccatgttcaactaatgggtgaagactttgcatatcgtgtgtgctagcatacacctgggatacatcaaactatccttcaagaccatattagattatccaccttggatgaactagacaaattactgagagatgcaggatatagcttggatcatttccagttaccgcagctaagccatcatgcttttccaccattggagtataggcttataatggatgaacttgcttatggaacaaacagtgtgactgaactgcttaatcaattaaatccttatcagaggcatgtttacactgccatagaatcctcagttttaaataattctaggcaaacattttttgtttatggatatggtggcacagggaagacatttctatggaataccctattgaacagcattagaaatagagggaaaatagccttgacagttgcatcttctggtatagcatcattgttacttccaggtgggcgtacacctcattcacgctttaggattcctctagacatccaggaggactctatgtgtgctattaagatgaacacccagctagctgaattgattcagcagacatctctcattatatgagatgaagcacctgtcaaccataggcattgttttgaagcattcgattgaacccttcgggatatcatgtcatcagtcaaccatgattctgtgaacatgcagtttggtggtataacagttgtcttgggtggtgattttagacaaactctaccagttattcctaatgcaaggaaacaacagatcttgaatgcctcaatcacccgttctcgcctttggcaaaactgtgtggtgcttgaattaactgaaaatatgaggctcagctgtccaggcctttctcttcaagataaatctgagcttgaatagtttgctgcatggcttctatccttaggtaatggtaatgtccatgacagtgcacctgctgatcgaccggacaccacctgggtggaaattccatcatatcttttactaccggatgaagagaggaacctcacatgtttgatttcttttgtgtatggttcacggccgcatatatcgcagctaccagcttacttatgtgagcgtgcaattttggcaccaacaaatgagatcgctgctggtataaatgcacagattatcagccacatagccaccgaagaaatgtcgtactatagctttgatgatattgatgatgccacaccaaactattgcaatgtgcagtctctttatcctacagaatttctcaatacaatacacatgagtggtctgccggataatcatttacaacttaagattggtgtccccattatgcttcttatgaatttagatacaccaaagggattatgtaatggtacccgtctcatagttacacagctgactcatcgcataactgaggctgaaataataataggaaaatccagaggatcaaaaccatacataccaagaatagtcactacttcgactgactcaaaatggcctttcaaaataaagcgtcggcaattcccagtccgtgtttcatatgccatgacaatcaataaaagccaaggacagacactcagtaaggttggtgtgtacctaccaaaccctgtattctcacatggacaattatatgttgccttctcgcgtgttacatcacctcaaggtcttcgagtcctcattgagaatagcctacctgggtatgaatctaagacacataatgtcgtatattctgaaatattcagtgatattgcaaatcagcgtggttagctttaccaggtatttttatacgctctgtatctcaacatatatgtatatgtatgcctcggttttatacatcaatcgttctaacgtgtggactgtgcgtgcttccaatttcatctattcttattcttctgaatgaatgggtataactcagctagctatgccttttttttatatataaatgcagatttcactacccctatgttcacccatggtacccaaagtcattgaactagaagatatgaagttttatgattattccttggttcttttccctattgcaccatacagttattcaccaaaaaaacaaaggtaaatttctttaggactgtatgggttcagcttgccctcagtatacatggattcatcatttgtagatgccctcctgtcatgtttgatatgcacatggtagcaaatattgatgcatatatttatatttagcaaatgtaggttaaatatctattcgtattctttacatttccttcctatggaccgcttaccgaattctgttattacaagacaaaaaaaatgttccatacattccaactattgtgcctccacacgtgcaaaattagttcactcttattttacttacgcacgcttatagtgtgtagtacgtgctatttattctcattcaactttgtgattaactaaacgaattatggacagttctatatgtatactgagctcagtgtggtacacttcaaaacattatatgttgttttactctgcccagagttgtgaactcaatttaatcattttgcttactttttaaacttaacatgatacattatgctttgattatttgttatcatgacaatattctacctacttccctttttttcatatgcttacaggtttctcaggttgtccttatggtttggtgctttccgtatgggttgatcggtgcgaatgacaaccaaacgcgcaaaactgctgtcatttactatcatttgttttgttaccatgctatagctttttatatgtttgctattatccgaacttttctgcgcaatgcactaggcagaatatatgattatgttgtatacgctccaacatcaggcgctcatttggcatgatgtcaatgttcttatgcctatcatgggttggtgctgtatagcgtccagcttttgcaatttctatcaactgcaaatatttttgtcatgtgctatactgttaattaaactaataagctatcgctaatattcgagcacatataactttgttactcttgcatggtgatgtttaggttgtctccatacggttcatcttttatcaacatatttttttattgtatttaggtgtttgtttctcatttatgtttataacagtatccgcggctttgccgcgggggtacatcctagttagtatagagattagagagggggccttgatgaatggtagtactccgtattaaggatttggtactagatggttttaatcacggcttgggacgcgactcgcccgctgcgtgcttgtgctcccgtacgcgtggccgatgcagcaatgtgaaacttcgaacctgtgttgttgtgatggctacgacgaagggtccgtttagcggagatgcacttgattggtctagcttctgaaaatttaagttagattttttagattctggcttctaatttatttttttaattctataacatcatcttaaaatttagattaaaatctagactgtttgaaagagcttctaatcaacttccactatgtgcggctcgcggctagggctctccatgcgaggcgcaccccctgcctccttcttaaggtggatatcgccaaggcctttgacacggtcagttggccgttcttgcttgaggtgctcacccatctagggttcagttagcgctggcgtgattggatttctctcatccttggcgcctcctcttcccgggtgctgatcaatggggtgcaaggtcctcgtttccctcaccggagaggccttcggcaaggagatccgctctctcccatgctctttattctggtcatggatgtgcttaacgcgatgctccgcaaagcctctgactcaggctggttccttccgctcaacgatcgtgccttgcgacaccacgcctccctctatgctgatgacttggttctcttcctctccctggttcgtcaggatcttaagttcatccagggcatcctctctgtctttggtgcagtgtccgggcttcgcaccaactttgccaagtgttcggttactccgatgcgctgttcggctgaggacctggagctggttcagtcctgctttccctgctcgatctctgattttccttgttcttatctcggcattccgctatccgttcgcaagttgccgagggcggccctgcagctgcttgtggataaggtctcccatcgtcttcctccctggaagggacgactcaccactctgggcggccgctttgttttggtccagtctgttctcctccattccggtccatgtgtctatggcgatcggccttccagcctgggtgatcaaggccattgacaagaagcgccgcgccttcttgtggacgggcacggactcggctcacggtgggcagtgccgggtttcttcgatgaatgtctgtcatcccagagctttcggtgggttgggaatttctgaccttaggttggtagggtttttcctgtgtgttagctggctttggctccagcgctcagggcatccctactgggacggcctaaaggccccagccgagcgagccgtctctgacatgtttgaggcgtccaccttcttcgtaccaggtgatggtgagtcgattcttttctggtctgaccaatggatctgcggctactcagtagcttccttggcttcggatctcctcttcattgtgcccccgcatctacgtggttcgcacacggttgcttctggcctggcaaaacaacgcctggatttctaacatccgcggcaccctcactgtcccggtcatctcccaatttctccttgtttgggattgggtgctccacattcagcttacaccgggtgtcggggatcgtcttgtctggcattggacgagtgaccagcgctactcggcgcgttcggcgtaccaggcgttcttctttgaccagcactcctttgcttgtgccgatcttctctggcacgcgaagggccctgctaagtgcaaattcttcctctggtttgcatttcagcagcgctgttggacagctgatctcctccagaagcgcggcattgatagccactcggcctgccccttttgcgctcaagagcttgagacggcgaaccacatcctccttgactgcatgtttgctcgtcaggtctagttacgggtgttgtcttctcctggctgggctgccctctctcccctccgtggcagctggctgcaggattggtggccatcttctagggcatgtttacctgatcatctgtcacgaccggaattaacccaacgggcgttccttacgtgcgtgtattattccttgtcccaggaggcaaggtacaccaaaagttgatacatttcagagtttatcaagcggaagcgtaaatagttaatttattacatgggcggcgaaggcccagcacacacaaagacaaacgggaaacagcggaagactagggcgacgaccacaggcgcttgacggcaggcacgagctagacaccaaagccttcatcatccaggggctcctcttctgggtttgggaaaaattgagcaagactgagtacaaccaccgtactcaacaagacacacccacaagtgcaggataaatgcaagggagtacaagggggttataatataaaagggtagggtttacagtaaacagcattaaaagacacttagttgctcaaagctattttgtaaacacgattccagagctatacaatattattaatcaaggccgtgaacccacacgaacctgccttaacccaaggcctacgatgattcagaccgaactggcaacccgaccctgggtcccagctcgtcccaagccaacccaggccaaccattctacattttagttgttaagcaggttttaagaattaaaacactaacttgggtacattgctcggcttgcccataaccgcgggcgcggctattcgaatagattatactctgatcagaggtgtacatctttacccacaagacacattttcctcacgtgtaaccacgtgccacataccaccacggtatacggacggaagacgtgacatagtttgcaacccatcctagccatagacaagagtactgacccaaccccacatacggccggaacccccgggacaggtaggcaggactaagcccctagcagcaggacaccggccctgtgccatgacatctcgactaccgggccgcagctcgtgtagccttcatttgtcctagagatgtccatcgacccccgacttcgtccatctccatccgtgtacttttgtttataaccagactgagccacaaactaagccttacccactagacatgtggaagtacggtagtgctttgcaacaaaggcccaaagaccggtctttatatggccgaggtgctactatcaaaaccatgcaccccgagcccaacctaaaaccattttgaggattttgaatagagggggaggtgtgaatccaattccacaataatccaaccattccatagtgtccaggtgatatgaatatcccaaagtctagagttgtaaaaccacctaatgttgcctaattaaccagcgaagcatctacctaaaatcatactagtggtaccatgagtagagtgtccactagttggggttttgtttattctagggtgaacaaggaaataataacaataacaataataaggtcataacaaaggtaaataggcatggctaaataaaacagtgataacgcgggaatttaaataaagcgataatgcaataatttaaatcaacataattttataaactgggattcaatatgttcaaggatgatgtgacttgccttgctcgctttcccaaacgtcggcttcaacttacacgaagagcggatcttccgaagctgcagcgtctacacgaccaacggaaaagaaaaggcttttactctaataaactccatataacaagcaggaacaaagcacaaaaatgggttcttgacttcttaaggaaaaattagagacttgaacggtccaattccgagttcaaatggccaagttatggccatttgaagtttatatgctctttaaatgaatatttgcgaatttcttcatttaaattttaattttaaaagggtttattgcgtcagccgagaggagggggcgcgcggaccgggtccacgggagtggggcccacgcggcagcctcatggtccacggtggaccgggtgcactcgggctcacaccggccggcgccgtgggtcccacacgtcagccgcacccgagggcgcgggcggctgacggccgggccccacgcagcagccgctcggtgcgcccgaaggcggccacgtcggcgcggccggcaggaggcggcgcgcccgcgcccctatggtcactggcggcggccatgggcacatcggagcggcggccgagagaggggagggaaagggggaaacgaggcggcggtcctcggctcaccctaggtcgaaggcgacaacgaaaaaggcggccggagcggagtaaagcggcagcgcggctcgggtcgacggggtcgacggtgttccggcggtccgcgggctcggcgagggggtggacggggtcgacggcggtgtggcgaagccggaggaggcgacgcaggggcgggagacggtcccggcgagcggagaaggccggccggaggtcgtcggcgagggaggagagagagagcgacggcgcgagctcgattccggcgaggaggaagggcggcgagaggcggaaacggacggaggaggtgcggggagggtttaaatagggttggaagggggagagagcggccggcggggaaggaataggcgcgggaggtccggccgccatcaatggcgccggcgagatttgcgggggcaaatccgcccgtttgaacgcgagagagagagggaaaaatgggggaaaagggagaggggatcacggggagtgatttccccctctttattgcacgcggggacggcgggaggcggcgggattcgcggcggcggcggcgctagggcgcgggcgaggcggcgggagcggcgggaggaaggggatgacgggtgggccccacccgtcagcgagggtggcgggtggacccgcccgtcaacggcgcgcgcgcgaggagaggccggatgggccgcggggagaggagagggagggggagggagatgggccttcgccgcccatgtaataaattaactatttacgcttccgcttgataaactctaaaatgtatcaacttttggtgtaccttgcctcctgggataaggaataatacacgcacgtaaggaacgcccgttgggttaattccggtcgtgacatcatctctgtgccagcttcgactccctagtcctcctagtctcatggcaactgtggaaggaacgtaactccagggtctttgactctgtgctctcttcggtcgcagtagtcctagagtccatcctttcagagggccggctgtggtcgttagcggccatcgcttcctttggggaattgttgggagcgtagagtggctctgctccctcccgctgtttggagtagagttaccgtcgtttcgagtttttttcctttcctttctttgttttttatctttgtttttcttccttcctaggcataagccggtctggctgagtgtgtcgtgtatcaatactctattcttctaatatattgacgtgcaattcttctgcgcgttcgcaaaagaaagagcttctaattctaggagaaaatagcatgagctagaagctccccaaaacagattcgaagatgcggtggcctcctctttgtgtaacggtggagaccaacttcagcccccgacgacgcacgcagagcaaagccaaggcacgacgaaaatgtaggtggtgggttacggggaagacgcggtggaggcagcttcgaatggcaaaggcagcagcatccgatggatattgcacggacgcatagcatgaatgtagaatggataggatgacaaaatgaattcgcatctcaatggtaaacttcaaaaattgagcgatatttttttaaaaaaatagtatggtaaatagtaagaatttttcaataattacttactatatatttctaataatataattacttagataccgtatgaacccgcagaagggatccacggtacccagcccattgatctgctaggcttcatcagtcatggtactgccaccagacctggccaccatcagaggcatggggcagcaagtttttttttcttcgaacgatcaggccgttgccgacgttttacataaagaagaagttgttttattttaaagagaaaacgagaccaaagcttacagtgcatagttaattagggaaaactatgcgaaaaccacaactattccctgttataattatgagcgcaaccagtgggattataagttatgtgattaatagtactaactataaaagtaaattacaactatcgacggggaatacccgtagaccggatatagagggtactggggtacgctggtacgaggatctacgtagtacgacatcaagcagacaaaaaaacaaagattatactggttcaggccccttgataggtaatagccctaatgtcacgtcctgataaattcatcccgaattaaaaatcattctctaaaaggaataatagaattaattaaaattcgaaaagaaattggcaaacactaaaatacgtacaagaaaaattcaaatgtgacccggagaatttttgttaaattctccttggtctaaaaggagccctcaaattttagtgggattttcagagcacaaataataattgagaagaaataaacaaagttgaaaaggttttataaaaagaaaaatcctaaaagaagttcttttcccccccccttccctcttgggccggctcggcccacttctccctccctctctctctctcctcccccgcggcccatctgtcttcccgcgcgcgcgcgccgttgacaggcgggccctcccgccgatctcgctggcgggtggggcccacct

SEQ ID NO: 17393 - DNA, 37046 bp, Oryza sativa
cgtggggaagaagctagacacggtgcagtgcagcgacgaagagaaagtcatcttcgccgcccaccagctgcaggggcccgcatctctctggtgggaccacttccaggctacgcagccagaggggcagccgatcacttgggctcgcttcaccgccgctttccggagaacccatgtgcccgccggagtcgtggctctcaagaagagggaattccgagagttgaagcaaggcaaccgctccgtgatggagtatttgcacgagttcaacaacttggcccgttacgcccctgaggatgtgcgggaagatgaggagaagcaagagaagttcttggcaggaatggaccccgagctgtctgttcgtctagtctctggggactatccggattttcaacgactggtggacaagagcatccgcttggaggccaagcacaaggagctggaatcgcacaagcgccgcttggcgaacttccgcaatcagcagggtgctaaccagagggtccgctacaccaatccctatccagggggatcctcctcgcaacagcaacaacagcagcagcaacctcgcccagcgccccgacctcaattcgtggtgcgcgtcccacagccgcagcagcagaatcagcaagggactcgtgcatcccgtcctcctacgccagctgtgcagcccgttcaaggccgcagggacgcttcaggtccgcagcggctgtgcttcaactgcttcgagcccggacactttgcggataaatgcccaaagccaaggcgtcagcaaggccaagcgcctccccgctccaacaacggcgggaaggatgtcattcggggccgtgtgaatcatgtgacggccgaggacgtgctgacaactcccgacgtcaccgttggtacgttcctcgtccattccatccctgctacaattttgttcgactctggagcttcccactcgtttatatctgtgccattcgtggggaaaaatcagttgggggtagaaaggcttagaaaccctctgctcatcaccacccctggaggggttatgacagcaaagtattatagccctgccgtccctatagaaattcaggggattccttttccctcggatctgattctgctagacaccaagaacttggatgtgatccttgggatgaattggttggcccaattccaaggagtagtggattgcgcgaggcgcactgtcactctgtaccgaggaccagaacaaccggttgttttctttgcacccccaacctctgtcagaagttcaaaacttcatcagatagaactgtcagaaattcccatcgtcagagagttcggagacgtgtttccggaagaactacctggtatgccgcccaagcgagagattgagttccggatagatcttgctccaggaaccactcctctgtacaagcgaccctaccgtatggcagcaaatgaactggccgaagtaaagaaacagttggaagagttgaaagaaaaggggtacatacgtccgagtacttccccatggggtgctcctgtgatttttgtagagaagaaagacaagacgaagaggatgtgcgtcgactacagagctctcaatgaagtcaccatcaaaaacaagtaccctcttccccggatcgatgatctgttcgatcaactcaaaggtgccactgtattctccaagattgatctccgttccggatatcaccaattacgtattcgtgaagaagatattccgaagaccgcattcactacgcgatatggactgtatgaattcacggtgatgtcgttcggcttgaccaatgctcctgccttcttcatgaacttaatgaacaaagcgttcatggaatacttggataagttcgttgtggttttcatcgatgacattctgatatactcacaatcagaggaagaccatcagcaccatctccgtctggtgttgggaaagttgcgggaacatcaattgtatgccaagcttagcaagtgtgagttctggttgtccgaagtcaaattcttggggcacgtgatatctgctaaaggagttgctgtggaccccgaaacagtgaccgccgtcaccgattggaagcaacccaagacagtcactcagattcgcagtttcttgggtttggcaggatactaccggaggttcatcgagaacttctccaaaatcgctcgacccatgacacagttgttgaagaaagaagagaagtttgtgtggagcccgcaatgcgagaaggcgttccaaactctcaaagaaaagctggtttcctcgccagtgttaatcttgccggatactcgcaaggatttcatggtgtattgtgatgcttcgcgccaaggattggggtgcgtgctcatgcaggacggtcatgtggtagcctatgcttcacgtcagctacgacctcatgagggcaactaccctacgcatgacttggagttagcagcggtggttcatgctctaaaaatctggcggcactatctcattgggaaccgctgtgaaatatatactgatcacaagagcttgaaatacatattcacccagtcggatctgaatcttcggcaaaggagatggttagaactcatcaaggattatgacgtgggaatacactatcaccctggtaaggctaacgtggttgccgacgctctaagtcggaagagccattgcaatactctcaacgttcgaggcattccacccgagcttaatcaacagatggaagccctgaacctaaacatagttggtcgtggattcttggctgcgttagaagccaagcccaccttgctcgatcaaatccgcgaggctcagaagaatgatccggacatgcatggactcctcaagaatatgaaacagggtaaagccgctggtttcacagaggatgaacacggaaccttatggaacggaaagcgggtatgcgttccagatagcagagaacttaaacagctgatacttcaggaagctcacgaaagtccttattccattcacccgggcagtaccaagatgtacttagacttgaaggagaaatactggtgggtcagcatgaagcgggaaattgcagagtttgtggccctatgtgatgtgtgccagcgtgtcaaggcagagcactagcgaccggctggacttctccaacctctccaagtaccagaatggaaatgggatgaaattgggatggatttcatcaccggacttccaaaaacccaaggtggatatgattctatatgggtaatagtggatcgattaaccaaggtagctcgattcattcctgtgaagaccacctatggaggacacaagctagccgagctctacttcgctaggatcgtgagtctccatggcgttcccaagaaaatcgtatctgataggggaagccaattcacctctcacttttggaagaagctccaagaagagcttggtacccgactaaatttcagcaccgcgtatcacccgcagacagatggacagaccgagcgtctaaatcagatcttagaagatatgcttcgcgcatgtgtcctggacttcgggaagacttgggataagagtctcccctatgccgagttctcctacaataacagctatcaagccagcatacaaatggcaccttatgaagcgttgtatgggcgcaaatgccgaacaccgctattgtgggaccaagttggagaaagccaagtgttcgggactgatatcctgagagaagctgaagctaaagtcagaatcattcgggataatctaaaggtggcacagtctcggcagaaaagttatgcagataaccgtcgccgtgatctggaattcgcagtggatgattttgtgtaccttcgggtcacgccattgcgaggtgtgcacaggtttcagacaaaagggaagctcgcacctcggtatgtgggtccctttcgtatcactgctcgacgcggagaagtcgcttaccagctggagctgcccgcctccttgggcaacgtgcatgatgtgttccatgtgtcgcaactcaagaaatgtcttcgagtgccatccgagcaggccgactcagagcaaatcgaagttcgcgaagatttgacgtatgtggagaagccagtgaaaatcctggacaccatggagcgcaggaccaggaaccgggtaatccgtttttgcaaggtccagtggagcaaccacgccgaagaagaagctacttgggagcgtgaagacgagctgaaggcagcccatcccgatctcttcgccagttcttccgaatctcggggtcgagattccgtttaaggggggtaggtttgtcgcgtcccaaatcgactctaaaattcatcctcgaaattgtgcaaagaataattaaaattcatgtgaaagcctccaacaattaaaatgtgcaaagataaaagtcaaatgaggcttggaggatttttgtatatttcctaaaagcctaaaatgcttaaacaaattttagtggaattttcagagcacaaataataattgaaaagaaacaaacaaagttaaaaaggttttataaaaagaaaaccctaaaagaagtcctctttcccccccccccttccttcttgggccggctcggcccagtccctccctctctctctctcttcccccgcggcccatcggcctccccgcgcgcgcgcgccgctgacaggcgggcccgcccgccgctctcgctgacgggtgggacccacctgtcatcgccttcctcccgccgcgtcctccgccgcgcccgtgccctagcgccgccgccgccgcggattgcgccgcatcccgccgtccccgcgcgcattaaagagaggggaatcattccccgcgatcccctctcccgtttcccccgatttcccctctctctctccctcggatccgtccggattcatcccgtaatcctcgccggcgacatctatggagcccgagatccccgcgcccgtttccttcctctccggccgcgttctccccctctcggtgctatataattgctccccgagctccgctcttccgtttccgccgctcgccgctcgctctcgccgtcggcatcgtgctcgcgccgtgctcctctctctccgccgtcgccgccgagctccgttccgccgccgccgccgctccggtcttcctccttactcggcgacacctccatccgcttcgccgagtggttgccgaccccgtccgccgctccgcttcgcccgccgaccgccggagcaccgtcgtcatcgtcatcccgagccgcgccgccgctttcctccactccggccgccgttctcgtcgtcgtcgttgtcccggggtgagccgaggaccgccgttcgccttcccccttccctcctctctctcgggcgccgctccgccgcgccggtggtcgccggcggtgaccatcggggcgcgggcgcgccgctcccgtcggccgcgccggcgaggccgccctcgggcgcgccctcgcggctgccaagtggacccggccgtcagccgcccgcgcccgcgggtgcggctgacgcgcgggacccacggcgccgaccgccgccagccgcgtgcgcccggtccaccgtggaccgtggggctgacgcgtgggccccacttcccgtggacccggtccgcgcgcccgctccctcggctgacgcaataaataggatttttaattgaaaattaaatgaagaaattcgcaaatatccatttaaagagcatataaacttcaaatggccatatcttggccatttgaactcggaattggaccgttcaagtctctaatttttccttaagaagtcaagaacccttttttgtgctttgtttctgctgttatgtggagtttagtagagtaaaagcctttttcttttccgttggtcgtgtagacgctgcagcttcggaagatccgctcttcgtggaagtcgaagccgtcgtttgggaaagcgagcaaggcaagtcacatcatccttgagcatattgaatcccagtttgtaaaattatgttgatttaaattattgcattatcgctttatttaaattcccgcgttatcactgttttatctagccatgcctatttacctttgttatgaccttattattattgctattgatattaataccttgttcaccctagaataaacaaaaccctaactagtggacattatattcatggttccactagtataaatttaggtagatgcttcgctgattaattaggcaacattaggtggttttataactttagactttgggaattctcatatcatttggacaccatggaatggttggcttatgttggaattggacacacacctccccctcttttcaaaacccccaaaatggtttaggctgggctcgaggtgcgtggttgggttttgttagtcgtacctcgggtactataaggattaagctcgggcctctgttgcaaagcactaccgtacttccacatgtctagtgggtaaggcttagtttgtggctcagtctggttataaacaaaagtacacggattggagatggatgaagtcgggggtcgatggacattctccagggcaaatgaaggctacacgagctgcggcccggtagtcgagatgtcatatggcagagggttggtgccctgctgctagggggctcagtcctgcctgcctgtcccgggtgtcccggccgtagggggattgggtcggtactcttgtttatggctaggatgggttgggagctatgtcacgtcttccgtccgtataccgtggtggtatgtggcacgtggttgcacgcgaggaagatgtgtcttgtgggtaaagatgtacacctctgatcagagtataatctattcgaatagccgcgccctcggttatgggcaagccgagcaatgtacccaagtcagtgttataattcttaaaatttgctcgacaactaaaatgtggaatggttggcctgggttggcttgggacgagctgggacccagggtcgggttgccagttcggtctgaatcatcgtaggccttgggttaaggcaggttcgtgagggttcacggccgtgattaataatactgtatagctctaggatcgtctttataaaatggctttgggcaactaagtgacttttaaatgctgtttactgcaaaacttaacccctatattattatccccttgtacccccttgcattaatcatgcatctgccggtgtggcttgctgagtactgtggttgtactcattcttgctcaatctttcccctcttcagtaagagaagctttggagaagatgtcttaggtggagtcctggcttataccccagttgagcgcctgtgaagatggagccgtaggcccgctagtccgctgctgtttatttttgattgtcaggcctgaagcgcctttgtaataatgtaaatattatcgatataataaagatgtgtcttttatatcatgtttgtgtggtgtaccccggcttttcctgggacggggattaatacactagcgttcgggaaaaggcaattttcccggtcgcgacacctaatccagttgatatgggattatatgatggaaaccacagattacaaagggaattgcggaactcgatgataccgacgagattgtaatcgaacaggttcaattagatctcccggcgacttggcttctgtaggcttcaactccgtaggctgtggtggatgtgctggctacgagattcgatgccttaggtccttccaaggggtcccttttatatcgcaggtcaaccggtctccaagtaggactcggagacatcggactcggcacgatacaatgacgacctagttctgtccgagtaggagtccttccatctgtgaacctcgtgatgaatttccttaacgtatgccggaaccgtccgtattcgcgcaggcatacaatatcgatatgtgacgtatatcgaagggtagagggtataccttacccataaccctgacagtagccccccgacttctgcttaaatgaacttgtgtaaccgatcatgacttctgatgtcgaggttgttgtcgttctcggtgtgaggactgagaaacgaagagtaatcgacaacgccaagtgaagctcaacggtcatgagtgaatttaaattaaagtccgacaaactgccgcacgtaacggacccagaaatttccggcggccatctcttcttttccttggaattcgcaccatcggaagtgtgactataaaagggagttttggggatcccttttgaagtccgcctgttgtgaaaaaactctccaacctccaagcattcctcgtcttctccgctcccgcaaaaaccctagctagctcatttcggtcccttctccggcgatctccagcggcaatggatctcgacaagtctacctccaccagcgcgtcgctgaagaagctacagaaggatggcgcccttcccggtcgcgggaccatggagagagaagtaggaggtactgaaccccagcctgtcctgggtcacatggttgcgatcgaggactatattctctgtggttttcttctccgccttctgaatttcttctcttggtcttgaatttctacggcctttccttgctccatttgaaccccaattccatcgccttcctcagtattttttcgcatcgttgtgatgactacattggggtacagccgtttcttggtcggtttccgactccgggatggcctgaagtcacgctatatccccttccagcgcccttcttctcgtagcaaatggcgggtgaggtggttctatcttcagatagaaaattctgatccagtcttcattgttcctgaggaacaaccagacaagattttcgtcttggaccgcaaaacctcccttgaccccttctcttcaatccttcatcgatgccatcgatgacctccgagtatgaggtttgtcgaggtatgaagtcgctgccgacttcattggtaggcggatccagccgctccaggctcgagcccacccagcctttgactattctgagtcggaggacgcgacccgggtttctcctcagggtatatttcttgtatttaaattgacttccttatgtgcgtgttcctcctgacttatcgaattctagttctcgatctacaggtttgaatagcgaaaccgtggagtgctgcgtcggccaattgatgatcagcggcccaacaacggcgagcaacgttcccgtcccctttgcgagaagggggcagccgaacgcgaaaccgccatcaatgtaagtgtactcggtagcccttttgcatttttcttccaagatcgcattgtgacttcatgaagtgtaggctctccctctgactgatatcatcgggccgctcgtggaccatcaggtggcggcatcgctgaaggagaaagtcgccaaggaggcatctgatgttgttgccgctgcggccacaacgagtggcggcaacgttccgtaaaagggaaggcaattctcctctgtgatcggacatcgtcggaggacgcccaccccctcggtaagttctcctggtccttcatcgcgtagtcgggaatcttccacctcatatcacgcccgttatactccaggcctcggatgcgtctcccccgcctccatgacggcagcggcttgtgacgcttggcgagaagtaagtggatgaactttgaggttttatcacttcatcgagctcttgcagcatgtctcaattctagcctttcacagggcggcgcgggcgaaagcggcgcaagacgggtccggagggacttccagcgcgtctcctgctatggcctcgacagatgtcgtggtcgtacccaggagccacgaggtgacgccgagcggcccagccagcgatctcgcggcaggtcggggtccgccgactgccgtcctcacatgggaggagctccaggtcgagatagggcgcctcctcgaggcttgtgctcgcggtgttagctgcgagatcgcggaggcgagggcggtggcggcgtcgtcggcgaatgagcgcgccgaccggctgacgcgtgtctggcggaggtacgcgaggacctccagaagatgagggaactggtggccggcaacgagcgacaatggcaggggctcgagcatcgcatgtcagagctcgagaacaacttgtcggaaatccgtggctcgttgcgggtcacctacactggtctgcaccagctcgccggggagtgcggtatcaagtccaccatcccggcgaatcccaatgagttctcgctgacgacttcgcttgcggagctagcgacggcgatggaggcgatcccctccaagcacgcggccaggatcggagaggagacatctaacgggatatataccggggcatgccatgtccttgcgtgtgtgaggttggcgcatcttgaactcgatctccagaagatcttggatcagggggcggccagcgacgcgcgcaaggatgtgatggaagaagtcggcgatctgggggagtccctcctcccgctttttgaagagtaggatttcgacccccttgtactctttagtcatgctttgtaaaaccctcattagttctaaccgcctttgtgcgtgcagtcatcaccttagttttctttagcattttgatctcgagtactttgttgtcgtttgtagaggtgttgatgtcgaggatgtccagcagcgcgggcagcctaagttgccagtgattgttccggcacttgcgttcgagccacatgtgccggagggcgatgtagatcaaaattcgcctgtggaaatgggcatggcgacgactcccttaggttagttatctttgttttcatctcctttactcttccgtctggatcgacttgatttgttgtattctcgggagagaagagcagtttgacttagtcgtttccatgcagagcagacctcgagagtgcgcttgctgaccagcatcgtcgcatccagtattggaggacgaagtttgaggtcgtggaactcgagaggactatgctggaagtgaagaaggaccaggccgtggagacactccgaggtcgtgaggtgtcattcaactcgtatctgaggagttgctgcacatccatgtcaagagtctgtagagagctccgagtaccccgtggggatcccgaggaatcggcggtcggatacatctcgtggctgaatggggcctgcgcccagctcgaaggcatcggccagcgtgtcgacgaggccctgaagcaggagtgtcatcgatcaagccgatatgccggggggcatgtattggcttgcatacaagatcatcgtccgtagctgcacctcgagttcctccacaaagggttttctcgttctcggagaactcctacggagatagacggcctggcgaagtcgatggcgccactggcggagaaggtcttccagtcatggactggcgttggtcttcctggtagtgtccgtatcctgtgacaaatgtcttagggaaaagtgtaatataattttggatttttatggaattgtaagaagtacttgtgaaatagaaaagaaatctatctaactaagctttcttactctggacgtagcgtgtaagagtgtcttctcactttacgacttcgatcagtcgtttgagttatacactctccctagcccccagccttgtcatcggagaattcttctcggaagatatggctctcggacctctgacctgcctcggttgaacaagcactgatcctagcccccagccgtgaggttggaaaattaatttccgattacacagcttggttaatacgtacggtgagaactcttacacgaccagatcttacatggtcttttgtcttatcttacatggatccgacaatgccttatcggctctaggcgtccccagccgaagttcctttaggttcctcggaggccttgtcaagacggcgtaaagggacatgaggataggtttcaacgctaggtgtcatctgggtaagggatcatcaggaaggaatactttgattgtaatatgtacctgaaaataggcttaattgaaactgtaagatgtcttacaagtatggatactattgacttatacatagaatttacataattgatcaatgttccaagaatatgccaactcacgaccatcgccgtctgcaatcttgaatgcgcctggccgcaaaacttgtgtgatcgtgtacggtccttcccatttgggtgagagcttgtttcgccctgcttggatttgaaccagtcggaggacgtaatcgccgatcgaaagcgtgcgtgctcggatgcgcttctcgtgataacggcgaagggcctgttggtagctggctgctccaacagcaactcgttcgcgatgttcctcgagtagattcacatcatcatttcgctgctcctcctgatcctcatcggagtacttctgtactcgtttactttgatgtcgtagcttggtggggagcatggcctctgaaccgtacacgaggaagaagggtgtctccttgttagacgttgtcggtgtggtacgcacggcccatagtactgatgggagttcttcgacccacttcttgtcatgtgacatgagcctgtcgtagacgcgggtcttgattccttgtagtactatgccgtttgctctctcgacctatccattgctctgagggtgagaaactgaggcgaagcagatcttgactcccagcctgatgtagtaatcctggaaatcggcactgatgaactgggagccgttgtccgttatgatacggtgaggcaatccgaatatgcaaaatatccctttgatgaatttgatggcgttgtcggccttgatttcccccgtgggtgtcgcttcaatccacttagtgaatttgtcgatcgccacgaataggaacctgtagccctatcctcgtgggaatggcctgagtatgtctagcccccagcacgagaacggccaagtaagagggatagtctggagtgcttgcactggtagctttgtgtgtttattgtggaactgacaagcttcatactgctggaccatgtcgcaggcgtctttgagggcggttggccagaaaaatccttgtcgaaaagcttttccgaccaatgtccgaccggcggcgtgtgacccacagatcccttcatgtatgtcgaggaggagatgtctactgtcgtcggacgagacgcattttaggagtaccccgtttggtgccttcttgtatagatcgttgccgatcatacagttgatttttgctttatgggttatttttttggcttctgcgtcgtcctcgggcaactcttcgctgcctatgaatttaatgagtggggtgcgccggtcgtctgtggtctcgatatcggcaatggcgcgctctacctctgtagcccccgagctgatgttgagggcgaccgggctatcttcgccgcttgcctctttcactgatgggcttgtcaggacgtccagaaaggtaccaggttcgagtggctctcgtctggacgcacgccgtgctagatcatccggctcgatgttatccttgcggtatagatgtcggacctcgatcccatcgaaccttttttccagcttcctgacttctgcgagatacttggataactcggggctagagcatttgtaatctttatgcaccttgttcgcgactagttcggaatcccctttcacaaccagtcgcttgactccaagtgcagctgcagctcttatcccggcgagtagtccttcgtactcggctgtgttattagtcgccctgaagttgaggtgaattgcatgcttgaattgatcttccgaaggtgatgtcaagatgaatcatgcccctgctccttggctgttgagcgcgccgtcgaacgccattatccacgtttcgttgtcgatttggttgtctgacctgttatcaggcatagtccaatcagctacgaagtcagcgagtacctgggacttgatggctgttcgtggcacaaagtggacatcaaactggcttagctcgactacccatttcgcaatgcggccaacaacgtctttgtttctcacgacttcaccgagagggaaggaggatacaactgtgaccctgtgggcttggaagtagtggcgtaactttcttgatgtcatgattaccgcgtagagcagtttttggatctatggatatcttgtgtttgcgtcgtggagggcttcgctgacgtagtagactgatcgttgcaccttctctctctcgacaacaatgacagtgctaacggaatatggcgtggcggcaatatagaggaataattcttcattaggttggggggcaacaagtacagggggatttgataggtagcgcttgagtgcaatgaatgcctcttcggcttcctgtgtccatacaaatttgtcttgcttcttcagcagagcgaagaaaggttgtcctcgctctcccatcctagcgacgaacctgcttggtgccgccatgcatccggttagtttctgtacttccttgagtcttgtaggcgacttcatgttctcgattgccttgatcttctcgggatttgcttctattcctctgccagagacgaggaaaccgagcagcttgcccgatggtactccgaacgtgcacttctctggattgagcatgaggcgatatcgtccgaggttgtcgaacgtttcctgcagatcgtcaatcaatgagtcacttgtcctggtcttgacaacaatgtcatcgacgttggcctcgacattgtttccgagttggtcgctaagtgcgccctggaccgtgcactggaaagtgtttcctgcggttattagtccgaacggcatcttaacgtagcagaataccccgaacggcgtaatgagtgccgtcttctcctcgtcctctttcgccatgctgatttggtggtagccggagtaagcgtcgagaaagctcagcaactcacaaccggctgttcagtccaccagttggtctattcgaggaagagggaagtgattcttgggacacgccttgttgaggtcggtaaaatagacacacattctccatttcccgttgaccttccgcaccatgactgggttggctagccactctggatggagtacctctctgataaaaccagctttgagaagcttgtcgagttcttctcgtatggcttgttttcgatctggtgcaaatctcacgcagtttttgctttactggcttggcgtccggtcgcaccatgagtttgtgctcaatcacctccctggatacccccagcatgtcggacggctgccaagcgaacacatcagcattgtcgcggaggaaggtgatgatcgcgagttcctatttctcgcctagtgatgccccgatcttgacggtcttgtcagggttggcactggagagtggaacgattttgattgcaccgtccggtttcgccgtcttgtttgttttgctcactttcttgggtggctcagctgtggtgggtgggctgggcgtgtgctcgaccatgtcgaggctccgcttgtcgcattgcactgccagcttagcattcccttgaatagtgattgttcccttcggtcccggcatcttgagcacttgatacgcgtagtgagatgcggccatgaacttcgcaagtgcaattctcccaatgatagcattgtatgctgtatcgaattcagcgacatcaaaggtgatctgctccgttcggaagttatttgcttggccaaaagtcataggcaacgtaattttgcccaatggtttggacgatgactgaggagtgattccatggaaaggttgatcggtgggtgtcaactcgcttcgtgggatccccatcgcgtccaaagtgctagcgaagagaaggttgattgagctgccgccgtcgatcagaactcgcgcgaccttgatattccgaatagtgggttcgaccacgatcggatatcgccctgggatgacagcagtcttggggtggtcctcttctgagaattctatcttctgctcagaccactttatcttgggcgcagctccctgccatgttgaacagacttcacgttccactttcttgtattctcgctttgaggagtatgctgtggaacctccgaagatgtgcgagacatggagatcagagtctgggtatgctgagtccgattcctgagtagccgccttagcgtccttctcggccacacgtactcgcttgcctttttccaatgccatgtgttttgcgagcgactttttgaagatgaggcaatcttctagagagtgtctgtccgacttgtgtatagggcaccatgttttcttcgtgtcgctgctttgtgggtctgggcgcttgggagggtccgcgtattctgttgcgagaacttccgcttgagctttccttttcccactcttgcgatttttcttcttgcttgactcaggtgcgtccttggctggtttcttctctcctccggtctttggtttgtcgttcttgcgtctcagtgcgtcgtccgcgtgagcacatcgatcgacaatttcgaataatctccgagtagtcgtgacacacctcgttgccaactcctgggtagtatagcgatctctgacaccggacttgaaggcgcagattacagaagcgtcggtgatttcggggattgtatttctgcactcattaaagcgttgaacataatccttcaaggattcacccgggttttgtgtcaacgcatataggtcgtcttcgatcgtatggcgcttgtaagttccttggaagttggcaacgaactgctgccataggtctgcccacgaagaaatcgagtagggcgggagatgcatcagccatgaacgcgcagagcctttcaatgcagttggcaaataattcaccaacacgttgtcgtccgctccggcagcgtagagtaccgtggagtaaacctggaggaattcttctgggtcggtactcccatcgtacttctctattgctcctggtcggaatctcttaggccatcggacatcacgtagcgaacaaccgaaagctctacacccagcgctgggggtggtgggttgtcggcgatcgtacgtccttcgtggatgtctatctgatgatgaggatgaggaagatgacgacgatggtgatgggtcgcttggttgcggtgtatgattacgaggacgtcggccgggttctcaagaatcctgtcgtcgtctcccattgttgtctcgacgccgatctccatcgtcgtcgtcattatggcggcgtcctcgaccagtatcgcctagcgcccgccgttcgcgatcgtcgtgatcgtggtggtggtggcggttatcacagtctcggtcttcgctcgaacggcctcctcgttcttcgttatcatgacgccgtgaagagacgcgatgtcgggaatggttctcgttgtctcgtgcgcgtcgcgcctctcggcggccattcaggtgatcgcggagatcgctggtgccgcgaggtggagggatggctcgatgaggcgattcccgctgttcagggttttcgccattagcaccgccagttggtggctgttccgggtgcgctgcagcagcggcctcttcgaacgcgttgctgaggttggtcactgattcccgtaaccgttctgtccaccgtgcgagatcgtcgttcagaacgggatcgtagggggtttccgtcagtattgtgttgacggccctgatgtgctgggccagtgtagtcacttgattctccacttccgcattagcgtgcgctgacgtgccgatctcatcgatagccaatacctcgcgcggcgtactcgttgacgatgagccatagtcttcgagcaggtgcaggactgacggttcgtggggatcgatgtcgattaccccaacgaatcggtctgaggttagcgtcgctccttgttccttgtcctcatcactgatggggatacgtgactgctagaccttaggaggtgacgtcttcacggcgctgagaaagaccttgcagcttgagaggtcgtgattctttgtctagtgaataggacagtagacatcacgagttggagaagtatgctgaattccacgctctttgcaggcacgaatttcagcgtggacattgagaaagacccagcaggcttgcaaggtgtgttttctggttttgtggataggacaccaggaccttgtcacctcggaagtgatcctcgtcggctcgtgattcttgtcagaaagacaaggtttggccgcactaggatccttctcgggctcggatgttgtcgacgttcagttctccgctttggcgggaggatccttcgacatggagtcgtcctgggttgtagccactgcgttctcgctttcgatcattgatggaccagccgagatcggcatcgtggcgtaaaccgggaagacgatttcgccgacttgattccacaccagcattgttgaagcaggaactccttggttgaggttggtgttgacgctgttgtcgacgaagctggatgacatagttgtagaaccctgagcaccaagtccccctacctggcgcgccactatcgatggggaatacccgtagaccggatatagagggtactagggtatgctggtacgaggatctatgtagtacgacatcaagcagataaaaaaacaaagattatactggttcaagccccttgataggtaatagccctaatccagttgatatgagattatatgatggaaaccacagattagaaagggaattgcggaactcgatgataccgacgagattgtaatcgaacaggttcaattagatctcacggcgacttggcttctgtaggcttcaactccgtaggctgtggtggatgtgttggctatgagattcgatgccttaggtcctcccgggggtcccttttatatcgcaggtcaaccggtctccaagtaggactcggagacatcgaacccgacacgatacaatgacgacccagttctgtccgagtatgactccttccatctgtgaactccgtgatgaattttcttaacgtatgccggaaccgtccgtattcgcgcaagcatacaatatcgatatgtgacgtatatcgaagggtagagggtataccttacctataaccctgataacaaccactatgcataaacttgtatggtagatgcaaatagatgcaatatctatttggccggatagatagagtaatatgaaataaagacatgtgaattgggtgaaaatttcttaaaaccctataaattggatgacaaattatcggtctgaatataggatacctcgtactcatactttgagtacaaatataccaaaatatacaagtacaagtatgagagatatcccatatccagaagacacaaatagtaaacaatgattacttactactatcttcgttttttaattagtttttactaatacatttaacggttggctttctcaagcaccaatattttgagcaaaagtctaagaaaagcattccgtagcgacaagagccgcagaaagtgaaaaactaccgtagtgaattaggagcgcaacaaattaaggggtaaactgacgacaaattaagggatctaaggtgaacttattccataccgtaggaggaacccgcggaagagatccagcccagtagagcccaacctggtacttagcagccctgaccatcatcagaagcatggggctgcaagttttccctgttataattaggagcgcaagctgcgcaacaaatgcgactgtaaattctgtgattaagtattaactagaaaatcagcatgtttgttggcgcaccgaccagttttacttttatataagtttaaggatcactgcagcatatgagttttcgtaaaattcgttaaaaaaatcattcaaacatctctatggattttaattcttcgtggaactaatcaaattacagtggggattgtctacagtgttacagctgtagtagcagccgctgacatgtgaaaccggcactgctactgcaaatacagtactgcagagcatccatatccatcaaattaggatagtaatatatggctgaggatggcctgtttaatttttacctagctgtgttcggtactcttcccaactctcctctctcgttttccgcgcgcacgtttttcaaactactaaacggtgtgtttttttgcaaaaagtttctatacgaaagttgcttaaaaaatcatattgatccatttttttaaaaaaattagctaatacttaattaatcacgcgctaatagaccgctccgtttccgtgcatgggagatgggttcccaacaccaacctccgaacacagctagagtacatttctctttacgcaatcttttattagatatttctctttaaccattctttagccaatatttttgttttcaaccagataattttacctttgttacactttggatcaccgtgactattcttaaccgtacggatctcaaatatactagccacttagagtcgcgcgtttgcgcgaccataaaaagccatctttgttaaagattaaggttgccttttttttcctgttgcaactaaaatgatcttggccctaaacattaatacgaagttgcccatatgttacatacatgaccaccgtagtatttctttttttttcacagaaacaatttatactacctatgtttttaataaatgacgccattaacttatattcacacggttgaccatttgtcttattaaaaaatttacatatttctaatttattttattgtgagttgtgttacaaactgaaagtacttcaagcatgatatatatcttatttatttaaaaaagaatttggaagacaaatagttaaatatgtatctaaaagtcaatgatgccatatattaaaagacaaagggagtattgttttacttggtccatgtgtcaaatttcaaaaaaacccaacttatgaaattgaagcccattaagtttcataagtgtctatctgtgttgcttgctctctttcatgctggcaagtacgtgaggagaggcactagaaggctccggagggataatgcagtacgtatttgatcggacggtcaacatttatccaatcatgcatctgatggcctttgttttttagcttacgtggcctaatgtgcttttgagaaagattagttccttcattactttagactagctcctacttgtcaatgaaatcccatagccgtatgtagataatttctttgacatatgacaaattaaaatcatatggataaaagacttgatagtggttcaaggtatcacaaatgtcaaattattcggttcaaattaagtgaaaattagtttaaaggtgatgcaaagcgaacattgataataaagagtagcctaaagtgaaattcactcttacaaattatacttgattttaatttcaacaacttatttttcgttatttttgttaatacattttttttattttcaagcaatatataggacataatagacacaggtaaactacatgcctcaatttttgatgaaacctattacattttgtatttggatgaagaaccatcctagcaaaatccattgtatttgaaaaggctaaaaatcataatattccttgtttttctctctctttttacttctttaactttcatctcctcttctcttttgtatatacatttttaatctttacaaatttttttaagcttctttcatctgtaaaatgtaagtaacttatctatatcttatcacttctatattttagagtttgtctacattattttttccacccctcgtaaggtgggcagggaccaagcccgagggaagcttcacgcctgtgcttgccccgtttcggccgagcaacgtgccgtcgtgccctcgtgaaagcgccgtactcttatcctagcaaataaaaggcacactgttttttttaacaaaaatttgtgtgtacataactatcttttgataaaaatggacatatgagatttagccatatcattaagagtacattttttactaatgatttaatctgtgagtaaaatttttcattggctgcaccctcatacacaggaaccatatattgataaaaaaagtaaatttcagccacatcaatgcctcagaaaatttgacattttgatccaatctcaacttacactatagatggtaagtcatccagccgcaagtttccagcagtgatagataggggtggaaacgagcctagccaagcctagctcggctcggcttgcagtggctcgcaacaaactaggcttggcttggctcggcttggttagggaaacaagcttaaaacttgagctcggctcggctcgtttcctggctcgagccagctcgagctggcttgtaagacttcctgttaaaacacatcttcatatatattttgtaattattaaaaaaagcaagaacaaattattaacatgtaaaattaaaataaatttatggtaaatttgaagttgacaaataataacgccatataaaatgaaataatcgatataaacacaaaatggcctaggctcgcgagccaaaataagcggctcgcgagctagctcggtttggctcattttagcaacgagctgaaaaggaggcttgggcttggctcgtttggcttacaagccgagccaagccaaccaagctcgacccaagcccgagctgagctcacgagcctgagctttttttccacgactagtgatagatatttggtttggtatgtactctaacattgtaagcgactagtaatttcgttgagctctaatggtcttagcagctaattactctctacactaatatgaccagagcaggattatacttttttaatttatttctgcttttggcttaagatggaaaaactaccccctataatccgctggatcagattatctcgcgacaacgtcaattcagtaaccacaccctcctttctttctgaacacacttgctgtcgataaccatccaagacccaactttatttagcccatctcaatcagcaacacaaatgaccctgacccacgatccactcacaagccattgctcgagatttgagcttgaactcttcttggcgggacccaaacagtgcacgaatttcagacgcattgcataatcaaacccccaaaaaggaaaaagccgtcgcctttcaccaagttcgaattatttttcgcctttggagacggcacaaaaggcaagaaaacggaggaggaaaactaggccacgcattgacaggatcttctcccttgtgttcttgctgcttttctgctccatgtcctgctcttggagatggccatggctctggctctgagctgtggcaggaggcagagagggaagaaaggcggcggcggcggcggcgactgcggcggccgccatttccatgtccactaccatcttcctcgccgggtctgcgcctcctcgtttgttcccaatttgctgcctcgttttttctcgctgctgtcagcttgcgtgctggttcctcctgtgctgttcttggctgtgcttgccttcctcgtcttgtttctctggttcaccttgctgtattttattcgctccctgtggaacaaagacatcaacggtgagaccttcgagaggagtagcaacgatcatggcagcgatgctgataaacgccttggagaaggcgttgcagaagaaggaaaggcagagaagaaaactctgaagatttcgtctgaagattgtgctagaaggtttgagatagaagaggtactacatgttaattctgatgattctcaaaacttgcctagtatggtgtcatctgatggttgcctgaactgtaagatgcatactgatgatgaaaaactcatcaaagaggtgactgtctttgagataaaaagaagggaatcgggagctgctattgtctgttctgatggtttgtcacaaaagcgtcagccacgagatatgtcagttgattggtttgaggaagaaactaaaagtggagatatcatcaaatcaggtgattcatctccaactgtactgtcaactttttcatctgaatttcatgatttctctgacaacaatgaagtggtagggttggccacggattttcttgatgtaaacaatcaaaataaagcagtattgctagatagttcatctcatcgtggtatcatggacaatcattgcaaatgtggtgaggaattttcttctgataaggaggctccagcttaccatttatttgaaaattatgattttgttgacaagcatgaaacaaaagaggtggtacttggtgatacagtagtcttgacctttgtagatgatttagccaatgatgactctgaatatagggaggatatttcagaacaaaaggatccaaataatttatcaggattgcttgataacgttgcagatattttttaccagcagcaagaaatacataaggtggttgtttctgacgacaacaagccacctgaagttttgttcctcagtggaaagcaaactgtcagcagttcaggtgaatttagttctcctaatgagaatggaacatcaggatttccttttgattctgtttgtgaagataaaaatggaacagtggcctatcccagcgtagcatcccattataatatcggtattgaagatgacaaatgtgaggatcatactgacaacaacatagaggaggcatcaagtatcgcatctacaaattgtggttctgctgataagcatcagactatacaggtgttgcctgtttgtttagcaaatggagataacattgatgatgttgcttcattggggagttcaatttgtgaagacgttgaagataaagacaacaaaagtaatgctaattgtatttcagaggtgagtacaaaaggaagtttcgcttaatttctgaaaattgtggctgttagcttgttatatatttctgaattttactgctattgtatgtttcaaatgaatttgaaagggagctccacatggaaacggaatgccacttgttaggtccccagcatcatggtggaatttatgtggagttattgatgtgtttgctggatgtaaagattgaattgaggtgagaagatagttcattccaattttcacaccgtgacatcgtttgaattttgaactgagggtactccttttaaaacaaaacaaaaggaatccagctgcatggccaattattttgttgatcatcatctgctgcaccgtgggttcgcacaattgttacttatttattttcttgtcaatattgtctaacacaagagagatttttcttcggtggtttttactaagtatgatactacagtaaaaaaactaaattgttgatttattggggtataatggtattttttttcctctctatatgatttgggttttttatttccctttttttccccaagagactggcgttactcgtgtggaccaccagcctatctcacttaaaacgaaatataccaattttactggaattttgccatcctgcaagtatcatttccttttctcacccaaccccgacatagttcttagatgattgcttgattacaaagaatgatctgtaattttattatcgtcaactctcttcgcagtatttggacatgacacattttctgttgtatgcagatgttggcaggtcatgggtggaactttgggacaacagaaaactttagatgctcatcctaatcctgtgttgacaatgaagaagtatttgacagtttggattgaggtattgaattgtttatagtgaggctgtttgttttgttggatgtatatatttttttgttagattgcctgattagtttttgacatgttgtggttcattggctttttctttaaaagctgagtgctattctttctcaagaaagaaagcttcaacttactgtaattgattttgaaagggaaatggaactggaaatgcttgttgacttgttgtatagtgtatactatatgctttgagaaatatgtcttctacagttgtctggatgtacagaaatctgcctgctacattaaagcctacgtatttttaacaagaaaaaataaggcattttctatcccaaactaatttactggatcacttaacccccctgaattatttaaaaaacaagaagaatttaaaaaaatgttgagatgtaagttacaatgcatataccattctacccaaaaaaaagagagagaaatagcgtcagggagtaaagtaaaatttttttagtagttgggagtgtaaaattagcaaaaacaactaatttaggggttgatgtgtctgaaatagttcctggcgagtaaaatgaactttgtttttctttttaacaagaactaggaaacctgccagatcaatattaatcgacggctgtttcgctgtaagaaaatgattattctatcttagtctaacaacataggcaacttgttctggagatgaataatttaataaccacagtaaaacttcacttatcgtttattggcatgtggtaaagtcaaaagaataaaatgagaaaaactgtagaatgcaagtatgcaacaattaatagtagcattgcatcgtatgtgtcagtagaaatattccccgaagtgattaatcctaaccctatatctgtaaagcaaattaacaacaacaatcatatctctactacttaaaataaaaaataagaggtgcttccatcatccataaaaaaaactggacgataaaaaccaaatataccaaatatgtccgtaaaaaaaaccgcgtggaaaaaaaaaggaaaaaaaccaaacctgtccaataaaaaagggcgaaaaaacgaaaaaccgggcgaaaaaaccaaatatatccgatctagaaaaaatatctgtaaaacaaattaacaacaacaattatatccctactacttaaaaaataagaggtgcttccatcgtccgtcaaaaaaactggaccgaaaaaccaaatatgtccgtaaaaaaaaccaggcggaaaaaaaaggaaaaaaaaccaaacctgtccgattaaaagggcgaaaaaacgaaaaaccgggcgaaaaaaccaaatctatcggatccagaaaaaaccgggtgaaaaaaaaacctaaacctatccgatcccaaaaaaaaaaggggtgaaagaaaagggaaaaaaaaaccggatctgtccatcaagaaaaacgaatccgactctgggtaaaaagaaggacggaaaaaaattaaaaaaaaaaagaatcaatccgattctctatctctaaacgaaaaaaatccaactctatatccgattcctccttaaaaacgaaaaataaaaggcacctctcctctaggaggattggagatctgtttgcaaaaacataacctacatgttaagagcataatatttttatatgttttaatttttgggtatgtacttttgcatttgagtccctgtaatttttatatttatatttaagtccctataatcttgcaataaggtatttgaggtcgttttttaaaaaaaataataaaagggagataacaaaggcagaaaggtgcatcaaaagaaaaagaaaagccgcaaaaaaaataaaggaaaaaagaaaaccaacaacaacaacaaaagtctgtttccctaagtggcaaaaaaaccatagatccgaaccaaaaaaatcctattcctataaaggcaaacaaaaagtggtgaaaaaaagctagatccaattcctttcaaaacgaaaaaaaaagtctgattcctataaaggcgaaaaaaatctgaaaaaaacatctaaaaaagttcgtccgactctctaagaaagtggcaaaaaaaatggtttgtaaaaaataaaaagctggttcgtataaattaaaaaatgaacgcgagaaaaaaatagaatgggtgaaacaaagtctcagtatatatctcttctctatttctaatctaatctaactatttaaaaagagaaaatgcatgagaaaataaaaacggttcaaaaaaacgcgtgagaaaaaagtgagaaaaaagcgaaaaaaacactctaaaaaggttttccatcttccataaaaaataaaaaaacatgtgagaaaagttatttccatcgtcgatttttttaaaaaaacttgcgaggaaaaaaactggcagaaaaacgtaaacctcgcaagaaaaaaacaccgtctattaaaaaaacaaatcgctttgaaaatactattagaaaaacgctaaattgatggacgcttgagtcggatagaatccatcaatccagcagcagccgccgccacgctcacccgccaccaccgcgctcgcctgccaccaccgcgctcgcccgccgcccctgcctgcttcgcccgccgcgcgctcgctcgacggggcggcgatggctttatggagacgtgacggcagcaggacggaatgtgagggaggcgccgagcgagacggtgttcacagactccgtcgacgggagcagctccagctctggcgccgcatccaccgacgagtggccggtgacgatgtcaccgcccaggcgcccatgaagacggtcagcagcgccgctgcgggttcatcagccactgcgtccttctgcaactggcgtccctagaaacgacgctggcgaggctcgaccgacaagtgatccaagcgagaacatcttgagctgaaggaatggccacccgaaccgtccacgtgggaatggctccggaacggtggggacgtagagcgtgagctcctcggtgaggttggacaggctcgtcatctcgttgacggcgtcgccggatttcctcggatagctcagcagcgaattggcgatgacaatgccgtagttgaaccgcttcgctggaggaactcgccgaccagcttgaccttggtgtagcggacgccaagctcagctgctcaccgccggagacgccgaaccagctccacagctcgatggggtgcaccgtccattggaatgtcagcggcggaaagcggcgctgccgccatcgccgtggggtgatctggcccatcatgatgctgccgtggtgccggggaaggtggtatgtgttaaataaatgaacttctgtcagttgggatttgatcttatactcttatttactttctgttagtttgttagctattttccctcctcccatggttttctgctcgctctgttttgagtcagcgtggccgcgatttgttcggtcaagtggtggagcttgacgagcgggagagtatcgagctgagaaaacgagcagcaccatgaactagcgtcggtgagcaccacctcccttctgctcgagctcggttgagggctgggagcttgacctccgtgcccaccgcccaccgcccaccgccggccgccgtcgcgccgccgtcctcctcctctcccgcctcgccccgtcgatgcccgcgttgttcgcgccttccagctgcccgcgacgcctgcacacgcccgcgcctccctgtcgacgcctgcgcaaggtcgctgcacgcccgcgtcgtggagctccgccgggctaccgtcgggcatccccactgtggccgccgccggcggccgccattgcggcgccgcgctcctcctttcccccctcgctccgccgaccgacctacaggcgcagagagagaggaggaaccaaggaagagaagaaggggaagatagatgactcagcggactcagcctgacatgtaggacccacgtgggtcccatgctaaatcagccgtcacgtaggacaaaactggtgtcaaaaccaccgaaggacctattgtaaccggtttttattagttaagagacgctgaatatctggtttatggttggaggacgattttgtaactccatcacaagttggggaaccttctgtgtactttttcctctttgcaatcaataggtgtcaaagtgtcaactgattttacgtgctgtttcaaaaaggttaggatcactttcattacttcattcatagtacatctctagtacggattattattaattattagattagtagattgaatcgggtgctgccaaataaaatggccgccgcaccattgccactgttcgccaaagctcaagagcatcggttcctctttcctcctggttagttcttctctctaccgcttcttccgtcctgattcttgctcgacatccccgttttgagatggccacgccgcatcagttgaacggcccaacaaaccgcgtggggtgccgctggcattggctgcgagccgtcgataggcaagcttcaacgctcttggagcgcgcgtgcagcgggcgacaatttagtcactggctcaccctctctcttccagtctggctttttagggcccatttgaatagcaggaatggaaaaacgaaggaatatgaccctctctcttctagtctggctttttagggcccatttgaatagcaggaatggaaaaacggaggaataggaaaaacgtaggattctgacatgaatgcaggggtaaaacagaggattggaaaatacagtaaaaaacaggaatgaccgtttgattggaccacagaaaaaacgtaggaatcggatgagatagatagactcaaaggaattttttcaagaggttagacctcttgctaactttcctctaaaatcactataggattagccatttcataggaattttaaaggatagtataggattcaatcctttgtttcaaaggcttttataggaattttttccataggattgaaatccttcaaattttctacacttttcctataaatcaaaggggaccttagtctacgtgtccaccttgttgtcggctaattgctctctattgtagctctcagtgctcatgccatggaagctgctaccggcggtcttctgcattatgctgccgctgttagtgatatgccctagaggcaatcatagagatgattgtatcacatactatgtttacatatttttccgattttgttccttgaaatagataaactcattattggttaatgaatatgtgattctttcataagactttttatgttatgtgttgctatttctaaaggatccctgatcaaatatcatatgtggaacaaatatgtttagatgatcaacacatgtattaattgatgatcatgtctcatggatcatggtatagagataccaaattaataatgtggacacatgttagtgaacatgttgttggatagacccaacatgagacactgcaagagccatatgtgttgtgtcatcagttatctcatttagtgttggtgttgaatccttagacctgagattatcatggttcccaacatgtgtagtagcttacttagggactgctaaacgctactccgtaattgggtagttataaaagtagttttcgggtatgttatgaaacatgtagtgggatatgaataatcaagatgggatttgcccatcctatagagagatatctctgggcccctcgatgttgtagattatggaaatgcatgaccatgccaaaggtgattgaggagtcaatcataagttatataatctatcaacaggttcgagtgaatgattgagctattagaggatggcacatatctagccttgagcttaatcgatatcatgaggcaaaagggttcatacaagtatacactagaggttcagccgatctgatctttatgtatgcccggtgggtcaatacgttctgctaggggccgctgttgacgcgtggaccgaaaatgagttttcgggttacagccgagtatatatgaacctacagggttgcacgcttaatgggccggaataagggaattggatagagatccaatatgagcttaatgtggataaggatccgaataggagtcctacgggccttggaggcccgagtgatggatcctatatattcgtgaggggtgtgacaggcggaggcattgcatcacgtgagaaaccctagccgtcacttccctccccgagcaaaaccctagccgcgcgcgggtgctagcacatctgtgcgtggcgttccgtccctgtacgtgtggataccagtaaaggctctgctggtttgcggtgctgatcggcataggagtacagcgaggagaacgcacgaggaggagaaggtcgagccggtgcgatcgactacttcctctacatcgacgcgcgctacttcgcgagagttccttcgacttctcagcgtcttcttccgctgcgcagtgcgtcgagtggtaacgatctatgatctaatacttgcatggttcctggtttacgcgatagaaaattttgatttatgctattgtagcctacgcgtatcccaacagccgcaacggcgcaaggtcacctcgcctccccacaacagtgcaacacttcgccacagctacggcccgatgaaagttcaagtgccattaatttggttttggtgattaatgataaatccaattatgaaactaatgttatatgagcatttatttgccttgcctcgtgtgaatatgaaagtggaatttgtgagaggtgattcctagacttcatatgagttgagatagaaacgttcattgatggtggatctaaataacaaggattgcatggagatcaagctatatgtatcactctttctctccatgcacatattgatatagttatatagaatattccatgtgattgacatatgcatgtgagtctaatgttttgtttgagtcttatctcttatttagtttatttacattgagaacgtggagatgatgaaggtatgcatttattttaatatctatatttgataaatgccttctattttttataggataagcttccaatgtttcatctctatttatgcatactcttgcttcacacaaatattccgtatgcatatatttaggggagcaaatcctataccttagttatgaatgtacttgatccatgttattcactttcgtttaattgggatctttacatttaagtatatgacacttggtattaattaatactcatcacttgttcatatcatttaatatacacgatcggttggtcaacatgtggaggttaacaaccggatcattaggactaataatttcattgagttgaatgagataattagatcccaaggattgtaaaggtgttgatgctcaagtgatatcattacacctaaagataccaatgatgacaaagtgaagatattgaagatgtaagatacaaagtggctactatgccaagacggtgaagggcaagtgatgctcggtcacgatggaccatgcggcggtgaagggcaagcaatgggcttggcgccgaagaaccaaatccagtggtaaagggcgggtgacagctttgtcattgttggaggtatgtcacgagggccctcggctgaacttgccaaaactatcaaatcagcgagacgccgactgagtccaggaggttcatctcaagcgaagccaaaagacgaagtcaagagggttcgccaccaagctcggagggctcaccaccaagtttcccctctaggcgaagcctcaagtcgaagcatgaagggtttgccgccaagcccgaagggctcaccgccaagtctcccctctggtcgaagcaggaagggttctccccatggaagaccggcttctccaaggagcccacctagcagcacggcccatgaaggccattcgccttttatgggtcgggccagggtcccgtcaaggggcccatagttagaatggacactgtatgccccttttaatgtcctatcataagggtatccatgtaaattcctctgaacatattgaaccatagagggtatgggtatgtactaagaatataaatagcccctagggacatataagggagcatccccaaaaattttcataaattaatacattatttactattcaaatcactccaccgagagaaccatgtccttcgacgtgaagctcttgttgtttcgacaacagccatgatggaccgtgcaagaccatttgaagctccaaataactgcatcaataatttgaagaatatatggtgaaatggttttggtgttggcgccccttaagataaaggaaggaagatgaaaagaagtcattcctattattatattcctcttcctatttaaatttgagtataggaatgttgtactatcaagagggatgcaacatcgatgtgtttgtgtatgtctcggtgctcaaagtgacctatcatagtgctaccttgggagaaacccaagatttaacctatcctttgattggttttataccttgtttttttgttgagttgggtagtcctctgagtgagctttctatagagtccaaaatcataaaaaacggactcccgagcgaaaagttatggtcgttttactctgtgcttttcgaaaattccgaaaaaaatctcaaaaagtccgaaaatattttggaaattctgaaaatggccacacttccacttctctaggggttgtgccacatcgacagttgaacaggcccacaaaccgcgtggggtgccgctggcatcggctgcgagccgtcgataggcaagctttaacactcttgaagtgcgtgtgcagcgggcgataatttagtcgctggctcggcctctctctcctcgtctctctcctccaacctagctttcgagtctacgtgtccaccttattgtcggctaatcgctgtgttgtactcgctcttaggttattgtgtgaaagttaggaaccacaatcttcccagcggtggtgtttgttggagtcgaacatagctggccaaatgggcggccggcctagcacggcacaggcccgctggtggcacggcccattaggcatgacaactgtagcgggctgtgccgtgacggcctacgtgccaaggcctcagcctaagaaaaaaattgaaatttgaggggaaaaagaaaaaaaggcagaaaatataatatgaaggaaaaaaaaggataaagataggacaaatgtgagggaaatttagaaaaaataggaaatatgaccgaaaatatacggtaaaaatataataaaatatggggaaaataaaaatatgagaaatataagggaaaattagaaaattgtaggaaaaataattgggccgtgctcgtgccgtcctgttgataggcgtgccgtgtcgtgccggcctatgggttaaggtgctgacccacaggccggagtgccgtgccgtgcctaggccggctacagtaaggtcgtgcctaggctggcccagcatagcacggcccatttggctagctatagagtcgaattgttgggcctttatgttcactgtagttgctgttggagtattgggtggcattgggggttcctagctggcgcttacgcgtcgctagcgcgcaccttccagccgcctaactatacttaacactaatgagtgtaattaggaaagattttttttaagtaaccgattgaaaaaaattttaagttagatttagaaactttcgatttaatatttaaattttgaagtcaaattttgaaaacattcaactcagatttgaaaactttcaactcgagatttgaaaactttcaactcagagtcaaaaactttaagtccagatttgaaaattttgaaaactttcaacttgagattggaaaactttcaactcgtatttaaaaactttcaagtcaagatttgaaaattttgaaaactttcaacttgagatttgaacattttcaactcgagatttaaaaactttcgactcgattcgaaaactttcaagtccagatttgaaaatattgaaaactttcaacttaagatttgaaaattttcaactcgagatttgaaaattttcatatccaaatatgaaaattttaaagttaagatttaaaaattactagtaaactaatcattagtaaaaattggaaactaatttaaactaattatcctatccgtacggcaggaacaacagatagaagaagaagaaaaaaacagcagcgtccaaaaaaagaaaaaagagagaagcgcgcgcttgcatgggcctcatgggctaaaacgcgcgccggcaacgcgcgcgcgcgtattagctgtcgcatgtggcattaggctacttatcgcattgaagaagattaactacccgtccagtaaaaaatagtgatgtttggaaatacatgcaatcaacgtgcttaaactttggtcatcaacgtcttcaaatattttgattcacattttggaagtgatatagtgtcacgaccggaaataacccaacgggctttcctgacgtgcgtgcattaatccttgtcccaggaggcaaggtacaccaaaagttgatacaaatcagagtttaacaagcggaagcgtaaatagttaacttattacatgggcaacgaaggcccagcacactcaaagacaacgaaaaacagcggaagactagggcgacgaccacaggcgcttgacggcaggcacgagctagacaccaaagccttcatcttccaggaactcctcatctgggcttgggaaaattaagcaagactgagtacaaccaccgtactcaacaagacacacccacaaatgcagaataaatgcaagggagtacaagggaattataatataaagggttagggttgcagtaaacagcatttaaagacatttagttgctcaaagctactttgtaaacgcgatcctagaacgctacaaagttattaatcaaggccgtgaacccacacgaacctgccttaacccaaggcctatgatgattcagaccgaactggcaacccgaccctgggtcccagctcgtcctaagccaacccaggccaaccattccgcattttagttgttaagcaggttttaagaattaaaacgctaacttgggtacattgctcggcttgcccataaccgagggctcggctattcgaatagattatactctgatcagaggtgtacatctttacccacaagacacatcttcctcacgtgtaaccacgtgccacataccaccacggtatacggacggaagacgtgacatagtttccaacccatcctagccttagacaagagtaccgacccaatcccacctacggccgggatacccgggacaggcaggcagaactgagcccctagcagcagggcaccaaccctctgccgtatgacatctcgactaccgggccgcagctcgtgtagccttcatttgccctggagaatgtccatcgacgcccgacttcatccatctccaatccgtgtacttttgtttatgactagactgagtcacaaactaagccttacccattagacatgtggaagtacggtagtgctttgcaacagaggcccgaagaccggtccttaaacggccgaggtgctaccatcaaaaccatgcaccccgagcccagcctaaaaccattttagggggttttgaatagagggggcggtgtgaagccaattccacaataatccaacaattccagagtgtccaagtgatatgaatatttcccaaagtctatagttgtaaaaccacctaaggttacctaattagattgcgaagcatctacctaaaattatactagggataccatgagtagagtgtccactagttgaggttttgtttgtctagggtgaacaaggtaataataataacaataacaataataatatggtcataacaaaggtaaataggcatggctaagtaaaacagtgataacgcgggaatttaaataaagcgataatgcaataatttaaatcaacataattttataaactgggattcaatatgatcaagatgatgtgtcttgccttgctcgttttcccactcgacggcttcgacttccacgaagagcggatcttccgaagctgcagcgtctacacgac

SEQ ID NO: 17394 - DNA, 588 bp, Oryza sativa
taactggatgcaacagcaagcagactgtcatccctactgaaagacagagcagcgatgctggatgggtatctgggaaactgcaaccaaaagatgaaaaaaaaaagaactaaggcattctgatgtgaatttgtgatacagaatagagaattagagatcttcaaaaaatagttcgcgggactattacttgaaacagtttccttctgttagcgccatcccaaaggttcacaaatctatcacatccaccagtggcaaatgtgccgtgtctgcatatgttagatgaggccattaaagaaacggaaaataatcaaccgtttgtgagggatcagtggggatttcattacactgggtggaaggaaattgcgttgacaggatagactttggtctctccatcctcaggcactcgatgacacttgaaactatacctggatagaataaaggcatgtaactacgtatataaatggaacacagcagaatatgtagattaaaaagatgatctccggcaaagctaataatatcagcttaagtaaatagctatcaggaaagagttttccttcagcagcttaggtgcatacttcttatagggagggg

SEQ ID NO: 17395 - DNA, 612 bp, Oryza sativa
ccgttgagcgtcacctcgtaatgcagattgcactcgttgtcaatggacatccaggccatgccgacggcatgtggattctgtgcatccgtgtgctcctgtcgcttcagcagaatgggttccgccgagtcccgagcatcggccactggacggggcactaggcggccacggatcaggctcgtctcatgctcggtggccacattaacgcccagttcgccggcatacagcgactcgaggaccttgggacccaacttctccacactaccaatggcctggttgaagttgaagctcggcgtcagatcctccagcttggccttccgcttgccctgctcctcaatcaaactgatgttgggcctatcccgggtgttcacgtgctccgtttcgatgttgtaggccagagatccatcgggttcaagtagacccacgccaaaccgctgctcttggtcgaggattcggcactgtgcggcgccagcagggtctggaagatttcgcagctggctcgggtcacgatgtgtccctggatgcgcagatgtgggtacttcttggactccacggtcagcaggagtttgccacgcgacatcagtcgaagattctgtatggaaatgggcgacgaca

SEQ ID NO: 17396 - DNA, 2287 bp, Oryza sativa
  unsure (1)..(2287): unsure at all n locations
cactagtaagagacaagtgtggaatgatcaaaccggtgttgnaatgtcttgagccattatgaatatcttaaacaaacttaatgattcacaactagatgcagtcacgtgagcatannttctaaaatccttttttgttgctcaatttagttctaagaaaaatcagatgtctgattgatcaatgcattatctcttgcagccaggtctttctcgcagatcctttgttcttatccaggtttgtttgcttatttccagttatatttgtttatttttcagtattatttatcattaacctattttagagaaatgctagtgccttgagaactagagtatatgcagctacatgtgctctacttgttgtcacctgccattcatatagaactccaatgtatatttgtaggggcccccaggaacaggaaaaacacaaactatccttggactcctcagtgctgttctccattctgctcctgcaagaatgcaaaccaagtaatatcttcacctgtgtatatttattactgagtgaaatgtagactagtatctttctgttatggagaggagaaaccttgatatataaaaaaagagatattagaagctaaaacataaatataagtgttcaatacagtttccaaaagctacatgtatctgacatgatttacgttcttgtcatgcagaggtggttttgatgttaaaaaacacggtccagagcttgatattgagggcaagtatgttaatgaattggactcttttcaattgcttcatcctcagctaattttcttgttttgtccatttcttctgcttgcttttttcctcctttaaacaagttctctatggtgtttggaaataacaaattcaccttactttatggtacttctcttagtgtttgttagagggagaagattgtagctatttttacatttgtactatcatatttagtgatcactcagcatgtggattttatatgtagtatgggaactgataaagaaattcttttcagtgtatttttttcttttcttactctgtggaattatgcagttcctttatttgctacataatactgctgcaaatatctgttgcactatcttactgcagagctcatgtgataggcatgcacactggatgaaggcctccccgtggctgattggtgtaaatcctcgagatttaattatgcctgttgacggcgatgatggtttttatcctactgggaatgagctagtaagcttctgtgctctgtactttgctatatttgccatgatgcctgtatgaattttgtatttttgttacatggtaaacacctgtcttgatagaaacctgaggtcgtaagttccaatcgcaagtatcgggcccatgtcttggtctgtgctccatccaactcagcacttgatgagattgtgctgcgagttctgcaaacaggtaaaggggtttctgtgctgactgatccaattcagaaaaatgttctgacaataaaaatactctttcaattgcatccatgtgctacaaactaaacaacatttcttaggctcatctggtcactaatttattgatcggaaaatcaatcatctaaattattattcttcttcctttcaggaatacgcgatgaaaataacaacacctataatcctaagattgtgcgaattggactgaaggcgcatcactctgttaaagcagtttccatggattaccttgtacgtgattttagttgctaagtattttctgtccaactcaattacagtgagttgataagttgatatctttgcagatacaacaaaaactttctggtgtggatcgctcatcagatggtgggagacgaggggctggtgaatatgatcgaattagatcttccattcttgatgaagcagccatcgtacattcattttcttatttcacattcttttgcttatttcagtattccaggaatcatttaatatttgattctgactgtcaagcaaaatttgtaggtgttttctacgctaagttttagtggatcatccattttcagcaggatggctcgtgcttttgatgttgttataattgatgaagctgcacaagctgtgagtgtttgctttatacagattgttacacgatggagcatttagccactctcagatttagataatggtattttatgagtttctgactttctgttatgttgaaattctgaagtttggcatatccccttcttttttcaggtagaaccagcaactcttatacccttgatccatgggtgcaaacaagtttttcttgtatgacatccacctatctacgatttatgnggccttctcttaactatgaa

SEQ ID NO: 17397 - DNA, 6486 bp, Oryza sativa
  unsure (1)..(6486): unsure at all n locations
gtggcnattgatgtcgattcacagtagcgcancacctaactaatagatagaatgaaaccgagatgccgtggtctttacgaatcctccttgaatggtttcttctggatctgttttctattaccagattgcgtacttttgtgtgccagggtcattagaacatcttacctaatactagcattacaaccgttgctggcgtggttagagcaattctatgacccatcttgaggaatgctcaaacatgtcactcattttgttttaggggtgcacatgatataaaacatgtgacgtgtggggatgtccacaatgaagttatactgctatcttaaatttttttttgcaaacactgtcacatggtccataataagcttacatgcgatactaacggtagtaaaatccaattaaaaatagattttgatactgattgccaagtataatatggtcgtgttcattgaaagccagagtagtagcatatacatgaaaaatatgattgttaattggtaattttagtgcttgccctgtccagtacatggcttaaaaaaatgtaggtcaatacgatttccaatttgaaaaacaaacaatccatattgttatgtatttgataagatttgcaccatctaacgaagatgggtgaattatttgagcaatttacaagatgactgactaaactgcacccacctcgtaagttgtgataccaacgctgcattttactcaggggattatcaaacccgattacagtattttagggtgcctctaatacccatctatacatatagatacgctgctagtataagataagaggatagaagaaaagatttttttacacgcttagtttcctaatgtgttcgatgtgggtaacaccgtaacaaccttaatactgtaggatcgcacaagaccaaacaaacctaccagaggggggagtgaatggtaagaaaaaccaaaaacccaaaatcttttgtggaattaaagattacccttgaacgaagtcgatgacgaagtccagtcgccgccggtcgaaccgccttcctgccaccggtcagaccgccgaagcctcgccggtcagaccgcccggatacttgcggtcagaccgccgctatcccaccagtcagaccgcgcacacacctacggttagaccgttgggacccagaaacaatggtagatgataaactcgaagatgtagattgaaactttttgactttattgcatcaactagtatttacaaagtgcaccaatagcactcctcaccaaaatctcaaactaaactcgaaaccctaactctctatcaactctagtctctctaaaaccgataccaggaggcctcaccctctctctctatttatacatgaggtagactgtgcaaagcccacgaatctattacaacttagaactcctaacccacgtagcaaaccctctcttgcaagtatacaactcatctctttccttatctcaatcaaacttcccgaattcggactcctttccaaattcgactcctctttccatacgtacacaacccctcttgtataccatatggatttgttcatcaccatgtgcattgtcctctaacctttagtatcccgcatgatctcttgatccctggacatcaacttctcccaagttgactccgatctattaccggcaacactctgccgaggccttaagcaacacctacacatgcaacaaccaagaaaccatattccgagcccaagttcgttccaacttgactcacattagtataacaacagtatccatacgcatagaaaccatctagaagccaaatccccgaaggaaatatccaaatccaacaaaacaatccgaaaccgacatcgatcaggatcctgcgggtcagatcgttgggccgaccggtctgatcgccgcaacacctgcagtctgactggcggcacacgaccggtctgaccgccagggtcaaccgaaactgtacacttcacaaaatcaaccatctataaaatctccaaattaacattagcaaaccaccaatattttcatcataaaatctaaatcaactccttgattttacaaatacttgtataaattaatctaggacatatcatatcaagtataaggggtagcaggcttagctaatttgccaccaaactaaccttgatgggcaaagcaatgggtttgcagtcaatggctaacgaaaaagcttcttcctggtgtgaactcaatgtggtgtgatttcgaatttaagtcctaaatttatatcagaacatgacctctcgtcaaggtaaaactcaagatccaaataggagaccttattatcaccgtgctggactacctagtcattccttaagtggatgggatttcctggtcctctcttagggcattcacagtgggttgagttggcattcagccttatcgatcctcaacaaatattgtgtgccacgtttgtgtcacgcccgaaaattcactagtaatttccgaacttatttgtgcataaaatcctcgtccaggaatcagccgaggtacacaaactgacaatttaatatacagattcatcaaattaactaaaacgataaatacttacttatgaggcacttagtcctcatcatgaagaaaactgcagcggaaaataaaatctagcgaagctccggctccactcccacaggcagctcaactggggtataagccaaacgtcttctccttctggattctttttcttcaactgaggttgattgattattgcaaggtgagcatatgacatactcagcaagccacacagcaaatatgcaaatgcacaaggataccaaaggatggcataatattggctcatttgcaaaagcagcatttagcaaaacatttaagagaagtaaaacagtggagtaattaatcaggaattttaatcaacactgaacagcacacccatgctgcacaggcccaaccatcctgaacaaccatacccggctgtacagatctaactccaaaccaggagctaagcaaattattaccaattaaagcatcttttacaatgatgagaggtgtgagactaatcacgaaaaacattgctcaactcgcccataaccgcgggcacggctattcgaatagttttactctggccagaggtgtaccactgtacccacaagacacagcctcaacatcatgtctaccatgcgtcgcgatactggaaagtacccgaatagaggctgtgacaataccctctgcataacacaactcaccacagtgcaccattcctggatcataatcacccccttataaaacaaggcatggactccccagcgacccccgtgggcttatttccgccacttctcagtctggtgctccgcaatgaatcatgttatacaaaaggtaaagccgttgcccacgctggcttgtggttggcacggttaatgtttcacaacagtagctcgcgaaccggtccttaattgtcatgagcacgactctcaaaaccatgtgctcacaacccaccattatcaagttttagttggcaagtaattaattaaccaatcacgattgaccatcgtgagctaccattaaaccatcattaaataataatgaatcataagttatcccaatagtgtgctaatgtttctaagcatggctaagcaatcacatctaatatctagttgaaccaatatatataaagctcaactagtccaattataataacccaaggtatcaaggaatagagtaatcaatgcgaataggccataacaaaggaataggttcacaccacccggtgacattcgaaaataaatgcacagttgaaataaatagagaatttaaatataggatcaacatgctcaaaggattgtgtttaggatctgtgtgacttgccttgcaataatcggtcttcaattaatcttcttgaatacttccggcgcactcgcgaaccttcgcaacgacggaaacgacaagctaacacgcaaaacgaggaaaaagactaataaaaaccaaataaacaatacataaaaagtaaacaaacatgtagatcataattttagatgaattatgagacttgaacggcctcattctgatttcatatgaatttattatgaattttacaagatttaattccaattaaacctattaaacggagactattccaaattaattaaatcatttacaaatgatttataacggagataaaggattaaagcaacctccggaaaagattggatcttatttggtagatgacatatattaaaaagaaataatatgccactgaaaagaggagaggatttatattgattttggacagctgagattaaccttgaccgagtcgactaagatcggatggcttggattgatttggcaagcgggcctcacgagataccgactcaacgagtcaactccacgtgacacgggatcacccaaatgatcaaccgaaaccggcgaacggaaccggcggctctgaactaaaggacgactcaacacggacgaacgaacgaagcacggggaacacctcattcgaacgaacgagcgaacgactcaacaacggctgcggctaaaccggtggactagaaacgattcacggtaaagccccggtacgacaaacgataggccggtgggaaactagggttgcacctacggctacacaactcgactaaaagcagcggctaggtttaagcggcacacagctgcgacacggcggcactaagacaacttgactcggctaggcggcggctaggcggaaacacgcagctagggttagggtgacggcacagccggtagcgaccatgcacggctagagcagcagggctacgacacagcgacgacgacacacacgtggcttacataaacatcttccctaggaatcggagaggaggcctcaccgggaaacggtagtgaacggagaggaagaggcgatggctacggtccgacgacaacacacagagacgatgatgacgctagggccaaacaagattagattagatggaattaagaccctaaggataaactacaccggtgaacgacaaagaagcggcggttgccggcgaaccacgatacgacctcgccggagatagagcggccggctgcggatttggagggcatgcacacgtagaggacgacgaggcgaacccaacggtactcaccacaacgacaatcgacgtccgacgacggccggcaacgacggggaacgggcggcggctcggttgaccggcggcggcgaagaagaacgggcggccgggcttcctcactcctcggcgcacctcttggcggcggcggcaagcggcggcgacggcaggggcggcgctgcggcgcggctgcaacccggccgacggcggcggcggactaagcggcgtcgacggcgagctacggtgcacgggagaccacgggagagggggcaaacgaaagaggaggactagggggtcctatttatagccatgggagctcgggtccgggcccaaaacgacgggaaaaactcgggaaagtttatcttcgccggaaaaaggaaaggatttgatccgcgaaattggaaaggatttccaaagaaaattttggggatttcttggggaaaaggaagaggagattgagaggattccattcccgcaaccaatttggaaataggagcaacggggaggtcggatttggtggaggaagcggcggctgcacaggtacaggacggcagctcgggctctgtccaggcttgaagatgaacagtgccagggagggaaagtagacttcttgccgggcttttctacttccaaggactgattaaaggagggacgcaaagcagacttcgggaaagagaggaaaagggctgcaggctgagaggagactgggccgagagtgagaggacttttcctaattcggcccgaaaaggaaaaggtgaattttaattacttttccaattaaattaatcactgaaatgatcttcgaattgttaaaaatacttccaatgctcaaataattccaagaaaaatcttgaacatacttggacactcaaagtacttaaaaaaattataattagaccatttaatgattaatttaatatgtgggtaattactgaaatgctctttgtatgattaaaaattaggaattgagctccgaaaaatccgagaaaatttcagagagttgacttaatcatggagaatttaataaaaaaaaattaaatccatccatgctttagatttaagaaattttatttcccacattttacttcacttgaaaattaaagaacatttaatataaattctacaaataatttattaaatattttataaatcctgaaacgaaaatcaggatgtgacagtttgctactgccatatgtacctgaagttcttgtgtccaattttggtcactcgttcttcagtctaattctgagtgagtgcgtggngtgaggcaccgtgagcacactgtggcgcactgtgaagatctgatccctgctttctncactgctcagcctgtagatgtgtactttgtctttttcccttggtcacggcatgaggacccgacgcagtgtgaatgcccttaggtggacatgattctttctttatctttatccatatt

SEQ ID NO: 17398 - DNA, 5979 bp, Oryza sativa
  unsure (1)..(5979): unsure at all n locations
aaaggtagattcctgatcagacccgtctgcaagtagctcatnacctggtgtgaactcaatgtggtgtgatttcgaatttaagtcctaaatttatatcagaacatgacctctcgtcaaggtaaaactcaagatccaaataggagaccttataatcaccgtgctggactacctagtcattccttaagtggatgggatttcctggtcctctcttagggcattcacagtgggttgagttggcattcagccttatcgatcctcaacaaatattgtgtgccacgtttgctactgccatatgtacctgaagttcttgtgtccaattttggtcactcgttctccagtctaattctgagtgagtgcgtggggtgaggcaccgtgagcacactgtggcgcactgtgaagatctgatccctgctttctccactgctcagcctgtagatgtgtactttgtctttttcccttggtcacggcatgaggaccggacgcagtgtgaatgcccttaggtggacatgattctttctttatctttatccatatttagaataaaagcatataagaataagaatatgtatatgatatttctggtgataataagtgtatgtatacgtgtatatcatgcttcctctatctaaaaatataagggattttggttagataaaacacatcccagtgattaaaatttcgtactactatggtgtgtcccgtttagggtttaaaatttcatatcgaaatttctgaattttcggtaattttgtcccccaccggcaagttcatatctcacccaaaattttccttttttgcaaatttttgtgaatttggtcaaattttatttaaattcattcaaaatcagtcaaaatttcaaataatttcagccaaaaattttcaaaatttccaaaatttcggtaatttggtccctcggcaaaaaaaaaccaatttcaaaattgaaaaccctagtcccgtttaaccaagattgacgaagcaagtatcttacagcaatgcactatggaactatttttcgtaaatatacacatgttgctcttgggacggggaggttgcagagcagacatacctggcacccgtcactcaccatcagggttcacaagcacgtttttcccccacaccaacaagcccacaccaacaatcttatagtacatcaggataggataggtgacacgttctaaaaaaaaaaggataggtgacatggtcacacgacgttcttaccaattgaatgggcaacacatatatatattttcttggaaaataactagttgcttatctttgtaaagtggagtgagaaaatggttatttaaaaagaattcctagatgtgcatttaaactcaagcccaatggcggaggcaggttaaaattatagcggggctaaaccaaaatgatcaagagcaactaaaagagatttagggttgggttaggattttttgggccttcttagccttttgggccatataacaacctcaaacaaagtctatattagcccttcatctataaatatatggattacaattttagaggtattatgggggctctaatgatatattaggggtagggggtctaaagacccccacggcccccacgctgtctctgcccagctcaagcccaaggcctaagcactgctccctccgtttaaaaaaactcaacttctaccatgctaccctcataatgtaaaacgagaagttttatttcttcaataccctctacctacctatcaccattaatattttttttaataatgagggatattttggtcattttcaccttactatttttgcattgggatgatagggtttgatttaatatgggacagagggagtaagcaggatacatcagtctatagaggtgatctggttttttgagtgtagtaacagtaagacacgatcacatatatagacaaagttgatttgctctaaataagaagcaatcacacgaaccatgagcagactaaacccaattttcaacacaacaaaacatgacggaatcatggatcatgaacaaacttaacagcctgtttaagtacttgtttcaattcctttatggaagacaaactaaaaagatgggtcttttccgatcttctgcacaataacatgaaaaatcacaagttcaccgtatccctccggcaaagcatcaaaatacagaaacaactctagaaagaaacagccggttgctctgatttggctgcatctgctgaaagattgtcttttctagcagcagagtaggcaaggcatggatggagggttgcaaaagaactcttgtggtggcaggtttcttggcttgtgcaaaatccaagaagaatggcatacttgaattcttgatgcatcccaatccatgcctcagctgagaaccaaatcgcatctacttacatatcggtatgcattatatagccttagaagaaagccctcgatctcggctaggctcacgctgtgctactatatcactgataaagaaagctaatataggatgcctcatcagatagagatagaaaagcatcatcggacttatttccttctaattttgagtcattagcatatgggttcaatttgtagatgacccacatatcaatgattcatgtttgaagtataagtcaaaagagaagtaagtcagagtatctcaattctcattagatatattgccgcggatatcaatggatcttgggttttatttagacattgatggctttcagtatcacaaacaagagttaaaatatgtagttgaaaaaattttggtgtaatgtggtcatgtgttcatgtgttttactttatccaagacaatcgacgattttttgcatactgtattatttaatattcctatctcacgaaaagttcatttgaagcgattctcaaacaaataaggctgtgttcttccttccattttcccaacccatctctctcgtttttcacgcgcacgtttttcagactgctaaacggtgtgatttatacaaaaactttatatatgaaagttgcttaaaaaattatattaatccattttttaaaaaaatagttaatacttaattaatcttgtaataatacaagcttcgttttgcatgccggggaccaaacccctcctcccgaacacgggttcagatcccctagagttggcatcaactccacctagtggatttgggcaaatccaaatctcatccatcgttttatttctacggttgagatcataattgactcccttaattgatgcatatttggatatttcttttcaactgtcctatttccaacgtaatcaagaaaattaacgtaattaatcttcttcctacgattaatagaccaacatagaagatcttttcagtgtagagaagagtgatatcgtagatggtgaacatgggcagccttgcgatgtgcagaaacttactcagcgcaagcaagtagcaacatgtaagtacatcacgtcaagctccttgatgctgctgcacaactcgttgatatagccgatagagtcctcgtttacaatctttgatgaaggtaagattaaaagtcgaaggaacaaattaaggataggtggttgagctgtattgatttaatctcaaccactggtgacaaataacggctgggattgacccaaatccaccggataaagttaaagccaactctagaaaatctggacccccgaacagagtctaagtgttgtggttagttcacgttgatgtctctctcatcaatcatgttatatcatatacctggcatttgtcatttggtaagccggagagcattaggcaccgtttgaatcagcttcttgactgagctactatcttggttttcgtaagcacatttcctaaagtgttgaacgataactttttaaaaaactttctatatttaagtttcttaaaaattaattaaatcaatttttaagtttataagttcatatttaatcaataatgtgcttatgattattctctcccgtcaacaagctcagttgttcaactgtaataaacggtgcctttaatcgtgcatgcagtagaaccaagtgcttcagatgaatattttgcggtgcagggggtgaagttataatactctctgttgatttgtggatcaagcaaaagtagggtagagtaagtgctccagatgaatattttgtgggagaaatttaataaaatttttaaaaaaacaaactcttcatgggatggatggagtagcacataggtatattactaatttaccttagtccgattagcatgaattaaaatgttcctgaagaattgataccgttgcatcaagataagacaaaagctcaaatgctagcaacacttgccctccactgggggattttgaatacctcggcctgaaatttcaaatcctaatatgcactaagatcctagcaaatgctaacatgaaataaaatatactaagcgtgttggaataggtatcaaatatactagtcttattttgttatagttgaacttggagttataataggtgataggagtaaagttagagtcggattctgtaacccagtaactctcttaaataagggggtaccacaatataattatgacgactataactgtgaagtcaatttgcccttgagtatgatcttctggtgaactaattaaagacgtatcctgtaatcctaaagaacacagaaaaaagtttaatccacatcccatggttttattgctcgcactagatactagctagactagctatcaaggtaaaataaacgatcacatacatttcaatctacaagacagagagagtagcgatgccaacagtatgtacatttgcaaaaagtagaaccaacaatttggacgactactctatcttccaggtcaaaatgcaaatgcatatgctgccttgtctgtcgttgtctactatcttcatggatgatctgaggatctgcactagagcccagccaagtgctaagtgccaacacaactccaaatatctgtatgggtagtggaagtcgaccaggatggatttccagtgatcccattgtctcccagtcctataactctagtctttacaggcagacagagccatgtttctctttgagaaatttagatgaacatctctctcgtgtgtcgttatagttccaagaaatagggcaatttatagccccctatcaccaaggccatttcttttggtaggctctcctatactcctttcatcttttcttgtctaacgtaccttttctatttatactaccactgctacaaacaagattttttcaaacgggtattttgttttttccgtgcggttgtcagttcatcattttgttttttccgtgcggttgtcagttcatcatctgggaccgtacggaataatggattatcccatgcggttgtgttatatcacccgcatggaaccaaaaaaggccaaaaaaatatatataaaaaaagcaaaaaacgccgccggccaccaaatcgctgccttgaccgccgcatgcgacgaccaggaggaggacgacgagcggacgacaaagccttgcctcgctgctcgccgctaccgcgcccgactgccgccaccccgttggtgaagaggcggcgctggcggttgcggacggtgacggcgcggccctcggcgaggacgtgggggaggtaggcgttctcgacaagtgcgtggtggcggtggtggaaggtggcgccgcggaagtcgtcggcgacaacctcgtggtcgtcgacggcgagggccaagcggtcggcaccctcggcgaggtcttgacggccacctcgctgctcgccgccacgcccggccaccgtagtgactgccaccgagcccgaccgtcgtctcgccccggaggccgtctcgtcccggtggccgtctcgaccggatcgcccggtcgacgtctagcccagccgtcgactcgtgccggaggtcgtcttgaccaggccgtcggctcgaccttacgttgactataccgaccgccgacacctcggcccaaccggttgagggagttggtgagggagaagagataccgtagagagagggttgaggcgggtgtccatgcaggactcgtccttgtggc

SEQ ID NO: 17399 - DNA, 5969 bp, Oryza sativa
  unsure (1)..(5969): unsure at all n locations
ataaggtagagagagggttgagggaggtggttgaggtacaagagataaagaaagagataaggtagagagagagggggagtggttaccagggaataaagggaaaaatgaagagggagaggaaaaatttaaagtgagtagagggaaaggagggaggaatatcccgtgcggttggattaggacgcccgcacggggaaatcgatttttccgtgcgggcgacacctagcgccgctccctcaatttttccgtgcggttccacttatggactgcatagaaacaaagaggagggacgtccagaaaaatcaatcgtgtagtagtgtgtcatcttagctattaataataaaatatttttaagtggtagtagaactcataaatcaatggcttaaactgcttctatgcatagatatagtagaatggtactatagtagagaccaccgtgaaaaagtactcaccaacaaacaggccaacaatttgctccttatctccgcatccaagcttagtttgcaggccaaaattagctatgatcctctcttctaaatgggaactacacgtgaaaatataagttatcgtcacttatacacaaattataaatcataagttggccactcttggtcaggctttatagtgcactctaatacatttgcaccctttcagtttcctcttccatgctccaaccctcgcatactaatccttggttctttaatttctttccagcgacattgatgtgaaatgtagatcatttactagagagtaaaggtgcgcacgtatcattagagcgtgcaaacttcgaaactgtcagtatatttggggcttgctcttgcatacaattctcttcgtcttaaaatataagagatcttggacggatagaacattttaaaggactgaatctagataatcctatccatccaaaattccttatattttatattttagagtagagagagtacgaatatcgctatgtagggcatctaaaaaataagtgtttttgtaaatcttcatacaaagggatcaaatttgtggtttcatgtacagagagggtcatagatgtactgcacattggtccggataagaacataagcatgccgggccctctcgttgctattactcgttgctattactctaagccctccatagctgcctatggcctgcagtaataatcagtactgtaagctgaaaggatgatattacccccatgtagcggtgaattttgttttagctatcatgcatgaacttcaattaggtaatttctatggttgcggacctaatttttttagataatagaatataatatccataattaagaaatggttgcggacctaattgagtgacatttgcatcaacaaaattaatatgcataacaagggcatgaactaggaaaaccgctaaaaaaatataacccaagtgtttttaaagagttgatcatactgttgaacgaagatgtgatgaagctcaagtaaaatataaaaggaagtgcagtgaactctactgttagggcactgagaaatccacggcactcaaaagggaactgacgaagaccaatttctgtgcacagtgcgatcaagagctgagcctggggagcaaaggggtattctcaacatcaccttgagttatttcttcatttaactttagttcccagtgccccccaatcctactgtccacgagcatacttctccgttcttggacctgcatctcatgttgtctaatcaacctttggcacatcttgtgcagcatttaaataggcttttcgttcctcctctctccgtcccatagaacatcaacctagtacgagatgtgacacattctactactacggatctagacatacatctgtccagattcgttatactagaatgtgttacatccaatcgtagattcattttttgtggggacgaagggagtacaaggcttcaatcattaatgcgaggatgcctagcatactaaatgattgacacaattcatgctatgttactcctttcgtcccattttaagtatagttgtgagagtttctgtgttcaacgtttaacctttcgtcttatttggaaaacttacgaaaaaattaaaaaaataagtcacacaaacaataaaaaatactaatcataaaaaatcaaataagacggatggtcaaacgttaaaaaaaaaactcataattatacttaaaatgagatagatagagtagttgtctttggcagcctgtagctcggcagctttgttttgcaacagaatgagtgtaagttgcatagatgatgcaggaattctgaaatgagctactactctgtcccctaaaaagacaaactctagctacgaatttgaacacgcatgtatccaggtttgtagctaggattagactctttttgggatggagggggtaggttacaccccgagtacgtatgcatggtgttttggtgagcgaaatacgtagtcaaagttcaatccacatccaaaaatgagctagtgatgatggttatgctcagtagatacgagccaaggtaaatgaatgatcataatactcaccttggttagtgtgacaagataaaactgtcacgtccgcactgtgtagcgtgtcagtgttgttttgttatgttaggcaggctggtgtggccaaaaaattcagatgagtttattattaaaattaaaaaaataaaaaagttcaaaaaataaaaaaaatcaaagctaatacagggttcaaaaacagcatatcataagatcacattatctgccagttctataactttagtcttattaccaggcagccggagccatgattctcttaagaatttacatgaatatctctctcgcgtacgagttatagtttcttcatgtgaagtataaacacctcaaatcctataaatgattaaatagcttagccttggagttttaacccctagctactatagtacatagggcaatttatcatcccccgcttatctctgcatctatggtagagcaaattggaggccaatgcaaattgatttacgaccctttctccttatggcttaattattcagttaatctttatgagaaaaggattgaaaaactcccctcagttaatcccatctaaatcccctcagttatgtcggagagtgattaaccgaacaaggcctaaaactacacatgtgataatataggttattctaatttatacacgaactataaaatagtaaattggcacggagtagtgaaggcgcatgcacaaacatatcgcgtggtgcggcatagattgctagaaaggtactcacagctcaccaaaacactagatctggccaggctgagcacatccgagctcaacacaagccaggacggtcacacacagctgaatagacctacctttcatatcccagcagagcagctcaacatgaaacatatctgttgccgcttcggcctcaagccggtaccctaagcagtgaacatcctggtgcctcccaatcccacaataattcagctaatctcaaggaaggaatccatatataagcggcattgattcaatcacgaatggtaaatgggcagcaaattaggccttattaattatttgtttgatgccattcagtgtatctctcatgttttttatcctagcagctgaatatatatagtgggcaagtgggcaaaaatgggcaaatgtttttgatcctagcagctgaaagctcacgagagaaaagaaaaaggtaaatgggcaaatggcctggtggtattaacgctatttacctactacccaggttaagaggaataattatagcgcatgtgctctccattttatgtaatgaatgccagatattcttttcatgtttttttatggggaaaaaaagaatggaagacaatgatacacacgtagagatgcttataattctcaagttcataattagcactggcaattagaaacatcaaaacagcactaccgttttcaatttgttttcttcttgtacagttgtacaatgtttcttagataatggaatagaatcttggcctttgctacaattgtactatgtagcgagaggcatatatgatcccataaataagtgatcgagagattttacagatcttcgtatacaaaaaacgtcatgatcaatccagttgtacaaaagctattaagatcatagttgtaccaacacagcaagtacaggaggagcatgcctctgatcctctcgtggctctttctgatttagccttgtattgctgcctatagctagcctgcagcacatgcacttgaacctaacattacgcgaggtgcttcatggcctggaaagtccatgtgcctcccaatcctatggttcgagctactaaggaaaaaggaaaatagaaattgatacttgttggccttagcatgtccagatcactttaccttgagcatatgaaaaggagaaaagcaagagaactgccctaggaattaatccctcacacacacctctacttctcttgctctctgccttctaaggccaacagcccaagagtgcagaaatctacatatacacccatgcagcatcacagcagctgaatgtcaaatgaaaataagttgtagctatggccgcaatatgaactcgggctatatatatatcaaagaatcacggcactgtatttctaatttaaatttgaaggctcaacattcctatgctttgaacaaatgaaaaatacagcagccgacccgcttttaatttggcactctgaataatgtcatgacaagttgcttttatgatttatgtaaattacttttaggttttattgaattttttttaataaatatctaagaagtaatttagtcaaatctaaaagtgatatttacatatgtgacaaaagtaatttaatacacatatatatttttatcagaatataattatgtgagatcttattaaaaatattttattgcaacgaatacaacaatgcaatcggatcataaattggataagtattgtaagagaaaattctataagttgagaaaaaaaagacatgcatgacctgtagcaaaatagttcttcagcttgtctgtagacatacagtagtagttctctcacatatggtcggcgtcgcttcttaatctagtgtagtgtgataggtcaaagacgagatgcctcccgatttagattttgcgtttacgtaacatatggttgcagaaaattcacttggtataggaccagttaacaattgcactcatttttttccattattgtaccacccataaattaaacttaaggaaacacaaaggtgttcgttgaattgttattctcttcccctttttacgacctaaatcaacctaacgctcttaattcggacatgagctctgccagctacctcatgtgctagagctctgcaattcagccctaagcctaagccagaaagatcattttggtttttaagcatagtaagttagtaacacaaaagtcacacatacaagtcgacttcctttaaacaggaagcaataagcaaacttaacatttcgcatactgcatgctaatttcttttagtaagacacaaggaaaaagatggatcgaatcctttcagatcttctacgtagcaacgtgaaaatcacaaggcaatattcatacccaggcaaacaatcagaagacagagcaacctcaaaagaaactgacgattgctttacttccaggctacagctgacgaaaatttctgtcctgattgctactggtggagaaggcaccgatctgatggtgattgtgctttcaattctcttcgcctgcgcaaaatccaaggtagcaggcatacttgaattcctgatacatcccaagccccagaattcttgccagaattatattgagaaccaaactcatgcctgattccatggccttgtgtatgcatcatgtaggcatccaacttccttctgcatcaattcctctcggtgtgtgtgtgtgtgtgtgtgtgtgtgtgtgtgtgtgtgtgtgtgtgtatggtgttcctttaatggctcatcacttaacaaggctattgatggncngttgcagaagcaggctgtactgtccgatgcgccg

SEQ ID NO: 17400 - DNA, 1679 bp, Oryza sativa
cgcgttaacggcccgttaaagtttcgctgccctagtgcataggtgatgcaataaagtcaaaaagtttcaatctacatcttctagtttatcatctaccattgtttctgggtgccaacggtctaaccgtacgtgtgtgcgcggtctgactggtgggatagcggcggtctgaccgcaagtatccgggcggtctgaccggcgaggcttctgcggtctgaccggtggcaggaaggcggttcgaccggcggcgactggacttcgtcatcgacttcgttcaagggtaatctttaattccacaaaagattttgggtttttggtttttcttaccattcactcccccctctggtaggtttgtttggtcttgtgcgatcctatagtattaacgttgttacggagttacccacatcgaacacattaggaaactaagcgtgtaaaaaaatcttttcttctatcctcttatcttatactagcagcgtatctatatgtatagatgggtattagaggcaccctaaaatactgtaatcgggtttgataatcccctgagtaaaatgcagcgttggtatcacaacttatgaggtgggtgcagtttagtcagtcatcttgtaaattgctcaaataattcacccatcttcgttcgatggttgtcacatcctgatttttgtttcaggatttataaattatttaataaattattaatagaatttatattaaatgttcattaatttacaagtgaagttaaatgtgggaaataaaatttcccaaatataaagcatggatggatttaatttttattaaattctccatggttaattatactctctggaattttctcggatttttcggagctcaattattaatttttttaatcatacaaagagaagttcagcaattatttaaatattaaattaatcattaaatggtctaattataattttgttaagtacttttagtgtccaagtattttcaggatttttcttggaattatttgagcattggaagtatttttaacaattgaaagatcatttaagtgattattttaattggaaaaagtttttaaatcttcccctaagtcgttgggccgatttcggcccaactcttctcttcccgcgcgcggccaagccggcccaatcggcccagccgagccgccctcctctctctctccaaagtctgtttgatctccctctctctcagtcagcccaagcaaggaaaaaggaagccggaaaagtctatttttcctccctgctacagtgtcgtccctaaccttcagcctgcagtctggacagagcccgagctgcgcgccgcatcgcctttccgccttcaaatcccacccaatctgaccccgtttcttccggatttttgaggggttttgatcctctcatcctcctctatcttttcccccaagaatcggagcaaatcgttgggtattttatccaaatcaaactcgttttcgagtttatctccaaaaccgagattttggtttccggcttcgattactctcggttgggagtcgatctctttaatccaagcctatataaagcaccccctagtgcttctctttcgctcgccccctctcccgtggtctatggtgccttgtagcgccggcgtcataccaaccaaacctgccggcggcgctgggcaaacttttgtgaggtcgcgcccgtgaattccgtcgtcgacgttgt

SEQ ID NO: 17401 - DNA, 14332 bp, Oryza sativa
ttccgcggccaccgccgacagagcagccgccgcggtcctcctagtcgcgggcggtcattgttcgtcgttggtcgtcgtggtaagaaccgttgggttcgtctcgtcgtcctataggtgtacatgtcctcaaaagtcgcagccgaccatccaatctccggcgaggtcgcaaacccgggccggccatggatgacgtcatgctgacgtcatcggtttttctttttcccgtagattaaatcttctgaaaatcatatctaaataaccgtagatccgtttcgagtggttcaagttgctaaattttttctaaaataaagatctacatattaaaattgtccataaattgaattaaatttatttaattctttttaaatgggctttaattagatttaatcttgtaaaattcataataaattcatttgaagtcagaatgaggccgttcaagtctcataattcatctaaaattatgatttacatgtttgttaactttttatgaactgtttatttggtttttattagtctttttcttcgttttgcgtgttagcttgtcgtttccgtcgttgcgaaggttcgtgagtgcgtcggaagtgatcaagaagattaattgaagaccgattattgcaaggcaagtcacacagatcctaaacacaatcctttgagcatgttgatcctatatttaaattctctatttgtttcaactgtgcatttattttcgaatgtcaccgggtggtgtgaaccaattcctttgttatggccaatttgcattgaatatcctattccttgataccttgggtaataaattgattagcttgaaccttatgtattggtttggttcagctaaatgttatatatatataattgcttagcaatgcttagaaacattagctcactaatgggatgaatcatatatactacattattatttatggttatatttaatggtagctcacgatggttaatcgtgttatgataattaattggtatttaaaatatgattaatggtgggttgtgagcacatggttttgaaggtcgtgctcatggcaattaaggaccggttcgcgagctactgttgtgaaacatttatcgtgccaaccacaagccagcatgggcaacggctttatcttttgtatagcgtgattcattatagtgcgccagactgagaagtggcgagaagtccatgggggtcgctggggagtccatgccttgtttataagggggtgattatgatccaggaacggtgcactgttttgagttgtgttgtgcaaagggtattgtcacgatttcccctttgcaatgccgtggtggtatttcggggcatggcaacatgtgtggaatcgtgtcttgtgggtacagtggtacacctctggccagagtaaaactattcgaatagccgtgcccgcggttatgggcgagttgagcaatgtttttcgtgattagtctcacatctctcacaataattatggatgttatacctggtaataatttgcttagctcctggtttggagttagatctgttcagccgggtatggttgttcaggatggttgggcctgtgcagcatgggtgtgttgttcagtgttgattaaaatttctgattaattactctactgttttactactcttaactctttgctaaatgctgctttcgcaaatgagcctatattatgccatcctttggtatccttgtgcacttgcatacttgctgtgtggcttgttgagtatgtcatatgctcattcttgcaataatcaatcaacctcagttgaagaaaaaggatccagaaggagaagacgtttggcttataccccagttgagctgcctgtgggagtggagccggagcttcgctagattttatttttccgctgcagttttcttcttggtgaggactaagtgcctcttaagtaagtatttatcggtttagttattatgatggatttgtatattaaattgtcagtttgtgtacctcggctgattcctggacgaggattttatgcacaaatcagtttggaaattactagtgaatttccgggcgtgacaatggtgcaaatcttatcaaatacataacaatatggattgtttgtttttcaaattggaaatcgtattgacctacatttttttaagccatgtactggacagggcaagcactaaaactacaaattaacaatcatatttttcatgtatatgctactactctggctttcaatgaacacgaccatattatacttggcaatcagtaacaaaatctatttttaattggattttactaccgttagtattgcatgttagcttattatggaccatgtgaccgtgtttgcaaaaaaaaaaattaagatagcatataacttcattgtggacatccccacacgacacatgttttatatcatttgcacccctaaaacaagatgagtgacttgtttgagcattctacaagatgggtgattaaattgcacctacctcgcaagttacggtactaatgctagaatttggtaagatattttagtggatttggttgagaaaagaacgcaatctgctgatagaaaacttatccagaagaaaccattcaaggaggaatcgtgaagaccacggcatgacagtttaattctatctattagttaggcaagattcaataattttccttttatctttaggaagtgtttatctagtattcgatcaggacttgtaattttccttttttttctttaggaaagtgtgtttagtgtccgattaggactcttaacggcctacgggtataaatatgtacacctagggccattgcaggacatctttcgatcaatacaacttcggcgcatcgctactctttttatttgtctttctcaacgagttctcgcttcgagttgggctacatcggcttcgatcttcgatgaggggtaaggcttgttatggttgtttgtatcggcggggttatggtctcaatactcttggcttgtcgatattaacacctatttatcatatactttaggtaatttaagttgatgtttcaatttacctgtattggccagatcttttctagggttttgttggtattagttattgtttcatcgatctagattagcaaaggtatctatcacccttaaaaagagtcaaaggcttaattgtttagatattatgtttcttttcatactttgctgcatcaattggttttggcctactaagtcatgtttacaaccataatgtctagcctgttttttgattgccaataagagtttcatcggggttttagtcaatgagctatctaggctttgcatcggctcacaaggattacatataagttggatttagccgatgacaacaaatgttttattaattatttaatcttttggatttaatgacatcggacctctagccgatgtatgttttaaccttcggatcaacacttattccatcatatcattattagccgattggtttctactgatttatattcttgtcttatcacattatcaccactcgattgtctttatatcattgtttactcaagtatcagaatatacattggatatatagccgattgttcaaaaccctatcaacatcggctgacatcgacgtcggctctttgttgatcatcataactgattggcatgtccgcatctaatcgaccttaggatctgtattggagctaagcataactccccgtatcttattaactttaggatctgtattagagctaagcagaacttctagacagtaatgttcgttgacttaaggtcgcgtcaatatatatccagcaccatcggccgaacgctctaatccctttatttgaggagagaccagaatccttattatacattccgttcgctatttgggttggttgggctatagaaaagcccgtgtatcgccatttcgcccaacttcccggccttccttgtccatctcccttttctctcctcctcctcgcgtgctccccgcgccgcttgcgccgatctctccgtcccgctgccggcggcgccgcgcccccacccctgctgcgtgctgctgcttccgcggcatcctcgcggagctccccctccgctgccgccgatccccgtccctcgtagcaccggggtgctggcgtcgtccgccctgctgctgtgctgctgctgctgctgctgcttcttcttctcccgccgcatcctcctcctcgccagtgagccacccgtgcgcgcatcccttccttccttcgcatccggtctcgatctggaagagttttgctcttcgtattaaccttagtcattactattaatcagtttgtttggggaaaaaatatttggggggagggggtggttcaaactgccccacgttaggtctgccctttttgtgctttgtatgtatgtatctcaatggcattgtgttggcagttttgctatctgttagatgactaagaactgtaataaagaaaagatttagtcgagtttgcgcaccgtcgaatccatgtgggggatgtgtgagatttgtgctctagttgtcctctttagcggcatcctgcggtagggggatggcggcggcggcggcaccagattagggttcatggtggggggattgggggagggggtctttgggcttatagcgatgactggagcggtggtggccgtggtggggtgttgaggcgacacctcggccttggaagaggatgagggcgagttccggtgatggcagtgagggaagattctcagataggctaagaggggtgggtgggtggttccggaggttcaagctggaggagacaggggaataaatgggatgagggaggctctcaatggagttgaggagagggcaatgagatagtggtgatcgagggtggcctggtagggagggagtggtggcacggaggggctgaagattgggaggatgaggtggcaaaagaatgagagaaagagtaagggctaagtttgtgaaggctgcacgtctttgaacaatcgtggctatcaaaaagtgagttcagttgaccaatgaatagacaacccctaggttgattcaattgcatttggtaatttttgcgctctaatttgaatgtgaaaaattagtaccatgctgcaaaaaaagagaggaaaatatggttggaacattaaacttgattctcgtagcactggtgaagtggtaaggcaagtgcaggataagttcctcttgcattgcctctgctttgcatatataagtaccagaggtgagggggatgggacgggagtaagttcacccccgagtcaccagccaagtacacccacccaaaatatgtgaaatggtgagagtattgtttacatctgacccacccaaaaatccttgttctatccccctccccccctcgcttcttcactttctttctctttatcctccgtcttcgccctactttgtactatcccacacaggcccctcttgcgctaatttaaccattttgcttatcaaaaccagattagagtctgttccaggaaaataatctgaaacgttgggcctccgtgtatacctgagtgtgcataccccgctcattatactaaggctgtcccactagccagcagaaagtacagagtgaaatatttaccccatttcatagcccttaaatctagcaggtagactcgattatttgattttgtcctctgcctaagacttccaccttggcccgagtctcatttggttgcactgcaaaaactactacctggttctgagcagcatctgtgccaattttggtttgatgtgtttatgagactgtcaagtattgatttacatcatggcataaaataattctagctatttaagtcattaacatgtaatattgtgtgactatatttttttttctgtggaggaattgggatggtgttttttgcagctacctagtcatcttctttggagttctagtgtcaatggggacattgaaagttattttatttgcaccaggaattctgtgtgtgaatgaattatatgaaccccattatttgttcctggctcccatattagcatgtgaatatgggatagcataaacacccaaacactcgtaacatggaataatcgggaatcttgcgatgaagaagctggaatgggattgagttgtttaccgaggacgagggtcgacggttcaggaggtatgtggcggtggctagaccttcggcccaataggagggtggcatggaggcttgtaggaggagggtacggacggagttgttgagggtgcgaatcatgcgttcggccttgccgttctgcggggaagtatatggacaggagagctgtaacagggaacctctaccagcgagaaaggaggtggtgttgtgattaacaaactcggtaccgttgtcggcttggagacacttgaggcggtggccgaactatgtgtgggcatactcaacgaactcaacaatatggcgatgaacatcggatttctggcaaagaggaaacgtccagcaaaaatgagtaaaatcatcaaccagcactaaataaaatttgaagcccgaaatgctcataacaggagaagtccatacatcacagtgcacaagttcaaaaggagaagaggtactggaggtggacttattaaaaggaagacgagtgtgtttccctaactgacaagcatggcaaagggaattatttgtcttggagcgaggtatggcggataaatgttggagagtggtgacggcggttggacccggatgaccgaggcggcgatgccataatgtggaggaggtggcaaggttgcagtgggcggcgatggaaggtgcagcggccgggagggtgtagagctcgccatggctattgcaacgaagaatcacgcgtcgggtctgagggtccttaatagaaaaaccaaactcatcaaactcaatggaacatttattgtcacgggtaaattggcgaatagagagtaaattgcgaaccaaagagggagcaacaagaacatgacgaaggtcgaatctagtggtgccaatagggagaaaggaagtgccacggcaaacaaccggaatggagtgaccattaccaacggtaatataagtttgtgagttggggaggcgagtaacgagtataccgtcggtggaggacatgtgcgaagtggcacccgtgttgagaacccatgagttggggttgtgaagcgtcattccattgagagcggcgacaaggccggcttggtcccaagccagctggacagaccctgcaggcggtggcgaggagtatggcccggcgaaggcagtgtgagcctgaggatacggcccaagtatcccggcgctgggagaacgccagggttgctgctgtcctgcccagggcaagaacacccatggtacagcttggcatggagcagggacggagaaagtgctggtgccgaagctgttgctgccgttgttctatccaccagggcggccgccgaatccaccgccgccgttgccgccgccggcgcggttctgctgctgcccaccgctgccagaggagtggcaagtgcccccggtgcagttggagtgggcgctgttggctgcgacgagggcagtctcggactggacttgtaccgagttggcgttgcgaagctccttgagaaccagcgtgttcctcgcagaggcgaaggacggcaagacaggggcgctcgcgatgttgtcggccgtgctggtgaagcgcgagttgacgccgcggaggaggttgaggacgagctgggactcggtgacggggtggctaacgtcgcggagggcatcagccgccgtcttcatgcgctgacaatagtcggcgacggagagatcgccttgggtcatggagtggaactcgtgatgcagatagatcgtgcgaggctccttgttggcttgaaagaggttgtcgatggcgatccacaagtcccgggccgattgatcaggctccatggcgaggtcgaggacgtcgtcggcaacggagccgaagagccagttgcggaggcagcaatcggcctgttcccaggtggcgtcggggttggtgagaggagcagcgtcaagaagatcgaggagaccgaatttcccacacatcgagcggaagaaggccttccacttgttgtagttggggttacgaagctcgagggagatcggaacatgggacttgacggtgatggtcgcatacgggttgacgaaaaccggggcgacggtagaggtggaagacgacaccgtagcggagtcggtggcagcgaaagtagctgaggaagtggacatggtgagggaagaagggcgtggcagccagggaggcggcgacgctcggtggacatagcgaccagagaggaagcagcgctggagcagcggaagaggagaagaaaacttggaatctgataccatatagaatggaatggggagaacaccacacacccaatgggaggggtggccatgtattaatataggaagcacatgtacaggatcctcaattagaggagaatacaaggaaagaaacaatacaatacaatctgtacatatatggcaaagtattcctaataggcactgggcgagatgcaacaaggaggaagaggaagcggtgctagtcgttggtatgctcgtgcggtcgtacctggcagatagtgggaaggggaagggtgtttatataaactgatgataccccgctgcgttgctgcggaacattgtaatagctaaatcagataaattgtaataacttgaatatgattaaaaaacttctatgttgtttcaagagtgctatgtctatgaggatattttttcataaatcaaacaaaattggcaattaatagtatgaggatactaaatttggttgttagtgtcatgatgttttatgttaggatcctccagatgcggtagtgcaacttttgtgttaggagaagggataacatgatggtcatataaagggtcaataatatgaaagggaacacatctggaggataaacacatgggttacaatctaggaggagaagaaccgttgttggtaggttgttcatgtgtcatgagttacaaagagaagattagcattgcagttttgcagcctgaaaattttatggaagagaatgttttttccatgatatatttttggaatcaaccagcaattgaatttgtacctatggtatttttttcttaacagaagcatccatgtaaataagtgtttaaacgctggaagatatggttacctttgtgttaggaatagtgtcttcaattctgaatccatttgtagtatgcaaaaattacatatgaaagttggacaatgcctcagacggtcagacctggtcacatagatatagtgatgaatcagaaggcatcatcctgctattggcgtgctccttcagctctgaataatcggataatcggcaagttgagcaattttgcccagtgccagcgacctccttctgttctgtatttgggctgcaaaattgacgatgatggtgcttaccttcatggattagaaaggcggtggtggtgcttacctccatggcgctgggcacagcaagggccacccttgataaaaaaaagtgcgttctttagcccgaagaggagtaggcgatgtgcagctggactcaacctggtgccccgacatacatacatgtgagggagatgaaagtggaggggaagtttgagaagatgggcgacgatttgatagtcggaggaaacggattcgatggcttttatgcttattgccaatgatatacagatgtgagaggaaggagatcgaagtgtaaacgaagggatctgggtgaatggggagcgaaccacaggaggtcgtgatccctcaactactacgcacaacagcgctgggaggaggagagtcgccataaaatcagcaaagcaagcggcgcggtgaatggaagaggcacgacgtttgcgcggtggtcgcgcttcctggctgcccgccacgatcgaggaggagagcgatgcgggagaggggagtcgatgcgcgtggggccggcgaagcagcgagatgcgagagaggagaggtggggagcgatgcgcgtggggctggcgccgtagcaagatgcgggagatgagaggagaggagcgatgcgggaggaacggccgatgcggatccaacggtgaggacaaaaagggtgacatggaagcaccaggaagcggagaattctaacagtgaggatgatttgtataggtatataggatatcatttattttactgtgacatattttattattaaagaaaccttaaatgtgacttatatactttaggctaatttatcctaccgagagcgagagagaaagctgagagaaagagagagaggagatggagacttatacgtgatttatctcttctattcaattgtaaataaatattctaataagtgtggtgtccagcagtaaattttttatgatttctctcttctattaaattagaaataaatattttaatagatacggtgtccagcagcgaatttttgtattttgtatacaatgattaatgcgctaaccacagcacaagtaattgaagccccatttcatcaaactttcgtttgtggatttgcatcggagttgccccatgttcgttgggggtacttcagaaatgggctcaggcccattacatggccataaccattagcatcgcactcaggggcgggcccactattgattcaagggtattcagacgtatacccaagatttttggataaaaaataagtatatgtactctatacctcgtatatgtattaagaaattaaagaaaaaggctaaaactactcattttgggccctgtttcatcgtttcttctctattgggcctaaatttcccacttccctcccctttcatctcagcccacaatcagtttgggccacaactagttcatttcccctcctcgcctaggcacagcaaaccaaagccctaattcccaaatcggccaaatcctaaccagaggaccgaggacgtgcgcggtgtggcggcgaggacgtgcggcagtgcggcggcggcgacttccggctgcgtcggcggaaggcggcgccaaggcgggtaggagcctaggcggcgcgtcgggcggcggcgactgcagtctagtctgcagcgtgctcgtcggcggctgcggcggaggcttccggctgcggcgtgcgcggctgcgtcggcggcaggaggcgccgaggcgtgcaggcggcgcgtcgacggctgcggccgtgcggcgttggggctcggccaggcgtgcaggccgccagtccgccaggccaccacacaggtacgcgatgcggcggccgaacgaccacggctcgccggcctggcatggattgcgtgaggggcttgattcattgattcattgcattgatttgttctaggtagttcaatagtagttatgttttctggtggcgacggcttgtttcattgatttgttctatagtagttcaatagttcactagcaccgaaggattcaacttcctcagttcctgtcttctttatttttcagagtgttaactgttaagtgtatatttattgatagattgatagtataaagctgtaaatattaggaatttagataacttagaaccataatatttaattttcagtgtgttaaatttatatatatgatgatagtatgaggctatatatgagctgttgttaggaacttagagaatttagagagggtgttttcttcgatgaactatataaaaacaagaagcaagatgagcaacaatctgcatttattggaagagaattttttgtacaagttaaaggatgaggacatcatcactcatttttaaaatatcaagcattgaaaagttctcctctaaattgtaagttttttttatcattttaccattttctatcctttacatgttatatatgttgccactttcatatgtcgaacaattagtacttatatatgttaaagaatttggacttatgatcaattctatcaatttataaagttatggccaattttgtgttctatatgctataatattatacaattagtaatgtgtaatattataccaattaattattggacttctggaagtaaaaagaattttgttttacccctacctatttcgaatacctaacctctaaatcctgggcccgccactgatcgcactttctctctgtttgctctcatctcgttccttttccttctttccagagcgaggctgtttgccgctgcagcgccggcggctcactaaaccccagaacccccttctctcgccgccgcgccgccgccccaatggcggtggacaaatccggcggcggcggaggcgaagccggcgcctcttcctcctcgtcgggcgtcgccgcctccaccatggaccgcttccacaagatcgtcctcagctgggactacgtccgcctcgtcgcggactccaaggtacgcccctccccgccccgccccgagcgctcgctttgcaatcaccggcaccacctttgaattttttttctatatggcggcttgggaggacagggcgggcagcagcaggcgaaggggctggggcgcgtgaagaacacgtacgcctcggtggccgagtacctcgctgtgttcgagccactgctgttcgaggaggtgaaggcgcagatcgtccaggggcgcagcgacgagaagaaaggtgggtgggtgggtggcgcgcccgatttcgtgttgcccccccaatttgctgtcggtttatttaacagtgtgtgtgtgtgtgtgtgtgtgttgtttttctctcccttgcgtttctgtgtgggcagaggctgggcaggactggcagaaggggattgtggcgtcgtgcaccgagtcggaggggttccacaaggtgtccatggccgtgcttgatgatttccgggagatggtgtcggagaacgatctcctgctgctgtccaaagagaaagtaagtgctttagcaccttagtggtgtgataggaaatgtttcaaaaggtatagatggctacagaatttagtggaacatatagcgtgtcaagaactcaagacaatgttagttacttatctgcgctcctacatttggaagggctatggggaacttgagacataatttcaccagaaaaagtgctttccatggttttagataatatgccaggctagcaaaatgctccatcgattctatgcgatatctcttcaagaaagaagttatgattgaaaattcatcacattgatatatatctgcacttttgtagtttgaagagggagtgacccccagtgcatatgcctttgccttagtggaacagcggggtggcagagaaacgatttctctaaggacatttgtggcaggtgaaataaaaaatcttaatgtagcaaagcctgtgagctgttctaggctgcagcgtattgcttccattttttcaactacagagagcttcctctggattttaaaggtgagtttcaactgctaataaagaatgcctgagttttcatgcttgcataattcattgacaacacatatgaatatgctattttcttttatggttaaaattgtcagatttgcagcttgtctaccataatgcgagaattctcgggcatgcactctgtagcatcacttccttttaaggatctgattctttcagctagtgagaagaacagtggtgggaatgatcaaaaccgtgcttggaatgtccctgagccacttatggattatcttaaaacaaaccttaatgattcacaactagatgcagtcaacgtgagcattattcttaatatccttttttgttgctcaatttagttctaagaaaaatcagatgtctgattgatcaatgcattatctcttgcaggcaggtctttctcgcagatcctttgttcttatccaggtttgtttgcttatttccagttatatttgtttatttttctgtattatttatcattaacctattttagagaaatgctagtgccttgagaactagagtatatgcagctacatgtgctctacttgttgtcacatgccattcatatagaactccaatgtatatttgtaggggcccccaggaacaggaaaaacacaaactatccttggacaaactatatatatatatatatatatacacatatatacatacatactatatgctgcaagacatgttgcgtgacgttgagaacctaacttatgctgtgttctcatgttcaggttgggaacatagtgcctccgcacggtaaacggagcggttcattagcgcgtgattaattaagtattagctattttttttttcaaaaatggattaatttgatttttaagcaactttcgtatagaaactttttttgtaaaaatacacaccttttagcaatttgaaaagcgtacgcgcggaaaacgagggggaggggttgtgaacaaggggttgcaaacacaggcttaccacgagagagatttcatgaagttcaccagttgatcagtgatcggagacacctctatacgtctgatgccaggaaaaatcaaccaaatgtccgctacctggacttaatgaacttgacgccagtttggacgtcagaccaaagtacaaacctttgtgatttttaaa

SEQ ID NO: 17402 - DNA, 4847 bp, Oryza sativa
  unsure (1)..(4847): unsure at all n locations
cattcactgcagattagtgctggtgccaaaacgtgaggttactgcgagtgcagcaaaaggatgtaccgtggatttctcgtacattttgcttgaatgattttttactgaattacagggcctgaaaaaggtgaaaggtactgaaataacagcccagcggcaaaatcattgcacatgggtaaagaagcaaatcttccagtgagctgcctggatctcatcgacctgagtaggtcagatcctttatttatgtagtctagtgtcgtatgagattggcaagacaatgttttcacacggtgttgaacgagtgtacgtatgttggagacaaccagatgatgagttgatgatggaaaagaacggacgaatttggtatagtataccacaatttgaagatgcatctgggttgtcaccgaaacttgatagaaaatttattgagacggttcatttagttatggttcttgggcgaagaatggagccaaacagttcggattctttaatgattaaaactcaggtccacacattaaggcgataatttcaataattaaccccatacatcaaatttttttagctcggctattgcatttctagaagacatcacggtaaatttaacctggcacataattcacctccataaaactgaaaaaaggttcattattcccataactatttcatcaaacaacaaccttcatgctttcttcatactagcaggacggatcacacaatgcagcctcctcgattaggacttgtcggttaatttttcatgagggtattggatagaatcgaggggaatcaattccacaactattaaggtgtgaaatcaattccttctaatcacgctgaatccatgcataggaattagccgaacatgccagtttatatttcctttgtctaatatagaaggaacattattaacaactcaaactatttgtcaacttcaggtaggagtggaggtagattttatactgcaatattaggaatatataaatacatgactaccattatgccacctatacaatgcgaactacggaaaagggtgaaagaaagaatgtcaagtaaagaaagaaagacggaaagaaagaacggcaagtaaaccgctgagagaagttttacagaggaacgtttggattggatgtttgcatcaaacacgtgtataaagtttcacgcatagattttgactgtaacgagcctcaccactactctgttaagaagggtgaacctaattaaagcagcgaagatttgcacaggtaatgaacgcctgaaggaacatggactcgctgctctccaacttgcataaaatttttccaaggggtgtagctttcttcccacttcgtttaaacatctaggcaaaacagctgatactagcatctcaaatgtacagttgtgattcaaaagaatgacagaatctcatctaattattgacactactgaaactgcttgttgattcatcatacttccacctgtcaaataaattgcagagagcagattatgtaaagtttgttgagcacaacaaataaactgaaccagtcggaatgaacaaaaattataagcaattactctgaacagaaaccactgggttctgaaaatggattccaacagacattaatcaaagtttgcaaagttggaagttgccttctcactactaaaatatgaggaaatattcaaccacaaatatattcaactactaaaagatattatgacaagttgccaacagatactcttgtatgcacaaagatttcaaccatgcagcttactgctgcttgagcgcaagctatgtggaaaggggtacaaaaattttgtgcgcagtagtatacataagttgcacctgactagggctgtcaaaaatgctcgagactcgtgagctactcgagcttgattcgttatgagcttgattcgagctcggctcgtctaagaatcaaatcgagctcgagcttgactttaagctcgcgagcctaccgagccgagctcgaataactcggcgagcctcaacgtctggctcatgttctttctcctaggcatttcctccccctctctctctcttactcttcaaattctctagtaggagtagtactggagtagcacaactgcacatgtactagcagtggcagggcaggagggagcactatgcatttgttgtcccatttcccaacaagagagtaggagtactagtgtgtactagtaggagtactagtgtgcggcttgcacagttgcactagtatacataggagcactagtatattatttttagccatctaatcatgcatcacagtgttagctttttctttgaatgggatgaattgttccagtattctaccgcacgaagcaggcttgagagaagctcgaagctcgaacgagccgagcacgagctcaacttcaagctcgtgacaaacctaggctcggctcgagctcgactcgagtctatagcgagctcgagcctacacatggaagctcgctcgagctcggctcgttgacagccctacacctgaccacatcacaggcccatgtactggaaagcagcagaacgtacatgtggaatggtcgaacgcgtacattacactatgatcttacaaacctagttttcctggaacctacgagtcaagattttgattcagacggtagattttaccatttggatcacaatccaaacaatcttagctggcagaatgaatcctaatcaagcagagtagacaagatcactatgtgctccgatcaatccttgacttggatcccaaataatttgttagctgcaactatttcttactataatttgtgttactaattcatttaaaaaaagatatgctagtaacactcctgcgtgttactaactcgccttctaaccttacaatagtcttatatgactaggttgtatgaagggaaaaatttggacaactattacaaatctcttttgccctttgtcacattttgagaaaaaaatattttgacaattgaatgaccctggaggaagtgtattacaaatatcttttgccctttgtcacattttgagaaaaaaatattttgacaattgaatgaccctggaggaagtggcctttatgtttggtagttcggtactgtattcaatatatgcattgacatgaattaaggccaagtaggatgatgtattagataatacaagtttcaaatgtttgttacataaaaaagatcatgatacacaatttctattttaatagtgtgactcctgcaagccaagtctactattttctccaagtaaggcagggctgtggctgcccaatgggttggttgcacagccaggttccaacaaatgtatattagttaacattaacttttttaaaggatttgatttcaaattttaactcatcattcacccactaatttaagacaaagcatcaaaaagacaaacctgcagaggaaaattggatgtagcctactactgacaacctgacttcccttagtttcttctctaaacttgtcaacatgaagaacctcacattggccacaaatcgcggaaactgttacagttctttgattacaggaagcaaatacctggaagaacataacaccatcaaagaaatgtagtaagttattctcatttatgatttatcacaacaagaacaatcagttcctcaccgtgaaaatttggcaatatattgccacacaagagaagcataaaaaatgtctaatctaatttatcgatacacgagatttccagcactgcagattaaaaatctactatttaacaatcagctatttaaaagccaaatgtgaattacatagatttttcatgctatttaaaagaactattgataatgcaaattacatacttcccctagccaaaagcaatcctcctaaacagattatatattcttcacaatggttagttggctcacctcattctcttctgcagtgcatggtttactgatcaattctggaatatctgaagcaaagaaatatggactaaccaaagccatcttagacctagaatcatgctcttcccacagtgactgcaaaaggtaacaataacttgactattttagagataatacacttacaaagtctaccacaagatgatctgacaggtgcatagggggcggttactcaaacaccccagtacgcagaggggtttgcgccccatatcatacaagagtatgtagggtatattaagaggaaagatacctgcagcttggatggagcagactccttatctttggaggcaaccaaaatatgatcatcaagattgtatgctataccatcaatgttacaagagtaatagtaagtcttgttctcgactactctgagaggatcaccaacccaacccacaatactgtgatctgtgctgcaaacaatagttttatccttagcatcgcctataacaatttcattctttgtagataaatccccattcgatgtcaactcatgaacattgccacgttctgaaatggcattattttccattgttcccacaccttgaggttttcctcttcccttatcaacagctgcagaagcagagcctgattgtgattgttcttttgaactctccaaagccaacttatcactattatgtacaatcctgttagcttcactggagtttttatcgataactgttccatctgctgcaagttcttgattattatcctttgtagttcgattttcagaaactccctgcgaaggaactccactaataagattaacctttggtgcaacaacagttcttgtaaccttgccatatttcggaggcaggggttttcccttgctacgagctacacatgttggacaataccactcagctttaggtggtagaacattgaccccgtcatgctgaaggcattttaagtgtattgatgagctnctgtaccantgtatgtgcattcagtggccag

SEQ ID NO: 17403 - DNA, 4478 bp, Oryza sativa
  unsure (1)..(4478): unsure at all n locations
caaagcaatgtgggggtcttgggatacagaacctagaactacaaaacaaatgcatgttaagcaaatggttatataacttttgaaatgaagagagagtttggcaaaacttgttaagaaggaaatacctatctaagaaaactttgactcatgtagagaaaaaccaagggattctcatttctggtcaggactcatgatggttaagaacatctccctttcttgtggatcattaaaagtgcacaatgggactcaggtcagattctaggaggataaatggaacgggaatactccctttgctgctcgttacctggccttatacaaccttgtgataaacaagaatgaatcagtggcagtggttatgagtaaaagacctctaaaagtgtcctttaggagggctattgtgggtcatatttaaaagcttggttggaagtggtctcaaaggttatatcaataaaattgaccgagcagaatggtacctttttgtgggagatacaaaagaatgggcgtttctcagttaactcaatgtacaaagcaatcatgtacagggaagtcgttcctaaaaaggacatgatttggaaactcagaataccactaaaaattaaaattttcttgtggtacttaaagaatggagtaattttaacaaaggataatttagccaaaaggaagtggaaaggtaatgttaagtgttgtttttgtgattctaacgaatcaattcaacaccttttcttagattgtattttagcaagattcatgtggaatgcagtctatatatcttttggaattcacccgtctaggaatgttgctagtatgttcggcaattggctaaagggggtttaacccaagctaagagctcaaatccttgtggggatttcagctttgtgttgggcggtttggttatgccggaataatgtagtctttaatggctccaatactaattttctgttgcaggtgattttcagggggactttttgggcaagacaatggtctttgctacttaagcaagaacatggccaaaaagtgacacaaggttgcttgattctagagaagagagtttctggctttttcgcaatgaagggatggaacttaacgaaaagattgggagattaatgctctctggttttcttgtgtggtatggttgaaactttgtattaactttttaagaatttctgttgctagagcctaagtactcgggtctagttgcttgtgatggtgttaaaccttgtgtaagggtgtgagtttatgtactcttgtaagtttcgttggggctgtgtacatccttttttgggtgtagaggccggtttaatccattatctaaaaaaatgtaaaggatgcactatatggcactctgaagtaaggtttcctgagtatggtcttttggtgaacaaaagatgggagatggatttttatcgctcgaggagatatcctctcgttttcttattttgtacatggcattgaaaaaatcatcagaaaattttgagaaaaaaaatggaaagacagaccagtatgtgatgtgtcattccacaaccatgtaagcttaaattcaacttgtacaattagaaacaaatatagcaaatttgactgtgaattacgtgttttattcaaagtcgaatttgttgtatgagttgaatttaaacatgcatgtttgtagagtggcatatcacatattgatctagcttgctttttttcaatttttttagtgattttttgagtgatattaaaacaagaagacatcctgtcaaggtataaatagtttcctaaaaggtgtatattttgtaagactacaatctagggatagagagagagagagaagagaagagaaaatctaagaaaaaaagttcaatccacatccagaaatgaaccagtggttatggttttgcactcactaaaaaccagactagctacaccgtaatacactttgaacagctacataatacagagtagcagcagcgcttatatacacagtttggggacaactgcacaaataaacccaacaatttagctatttagacgaccctctcatccttctgcattcttctctaatttttggatcgaaacacaaatttatgcttgtgtgttatgagccactactatttggagcccccactatcctctgcacataaagatcagagcttagtggaggcacgacgaagctcatcccgagcttacacagccatccaaagctgtatccttaaaatgcgcaagctgctaaatgattgtcagtctctagcctgaaaatgccggtgccttccaacccacgttttagttcatcccaaggaagaatggtaaatagagagcaaattaaatggtagaggctatttaacctccatggtcatccaagttaagaggaataattggcacgggtgctctctgtttatatatttattatatacagtgcatgctagagattctagttatatttgtctttctaaaagaattgatggagacaatgatatacacatgcacatagaggtacttggaatctgaaactcatataggtattgacaattagaagcctcaaatcagcactatgatttttgggattatttttccttgtactgaacaacctgcgtacatagctagatgcatacatatgatctgaaaaaataaagatcttaagaaatcttcgtagacgaagatttcatgatgtaacatcccgtctctcccaggccgggcccgcttacatatggtagctttcataggtcatagactgccctcacagatcaactttgtccttactagtgagtgtgaactcaggaagaacttgaagaacttacatatcttttctgcacacttgaagaacttacatatcttttctgcacactttatccgtccttactagagccctcacagaccaactttgtccttactagtgagtgtgaactcaggaagaacttgaagaacttacatatcttttctgcacactttgtctgtccttactagtgtgaactcaggaagaacttacatatcttcttcccgatcggtcacccgtccctaaattgctccaagccaagcacgattaacctcagagttccttagtgatcggcttccgaaaaaaaagttgcaacttgttgatatgagtattttattaatcctattaagtactaggctgggatgttacatatgattaacatcttttttacggcatgacaaagatgatagatttgctgcacgttaactctctcgtggttcttactacccatgcctccatagctacttatggtctgccatacacaccctctgcaataccactggcgatgtatgagccactcacgtgggaccagacccgcttgtcagtgacttctagttctagccgcagtgcaaaggatctatgcgcattttatcacaactgttgcatggcctaaagtcccagtgcctcccagtcctatagttcgagctactaaaaaagaatatatatatatatatatatatatatatatatatatatatatatatatataggacactcatatggggcaccatggtgcccgggcaccatggtatgaaatacacaaattcgtccaaatttttcaaaattttcaaattgtgagtatatacctagttataagtattcgattcatacctatacctagcaacaaaacaactcaaatttaactttatttcacaatccattattacatacctaactaattatatgtttggatgctatatacctagaatcaaaatctaacaaaagcaagtttgaattcagttcaaacttgctttgaactagttagtaaagtagttaacgttaatacctaaatatttgaaaaagtttcatactcatttgaattgggtatatagtaaatttcaatcatggtgcccgggcaccatggagcaccaaacaaatttactatatatatatatatatatatatatatatatatatatatatatatatatataaagggcttcatttcgttagaaaatcacatattcatttccttcgtatgaacagagaaaaatatgatgactcaaagaaccctaccacgaactttgtacagcgtgcattacttagaacgactaggaaagtaagataagataagcaagaataaaaaaatatttgtcggaatagcggaatagaaaattaagaaatgcaaaaatgcagaaaaagaagtgcctctatttagagatttatctacttagatgaaaaaaatcatactctatctatattattaacgaatatgtatcccaacccatctcgaggtatttgtatcaatacctattcggaagatcccttttttctgtgccaggaactaaatttgaactggtgacacgaggattttcagtgtatgtatgtatgtatgtatgtatgtatgtatgtatgtatatatatatatatatatatatatatatatatatatatatatatatatatataactaggtatatactcacaatttaaaaattttgaaaaatttgagtaattttgtgcatttgaaaccatggttgntgngctcatgtgatcgcattcagaggtacag

SEQ ID NO: 17404 - DNA, 1500 bp, Oryza sativa
  unsure (1)..(1500): unsure at all n locations
ttcgtgaaattgttattctcttcccctttttacgacttaaatcaacctaacgctcttaattcggacatgagctctgccagctacctcatgtgctagagctctgcaattcagccctaagcctaagccagaaagatcattttggtttttaagcatagtaagttagtaacacaaaagtcacacatacaagtcgacttcctttaaacaggaagcaataagcaaacttaacatttcgcatactgcatgctaatttcttttagtaagacacaaggaaaaagatggatcgaatcctttcagatcttctacgtagcaacgtgaaaatcacaaggcaatattcatacccaggcaaacaatcagaagacaaagcaacctcaaaagaaactgacgattgctttacttccaggctacagctgacgaaaatttccgtcctgattgctactggtggagaaggcaccgatctgatggtgattgtgctttcaattctcttcgcctgcgcaaaatccaaggtagcaggcatacttgaattcctgatacatcccaagccccagaattcttgccagaattatattgagaaccaaactcatgcctgattccatggccttgtgtatgcatcatgtaggcatccaacttccttctgcatcaattcctctcggtgtgtgtgtgtgtgtgtgtgtgtgtgtatggtgttcctttaatggctcatcacttaacaaggctatggagaattttaacactgactgaatcatgtaaattgtaaaaaaaaatgcttatataggatgacacaccgatttcggatgactgaaatctcaagccaatcctctgcatacattagcacctttgaaaatcgtaatatatgtcaaacataccaagtggtcacttaagactggtacaggagaggaatgtgacatattacgatgttaattagctgagagagtgaaacattcatggtcattttattcggatctaccttggctcgcatgcaagtgaaaatgaaccacccgtcttctcggggcatacatcgcaacgtgctgcagctatatcctaatcagaatcggcgctaacaagagctgggtttggagagaagttgagtatagtgcattgggatcgtctggtagtcacactgagttgatgctacggttagcttcggttcccggtgcatcccaatcctatggctcatgagcacagcttctttctttctttctttcttatccctgcacatctcgtgaaagctgagtcttcatcacatattgtgcagcatttaaggtagtatttggttggtgcgatggaatgggttgggatgggacgaacctgtttttcgtagcgtttggttgggggatagatgggatgggttggtccctttagaagaatattcccctcagatccaagaccaaatcatccagcaaaaacgagtggatgagttcgtcccacctgggtcggatgcacggcgtgagaaaagctgatgaactncttgcagacgaagaanntgcaaattcaatggcgcgc

SEQ ID NO: 17405 - DNA, 2230 bp, Oryza sativa
  unsure (1)..(2230): unsure at all n locations
atgaactgcctatcgtttgacagnngctncataaatggagagttttgcatcctagtgaagtgtgtacaaagcaaggagcatctctctcatacagtactgctcagcatgctagttcaaggtggctgctgcaatttttgttctgtcatgtgaggttttatcttacgttcataatgtaaagtccctttctgagattggtgagctgtgcaatatgtaactttcttggattccatccattgcacaggggctagtaaaagtaaatcatagactggatatctggtcaatcagttgtttctggctatatcactatttgcttatgtagttaactttgttggtttagttatcaatccaaataatacttgtcataccacaggttgtaggttctgcttcaacattgaaggaagataaacactggaacaaccttgttgagagtgcaaaagagcggggtcgctatttccaggtttgattgctgccaccttttccttttgttcaaagcataggaagtaaacacttgaatgaatctaactatgagcaccttgtaggttccgaagccattcaccgcattctttgtggatgataagctgaaaaccatgaaagtggagagagctcctccggagctgaggactgtgcaagcattggaagcaataaacgaagcagttgtagggcaagaactcatggatgtcgacgatgctggcgaccaagaggatgaagggtatgatgatgatcccgtggaggctgatgatggtggcggcgatgactaaccattcactaccacatagaggtatgtagaagagcaacatttgtttaggtggacttggatgctggaccccagccacagccagggcctttagttgagccttcgaattacaaattcagtgccgtgattctttgctatttcgggtgcgagaggtggctgaatgcctgagttcatagttgcaggcatagctacatcttatgttttaagttatgtatgtatacaaagccccttgcaccaaaagagctgaaaactgctcaactggctttaatttgtctgcggctataattttgcacggcagttgtgcatattgttccaaaaaaagaaggttgctctaggctgtggcagtctgatggcattttctttggtgttcgtaggtaagtgtgtaaccagtgatttatctcatctttcttttacatggggtacttgcagttgtcgaagaaaaccattgtttgcttttctatatgaaagccaagtgcattaaccgcagcatacatgcactgcctgagcggcagaacacacatgggctgccatcatgagtttgcagctgctgcctgcgtgtagatgagctgcacaacagatggcattggcctttaaaaggcagagtaaaagagcaatatatgcagtgacatgtacacagagacaccgagaaaccaagtcgagagaggcgtgtatgcacgacaggaggggtttctagtgcaattctttggtttttgtttttctcctttttcatgctcaaggtaaagtgagctggatgggcgcattctaagccaagaagtctctctctctctctctctatatatatatatatatatatatatatatatatatatatatatatatatatatatatatatatatatatatatatatatatagatacacacatactgcgagggagacataaggggggcactggggcgccggggcagcgcgggcgcgagcgcgcgcgagagcgcgcgtgcgcgagagggagctagatggggcgctatacctagacatacatatatatatacatatacatatacacatatatacatacagatacagacacacacacacacacacacacacacacacacacacatacgcggagggcgcgcgccccaccgatggacagggggacccacgcacagaaaagcgggccccccgggcgggtaccgacacccacgcctggggggcggccgggacacacacgccttaatgacacagggagggcgcgccggttacacgcaacgagatcgcggtcaagacggcggcgcctccctgtgccgggtgtgggcggcccaccaccggcgcccccgggagaccgaccgacggggccggcatttggcggacgccagctccctccgccacaagggctgccggccgcgcgccgggccagcgaacgggcgggggttccgggagccatcatggtcgcccggcgctcgcgcgcgggcgagagatgtggcgctcctcgacacccctggagcccgtctc

SEQ ID NO: 17406 - DNA, 1002 bp, Oryza sativa
  unsure (1)..(1002): unsure at all n locations
tttgaacgtacgaacaactgcacagnagcccancatatttctgttaatattttgtcaggttggtgacccagttcagttgcctgcaactgtaatttcatctactgctcagaagttagggtaagatctctctctctctctctctctgttctatacatactctggatgtaaggttttacaacattctaaataatactaatgtatccattaggtacggtactagtttattcaagagatttcaggctgcaggttttcctgtgcaaatgctcaaaattcagtatcgcatgcacccagaggtaatattgcctaaattcatttaaaagatggagactggagtcgttttcttattttattaatccactaaaaaacagattagtatattcccctcaaaagaattctacgaaggtgtcctagaagacggggagggactcagcaagaaacgtccatggcattcctacagctgtttcggcccattctgcttctttgatgtggatgggactgagtcccaaccatctggaagtggttcatgggtgaatgaggatgaagtggaattcataaccctcttatatcatcaaatggctatgcgctatccagaactcaaatctagttcccaggtagctgtcatatcaccatacaggcatcaggtgaagctcttgaaggaccattttcggtcgaccttcggtgatcagtctaaggaagtgatagacgtaaatacagttgatggattccaggtttgttttgcatgcaaatgcagacctgctgtatatgtagatttgtagcaaatcacagtgattataacttttgtaatgtttgttcttgatgctcacatataggggcgtgaaaaggaagtagtcattttctcatgtgttcggtgcaataaggaacaaaagattgggttcgtttctgattttcgacgaatgaatgtcgccatcacaagagctaggtctgctgtactagtatgatgnncnnctgtnccatctgtntgtcatgcaatcaatggcacag

SEQ ID NO: 17407 - DNA, 3997 bp, Oryza sativa
tcaccaggttgatcagtgatcggaagacacctctatacgtcggatgcaagaaaaaaaacaccaaattgtcagctaccttggacttaatgaagctgaaggcaagtagtggacggacagacaagagtcacagaccttttgggaatatttaaagccatgcttctcgagaagaacacattgcctatgacaacatatgaagcaaagcaggttttgtgtcctctgaggttagaggttcgtagaattcacgcttgtccaaacgactacatattgtacctcaagcaatatgcggacttagatgcttgtcctgtctgcaagacttcttgatacaagcgaaagaaaagtgttgacaaaggaaagaattcaaagcggggtggtccggcgaaggttgtgtgatattacctatcattgattgtttcaatataatctttgccaaccccaaggaagcggagttaatacgttggcatgccatagagataaggtacatgggagttctaaagtcccttgggagttctgaacaaaggtatgctaagataccctgcagattcgattcaatgaaggaatatcgatcagaaatacctagaattcatagccgaccctaaaaacatgaggatatgtttgtgtacggatggcatgaatccttttggagacatgagcagttctcatagcacttggctagtgcttattgcaaattataacctaccgccatggttgtgcttcaaaaagaaaatacattatgttgtgcttgttaatccaaggaccgaaacaatccagcaatgatattgatgtgttcttggagcatgttatcgatgaccaagaaattctttggaagaaaggtgtggaaacttgggatgcgtatggtcaggagtacttcaagctacaagttctattgttctgcaccattaatgagtactttgtacttggtaatctttcaggacaaactgtcaaaggaaagaaggcttgctccgactgtatggaagatacacgtagtaggtggctgaagaaatcacgaaagatagattacatgggtcataggagatggctcccactacgtcacgcatttagaagaaagaagaaaaatttcaaacggtaagagagaacttcagtctgctgctaataatttgtccggagataaggtccatgacatggtcaaggacataactaatgagtttgggaagaaaaggaaggggattcctaacgcttacgcgctccgaaggccgacgcgtatgttacgcccccgtcgctaaccatgtgattagcactaatgatgacgtgattagtgattagtgctaatcatagtacctacaagaactttttcttttttctaatagattgaaaactttcaagttagatttgaaaactttcgacttaagatttaaactttgaagtcaaattttgaaatctttcaacacaaactttgaaaattttcaactcggaatttaaatttgcaagataaattttgaaaactttcaactcgagatttgaaaactttctactcagatttgaaacttttaactcgagattttaaatttgagttataaaaaatatttttgatttgataatttttgcttgtattatggctgtgtttagatccaatggtgtaaagttttggcgtgtcacatcgggtatgccggcacacatttgaagtattaaacgtagactaataaaaaactaattacagaatccgttagtaaaccgtgagacaaatttattaagcctaattaatatgtcattagcaaatgtttattgcagcaccacattgtcaaatcatggactaattaggcttaaaatattcgtctcacaaattagtcgcaatctgtgtaattagttatttgtttagcctatatttaatactctatgcatctgtccaaacattcgatgtgacagggtgtaaagttttgccaggggaactaaacaaggcctatatggatctaaaattattttagctatgcatgtttctagattaatatgtactcgtgatctttgaaagttttatcttcttaaaggacccttgagcttgtactcgtggaaacaaaatgtgagctatcagtgggtacttttcactttcatcatgcatgtgtaatttgtaagttccgtgataaaagtgccttggtcaatcactcaagcactttatcattctcatgcaaacaaagattgtttagctttagaagtatcacctctgtcatgcttgaaaaggaataacgtgcaagtttcacccaaatatgccaaaaaagacgatataattgccacaccacgatggtgacgtagcattattgtatttaaacaaggaaatatgtaacgtatttgatattttagttttgaatatgtaaatcgatcatgagatgaaatttagtactccaatgtagtactcctaccaatcacttaattaataaataaaagttaataccacatgattaattatgcacataactactccctccgtcccattttaaatgcaaccaaaagtttctgtatccaacttgaacagtctatcttatttgatttttttaattagtatttttattgttatgagatgataaaacatgaataataatttatatgtgacttatgttttttattttttaaataaaaaaattaaataagatggacggtcaaagttacgcatggaaaatcatagctataattaaaatagaatggagggagtactagttcgacctacgctgcaatgattggatgtttggatccattcattaattttctacacaaaatgttggcccttggcctaaaagaaactaactattgataaattattgaaaaatatacatgtacctgaactagagaactagagtgtgcttgaatcaacgggttgtgaaccctctcactcatgattaattaagtattagttaaaaatattaaaaatagattaattttttttagaaaaatcgtataatagtttggaagtctactgagaaaaatgagaaaaataaatgagaaggtagttgaaactgaaattaaaatagtgtagtgccaaacacagtaggctgtgttcggatagcagggatgggaacccaatctccccgtacggaaaacggagcgatccattagcgagtgattaattaagaatcggctaatttctttttaaaaaatggattaatttgaattttttaagcaacttttgtatagaaactttttacaaaaaaatacaccgtttagcagtttgaaaagcgtgcgcgcggaaaacgagggagaggggttgggaacttggagttccaaacacaaccttagtaaattttcataaaagcaaatccaaatacttgcggaaaattggcagccgtcgtctcgactcaaccagtagcacgccagccttcagccttctccttccttcggccggccgccttttcactccttcacccaccggcatggccaacctccatctcctcccccttcttctcctcgcccttctctcccccgccggcgcgggctccggcgaggcgcacgcctccgcggtggtggcagagaagggcctggacttcgccaagggcgtgctgatcggggaggcggtgcggtcgctgaccccgctgcgcctccccggcgtggagaaggccgtgcgggtgcccttcctgggcgccatccgcgtcgccgccaccaacatcacgctctttcacctcgacgtcggcgacgacttccgcatgcaccccggggacaccgccctcgtcgtcgtcgcctccggagtcagcgccaacctcagcatgggatggagctactactacgattcctggctcttccccatcgagatctacgacagaggcaccgcttttatcctggtagtactaaccctttgcctagatctcgagttgattgttgcctaagaaaggattcaattcgatggcgatagcgctagaaatgggtagggcctcattggtggaaaactagaatgtgggggcataagctggcaaagctgccgttccagttgctttagaggcaaaaatcgttcccgacgcatgatgttcttccttcaaaacagaaaagaggaccttattcc

SEQ ID NO: 17408 - DNA, 9148 bp, Oryza sativa
  unsure (1)..(9148): unsure at all n locations
atttaacccaattttttttataaatttttagnttggcatttgtatgtggtaatagaccttataatttacttagggtattggtcccatgataaactgaactattgataatattccttgagcaatctcatatttgtaatgtcttaagtaataagggtcagaagtgaaaaaattgcataggtaattgcaatttcatgggggacaacatcttcgtggcttccctgtccactctttcctgcatggatcaccctccagattcagacatctatcacattttgctcaacttgatggggctgttgatcccattggcaaatgatgcctatagctgtgacttatgaaatgtgatgttgtatcattcatgtttcatgtaaatatcatagggtgaacaagctgttttaggtaattttctgctttatctttaccttttgttctttgttagtaactcataagtgctttctgtgtctaaggttcaaggaatggaagttggtataaccatgcaaattaagaattataacgggagtttgtctctctctgtgttgcaatgtggatgtaatgtcaaggacctagtgatatccctggatggtggagcatcttggttttatcaggggtatgtatctcttgtgttaaagaatccataaatgttactttttaaattatggcaagtcgattttccatctgagcctttgctttgaagtttaagatctgaaatacttgttttgatgattcgaggcctcctttaacccatgatttcttcctacactgggtcctttgtcgaggaaattacatattgcaatgttcagacttctgtacaaaattggcatatatctgtgcattctgacagtgatggcaacctttcctttgcatctgcttcattatttctactaaacatgaattttggagtcgtggcatgtttgtcaagtcagagctaatattatcaaataaaacgtctcttctgtttggtgctttggtggttttgtttgagtctttcctttggggtcgattgacagagataagatttcattcactatattactatttgctggtacacatgtatattcagataaatgatcccgtgttattctttttaattctgaagcatgtcaagagcccaaatgtctatcctcctagattaatcgctgagccttattcccctcctttcttgaaggttaataaatgctttcgagggccatattaaagctgcagttgagacgcaaatcctagaaaatattattgacggcacatccaaacttgactcgttgcttcaaagccttcataggagtgtcaatctggctaatatttctgctttgaacatgacttttgttacggatccgcagtatggaaattcctcaattgagtttgatatcaatggattattctcttctgcaactgctaagcttagcaattcgcaaaagcatccccaactttcattatcatgtggtggggcatccaaaatgcttctgctttcacttgatgaagctgttttcaattctgcattagaggtttacttcaaggtaatcaaaacatttgtgtcaaaacaataattcatgaatatttacttttcacttgcgttgttgcttgtttcttggattttatgtcagctactttttttttcttcaggcaggttcaatgcattgggtagttgacaaaattcccgatcaatctctactaaatacagctagttggaaatttatcattcctcgcttgtactggagctatcccaatgatgacatgctgttaaacatttcaatggcttcacccccggtgatgaggattacgtctgaaaagattggtgctactatatatgcggacatgataattgatgttttacatgacaaagagacaattccagttgcatgcatctctgtagtaagaatcctcaactgctaaacttcatttatgatgttgtgcttttgatgatgttcattgctaaggagagaagattctgccattactacaactcttatttgaacgaagtgcaaaaaaaaacgatctttttagtcgcagcccatgttgaatgcatcttgaatagagaggtgcttataagaaaatgaacgccatctatcaggctggaagtaattaagtctgctcagtattccgcaatactatcacacaatcctctagaatagttaggccatactcttctagattgaacttgactgggggaattcactttgaatttaataaatttattgctcgtgaagtatgtgttcgcatatgccctatagatcggtaatgactccaaacatgggcagnnnnnnnnnnnnnnnnnnnnnnnnnnnnnnnnnnnagtttatgtacctgcggacgatttgaccgaccctgcttgcactacttcaacatctctttttgtgtcttccagatcatatatctgtattcctgagtgcgattctaactactggaatcattttttttcttggtaggtagtaagtgcctcaggtgtcgcagaggcagcaggcaataaagtatatggtaaggttgaattgggcaatttctcccttgccttgaagtggagcaaaattggtaacttccacatgtcattgattcaggtaacagaaaaattagctttctttatacaagtttatctttcctagattgctttttatcagcattatagcaagcttgattagtctgttagttaactactgggcctggctaagtggctatttctgatcattttgtttctatccatgtgcgggacaccattatcactttatcagtgaaggtttttgttttctcggttcatgcttaataccaaatgataacgagtttctgcttgcagggagtgattcgtgttttcttgaacacggtttgcatgccctatttgaactcacggctggggcatggagttatcttacctgtggtccatggtttcacactcaaagacatctacgttcttacttctcctgagaagttgacactttgttctgatgttgccttcgctaatgcaagcagcctggcaactttaccaattttgagatcccctcgggttttatagggtatatgtgtacctcacgtttgggccaaaaagggccttgggcataatagtaagtgcacacttgtacatatacatctgtacattaagataaatgtacatagtttctccttcattgatatattcacattcatgattcatttatacaaattctcttcgtatgttctttttaatgattagagcttgtactgttctttttaattctcagtttcgatcctttacatcttactgtcttattgtattaatatagatggttgaaatatgaggatagataatggacacattttatcgccattagtcagcctagacccaacaagatataatatagcaacctagtcatataaaaaagatttttcaagataaagttttacttcattgttaattttaagatgtttctagggcctagttctttttctccactcacaacttcatttaatgctccatatatgtgtccaaacattttatgtgacggaaaagtttgaagtttgaagggaactaaacatagaagttgtttgaaaaaaacaaataaatccccttttcaattttataataattaatatttaattaattatgtgctaatgagttttctcgtttcgcatgcgctgaaaatatccaccacctgcttagaaggaacagggcctaagatgactaattaatatatcttgttgcatttttggccaatttagtattactagaaaaaatgttcatacgttgcaacgggtattcgaaataaactaaatatttagtagctacttaaaaaaaatcaggatgtttatgtcccaatcatccctccctcgccctttgtcagtcacaacagtgcgatgaacatagaaggatggggttagctaggggtctgaccatgcctgcaactgtggaccgtttccaaattttcaacttgagcacggagggaaaaggactttgatctgtcaacaaattgcactctaatccattaaaaaatcaatagagagatacatgggattgcaaaacaaagaaatcaataaattgtagctgaaattgtgctagaggagtgcgagtgacaatgggtgtaggcaatgtaaacggacacgcggaggaaccgatcaaagatatagcagcggactcgacgcgtgatcatgataaatatattgtattatcattgatcgatctattacttaattgagtttcttgtgtattttctacctatgtgtgtcatgcacgacatgactaaaacatgtatgcgtatcgctttgtgtcaaagcagggatcagaagaacttaataaatatataaatatgtaatgttttaatggtgatgtgtgggaaaagtcttggtttataaactaattagaaaatagaataggaaacaaacttttatttagaaacaaacttttatttagaagaagaatggtacttcccgtaaaaaaacaaagaaaggaacataattgaactggatggggtaaataatcgaactggatggactgtctataacgttgttgtgagctgtaaagaaaaagaagaaagagacagtatcagactgggtggatgggctggtgcattggcttggcaagcggacgcactcacgtactcagcgtgccgacatcatatcgaagtaggatgacttacaagatgtttggaaacattttaacttttataatagtagagatagaaatatatgttggaactattacctttgcggtgttcaaacatatctataagttggatactaaatcctaaatcctaggtacccggtataagggggtgtttagatccaggtgtgtaaagttttggtgtgtcacgtcgggtattatatagggtgtcgcatggggtattcgggcactaataaaaaactaattacataatccgtcagtaaactacgaaacgaaattattaagcctaattaatccatcattagtaaatgattactatagcactacattgttaaattatagagcaattaggtttaaaagattagtctcgcaaattagtcgtaatatgtcccggtcatgttactgcccatgagccatccattgtcgtaggaagagacaccagagcacgtgcgtgctctcctggggatttggtgcaccacgccggcggcgaggttctggtaggtgcgcgggtgcatcaggttgagcagccacggcaacggcagcggcagcagcagatgctgccaaagcgtgccaaggtgccactggctgcacacggcgacgaagctgaggcggtcatggtgggacagcaacgaggagacgatctggcgaggtctgtcaggaggttcgaccagcctggaggtggctcggcagcggcggtggcggcagcggctgtggcggactgctgcttctgctgaaacagatccccacggtggcacgagaggaagacgcgcgcggctaattaatatgtgggacgaagaacaagtcaaactagtcatgttggcgccacatcagccaaaaccagacttcgtttgcaccggttttgatagtttagggaccggttctatccggtttttgtgttcgaggacgaaaatcgaattcggtgtaaagttaagggacctcgaatgaacctattctatataaatacgtgggctttttgctttactatcgttagccctacccctcacccctcacccctctggccctccacgaaggcccagacagcccaacgtcgggaaccaggaaagattaggggaaaaaaaaaaggagaaaagggcgtgagaaaatcaatccactgtgtggctgtgtcgcaaaaatcttccccaatctcgctcgctttccgccccccctcgcttcgtttcgcgccgcgctccaacgatccaccgccaccctcgcgccaaaccgagccatttcaaaactcctccccccgcccttcccgaaccttatagaagcccctcccctccccttcccgcgcacgggggatggggagcgggcgggagcggaagcggcggcggaggggggagatggggcgggtggcggggatggtgatggtgctcgcgccggcggggcaggcgcggggcgggggcgcgcccacggcggcggagcgcgcgctcgcggcggtggcgcgggagcggctgctggaggcggcggagttgctggcgcggcccagggatctgttcccgaggaagccggtgcgggcgctcgtgaaggacctcggcctcgcccgcggcagggacccctccgccatgggctaccgcccgcgcagggcctccatcgccgagaggatcctcctcaccaagcgcaaggtttgcccacataagcctctttcacactccagctcttcttctcgttcactctgtgagtatatgtttcgattggatgtgcgtacgtacaagaggggtatatggaataatctcgaagagatccctgtgtttggtttggtgaattgaaataaatggttcaggatggtggagtactaagagtaagtttaatagtatagccacctattagctccaaatcatctatagtcaattcatacaatacttaactacaaatatatactccctccatcccataatataaggcgtgcacgcatttcaagattcaacctttaaaacatttgaccaacacttagtataatatgaaataaattttatttgttaaaaattatatcattagattgagatttaaatttactttcaaatggttataattttgttgctacaaactttataatatatgagaaattataagataaagattagttctggagactctgccaactttggccgcgccttatattataggatagagggagtactacatcattaataattggtcccacttgtcatacacacatagcgtcttgacgtccgtgctgcggctaggtacaaatctgtagctcgtttctcttctctctcatcttttgtatcctccacatgtgcttatagttgacttatagtcctttattgtacctactctaagtgtacaacttctaagaattatgctgccagaggatatgcttttccgttcaacgaaattcattgaatggcaccatcactggaaggcatctcactggacctctcacatgtagtaacatgtgtgttggtcagtaatagaaccaacaattaattccaccaaacaacaacgggaatatcagaataataagtaaaacgccaaaataaaataaaaattatcaaacttaatcttgtaacgtcggatatcattccatgcaactaacgaaacaaatccctgccatctcatcccattcaacttcatctctccaaccaaacaagcccatgtgatgtgctgacactagaaagtgttcatccagaaaattttattacatataatgttacgtagagctttcaccacgctctcatgtaggtccttgtcgtcacaacttacctgaaattatgtataaccataacttatgttacacaattccccctcaggttttataagttatggtttttgaatccataaggttatttctgctgcattattttgtttcaagaggaaatgtttggaatttgtcataaggaggtggtatcaatgtatatcttactaaaagagcaaaagttcctcctgcaaccataatttggcatgatcggcttcaggacacttgtccggaaattctacatgaccagtaaaatctgagaacagttatggatccatgaacttcactggaacacgctatggtttcttgacgattttgagaggagatgaactatacccaaaatatccatagtctctgttttatactccctctggtcattaatatatgacacttttaacactaaaatactaattttagttttaaaaatgtcatgtattaatgaacggagggaatgccatatctaggcatgccccatgtgcctcatatattaatgtttcattccaaatgttcttgggctcaagtaaaagctgccatttgaaacccctcttgttgatctctaatatttcaaaatggtaataaatacatgttgtgcagcaaattttctgtaacatatttggttttattaatgcagattttctaaagggaaaatgtatgcatctctaaagtttgtgcttttcttccccttttttattttgtcatagatggaagaaatcaaggaggctccagtgtatccaacaactaatgtgtctcaaacaacagccacgagagcaacaactgtcttccaacatggagcttctaagccaactactgggttgcccatgaatatttcagctgttgcctcattccctgtcacaaccccacctactataccatccccaaatatcttgaagcagacacagttaaatgaatcaccatcaggagtgaaagcagctggtacctcttcaattgtttcagtaccatctgttggtcctacaaatattaaagtggaaaagggtgttaatagtcctacttgcacacaaaatggaggtattataaacatattctttcatgactggttttcttacagtatcaatgttataattgttattcctattcattatctatgagtattaggtttcttgcttgaattaggacatagtgcttaatgttttatctcgtgaattttgtgtaaattttataaatactagcacagcacatgtgcgttctgacagatgataaataattgtgccatatgatctaactaaaaaatgaaacaaaataatctacatggtatcaattagttaccgacatatttgtgtgaacaaagtaatttttttagaaaggatcatgcaaactgcacaaacgggtcatagagcacaccatcactcccaactccgctttttgaaagagtgaagattatccccctcatactcatattgttaatatcatgcacaaaactacagatttaagttgagtaaatagcttataggaatatggtctggtatttctcagaatagttactcccagtagtttatacatttttaatgtacatcaattgacttctttattttaagtgtttgcctagtcagctgactagcctaactagtcactagtcagcggcaaaccgacctggctcctgaacatagggtaatcggtgggttggtcggcctaattggtcagttcttagtctgtgactagtcttttgtatttctttggcagccgttttgtactaaaccctgacctaatgggcttaattgagtccttttggactcttttccttcttaatataatgatgcgcagcctgcgtgtttgagaaaaaaattaggcaggccaactaaaaatgatgagctacttgcagacggngacatgcagttcacctt

SEQ ID NO: 17409 - DNA, 2083 bp, Oryza sativa
  unsure (1)..(2083): unsure at all n locations
cgcgcactaggatcgactcgctataaggcgactncgagctcggtacccaaaattactaacataaaactaaaaatgtgaatattttgcaatggttcaacaagtacaacagatctcaaggtcttacattgtaaggatatgatctccagcttcaattactgaaatattcgcatacttcttcacatcaggatacaactttgccaagtcctcattgacaaagtcatgaagctctgcagcaaattctacacctgttgggccaccaccaataacaacaaaatgaagattcttcttcctctcttcctcagttaggtttggaagggacgctctttcgaaacatttcaggacactcttcctaattttttgagcatcttctacttcctgacagaatgcacatgacgattcaattcaccatgcaaaatatgttgcaaaattgaacaacataatggatataacatactaaagaaaaagaagttatgacgaaagatggaacaaggatattctttgtttgacaaagaacaagtatatgtaaagatgtaaaagcaagtttgctgaaggtaattcagacattgaccaagagataagctgaaagagtcgtaactgataagatgataaaataaaaccgagttttggtacaacagttaatttctttcattaacctactgccttattagtactgacctttagaaaatggcagttttcaacaacaccaggggtattgaatgtattaggtctagctccaacactgacgaccaggtaatcataatctacaacaaattcactatttccatctgagtctgatctgcagtggatctttttggtagttggatcaatcttgtagcactctgcttcccaaaatctaaatgcgccgcctctctggaaataatgtacatgtaatatttgtgagaattcttgcattacaaaatgatgcaatatatcaataatatagctaattgattattaattcagtaaggtcttacctttctcacaatattacggataggctctacaatactacgtgcttcaactgtgccacatgtcacactaggcaacaaaggtgtgaaggtaaaatagttgcgaggtgatacgacatgaacatcgtacaaggaagtgtcaatatttctcaagaaacttgcgcctgcccaaccagttccaacgataaccaccctcttcttgccagttccatcatttatttgaagtacttgattatcctggcaagcataagtcaaagaaccaacactgcaaagatatttgaataaaaggtgtgtgagaggagagactcagagtcctgaaatatatacaatataaaatattatgaaaactaatattaagagtgcatttgccatctcagtgagttttaagttgcatttactagtttttgatttgccaatgaataccaactaatgaacttatcagagccataacagaacatgtaaataaaaatttcttccagctataatgaatagcacacctctgctgctagtcttcttcactttcaaaacagaaagaaccacaagagaagtattcactaaaattgcttgagacgcttacaagattttgctacatggcccaaaaacagaaatctggcaatacaaatgttatttcacttttgtgatcaaacaatatcatgaacagtatctgctgtgcacaattccaatatgatcccgggttacaataagaaatatgaaggacaaaccatcaccatgaatctatctgggacaaacatgtctagcatcatggattaatagctatagcacattctcttaagcaaaagggtgagaatacaatctgcttaaatgcccactcctctgtcccacaaaaccccaatttatttgaagaggtcccaggccaccgtccgggtttaaatccatttcagaatgggcctttttattggccgaattaattataattaataatttatgccgttaaataaccaaggaggccaggttttggacttttgggggacaaaacaatcctccgtttccttagaatgggaaggcgcggattcaattataccaatgtcatggaccaggatataccaacccgattaagccattggcccaggtgggacccatggttccacgcccct

SEQ ID NO: 17410 - DNA, 5148 bp, Oryza sativa
ataatcacacgagtacaatatttggggtagcctatctaactgttgtcgacatggcggtctgtatgtctgactcgtagtcgacaacagggtagtcttcctcctttagttcctgcccggcaagatcagagatagcacttttgtctctcctgacagtatccagagacagcgtaggggactagccgtgcttatccctgaagtcgatatccaacgtgttgtcttggcgtatgttggtttgtatgttgtggcttctgttgttccgtgtatgttgattatggtcggtgttgattgaggtggtcgtgtcccctctcctcctaaggggtcttgtatttatacccataagtgtccccttgtccaagtaaaactagggaaaccaatatggatacaatccgagtagtacttgtcgtttccatacagaactctggttgtctttccttatccagaacttctcctatatccgtaggttgtttccgtataggacatggtatctggtgggtgctgccgagatttagtcaactactattaggtatgtggtatccataaccctgacaatttcaaagttttaaacattgatatattaatgactttcttatatgcatattaatttcaattgaaagccatcttgttgtccatccttcctgacaagatgtagtgtacaagtcattctttagttcagcctcgctcacttggtatcacagaagcataacctagacgtaactaattcagtatagaagcaaaaagtgcaacagcaacaacgagggtggaaactagaaagaaggatttattatgttccttagtttattcagtcacgaaagagtgactttaaaaaaatgtacacttcttccaaagtgaaaattatgagatgtcttacttatggaatgctcctacatgctgaggttgttcttgctgacaccctcgtttctatgagaagattaatctaacatagcaagtagatagtttactgcaaacaaaatggataataaacctgatgtttcaaaaaaactagaggaactcatgcatgatgtacccaaaggaaaccggttcttgacacactacaaatctgtggtagttcttttccatctcgaaaacgaatcaaggctgtgtttggaatcagctgttcccaacatgcaaagtgcgcacggaaaacagggcggtccattagagcgtgattagttaagcattagctttttttcaaaaaatggattaatatgatttttaagcaacttttgtatagaaactttttgcaaaaaaacacaccgtttagcagtttgaaaagcgtgcgcgcggaatacgatggagatgggttgggaaccctggattctgaacacagcccaagtctatccaaaaagtttagacaagaaaacacgtaacaagttggtttacaagaatatgaattacgtcaatcctgcactacatgtatagcaaaatggtgatttctcgtaaatctctcgaatggtgatttaagaattcagtgcaaacctaattcttgctgtaaaatcaaatgttcggtaccacaacaacggaacaataaaaagcacttggtgtaccataatttttgtcactcttgttgaaattttgtaatataaaatgcatgaggccacacgaccttaatgttcaacgtgtcatgcattagtgaaataatagctcacaaaacataacgaatatagctagataacggttgcaatccttaccaaactaacgtataaagtgagcgatgtgtcatatcattatttttctagcctgctaaccaacatgtacaccttccgatcccaaaaatgacaacttccagggatgaacctaaacaaggtttagggtttaggtatgaatctggacaaatgattgttcaggttcatccctagaagtgggtttctccttacgggacggagggagtatatgtgatggacacaaaagttactttcgtgatgaaatcaaaggggatttgttggggcacctaatagaacatgtgtccaaatgacatgactcacttggattctaataggacatcaaagcaaaactaacactccaaagcaaccgatgaggaattgaaagaaaatcagtcccatcgcatctataaatagacaagcgcaatgaaaaccctccccatcgttcacacagttcaagcattatacagcaagaaagaaagatctagtgtcccgtagcaatgaagatcattttcgtctttgctcttcttgctattgctgcatgcagcgcctctgcgcagtttgatgttttaggtcaaagttataggcaatattagctgcagtcgcctctcctgctacagcaacaggtgcttagcccatataatgagttcgtaaggcagcagtatggcatagcggcaagccccttattgcaatcagctgcgtttcaactgagaaacaaccaagtctggcaacagctcagggtggtggcgcagcagtctcactatcaaggtattaacattgttcaggccatagcgcagcagctacaactccagcagtttgatgatctctactttgatcggaatctggctcaagctcaagctcaagctctgttggctttgaacttgccatctagatatggtatctaccctaggtactatagtgcacctagtagcattaccacccttggcggtgtattgtactgagttttaacaatatagtggttcggaagttaaaaataagctcatatatcatcatatatttcacctgagaaactcggggtgatatatcctcgtacatcgtcataactaattaccatcattggtactctacaatattactatgtgcttacattcgatccaaagctactttgtctttaagatataaatggagcgtataaaggatgtccatcctttaattctagtaagaacaaacacgaagcacatatgtcaaatactaaatccactacaacaaaattatagaccatacaaagcacgtaaagatgtagcaatccacattgattcttcatccactactaaaataagcgcatgtgaaaggccgcatatgcatgatcattgtgaatatgacatgcccttatcgagcaaacgtgtcacttcatgcaaatatgttgtttgtttcaagcgacatcaagatatgatttcaaagttttaaacattggtatattaatgactttcatatctgcatattaatttcaattgaaagccatcttgttgcccatccttcctgacaagatgtagtgtacaaggcactctttagttgaggctcgctcactttgtattacagaagtataacctagacgtaactaattcagtataaaagcaaaaagtgcatcagcaacgatgagggtggaaactagaaagaaggatttatgatgttccttagtttattcagtcacgaaagaatgactttaaaaaaatgtacacttctttcaaagtgaaaatgatgagatgtcttacttatgtaatgctcctacacgctgaggttgttcttgctgacaccctcgtttctatgagaagtttattctaacatagtaagttgatatttacagcaaacaaaatggataataatcctgatgtttcaacaaaactagaggaactcactgttaacgaccaaatttggtaaagccatgggctgggttcaaagctagagtcgaagccggatttggaggaattctttttaagaaagccagagtgtgtatcggctacgggcggcatcagctgccgtacgtatcggctacaagcggaatcggctgtcgtatgtatcggctaacgccaaatccaatgaagacaagccgatgtagccagtcttgaaaaagacaggtccacaactatcatcgggatcaatcgaagtgcttcatagccattgccacacaagaatcggtccagcaaagggcaattgtatctattaattaggtttagtttccttaagagatattttggtaagagtccgcctaagggacttgttcgtattttacattgtaataaagatagagtcatgtccaacaaggagatgttatgtactttgggtataaatatgacccgagaccttataatcaggggacgacagctcaataatacttcggcgcatcgccaccctttttctctttcattgtttcgacgagtttttgctttcgagttgggctgcatcaggttcgatctccgacgaagaggtaaagcttgttatagcggattgcgttctcaggattagtgcttacatctttatgacactctaatcctatctatgtgaatcaccgagttatcatatatgctgcataatctagattgatctcgtcatctaatctcatcggctagcctctatcatcgaaaacggccgacagatttagatatcaacattaagctagattatgcggtatatctaccatatcaaatgagtcttcatcgttcttgcttagatcttatgtttcttttcacacttaatgctgcattggttaggttcgatctactaagtactgtcttgaaacattttatctagctctttctatgaatgctaatagagttagtatcggagtttcagccgatcttacctgatttagccatcgtgtttccactacttgggtcttgatcgtctaaatttgccctttatattaaaatatcatctatttgaagtgtattaagctctctatcaatctactagttcaccttatgtcacgaccggaactaacccaacgggcgttccttacgtgcgtgtattattccttgtcccaggaggcaaggtacaccaaaagttgatacatttcagagtttatcaagaggaattgaaaactcattcaaacataaaaacaatgaaattactgtcatactgataccatccaacgtatcaaatcttgtgcattcaatactgcatttatatatgccttgcctacattgtttttattccctcaaagcattaaaaagaatatcaccaaatctgtttccaccctataaatagtatctcttcttcatgtatcaataccaatcttggaatcttccaagataatcacaatgagggaaagtcgagtgattacagtaactcttcttctatcgcatatgttgttctaatcataggggggaagaaattcagtatataagccaaaggggaaatactagtcaaggtctcacaaattatggggttaataaaaccatcgaggtaagtgcaaaattagatcgggtaccgagctcgaattcgcccatatagatcagtaatcaacacgctc

SEQ ID NO: 17411 - DNA, 3207 bp, Oryza sativa
tgccgaaggtgctcctttcaaaccaatcgcacccggaccacagcctaaacacaattttaaggggttttgattaaaaggggaggtgtgtaatccaattcccaaataatccatccatttcaatagtgtccaggtaatgagaatattcccaaattctagagttgtaaaaccaccctaatgttggcttaataaacaagcaaagcatctaccttaaattcatactagtgggtaccataagtagagttgtccactagttgggggttttggttaatctaaggtggaccaaggtgattattaccattaccaataatattaggttcataacaaaaggtaaataggcatggctaaataaaccagtgataccgcggaattttaaataaagcgataatgcaataatttaaatcaaaataattttataaactgggattcaatatgttcaaggatgatgtgacttgccttgctcgctttcccaaacgtcggcttcaacctccacgaagagcggatcttccgaagctgcagcgtctatacgaccaacagaaatgaaaagggtttttactctaataaactccatataacaagtaggaacaaagcacaaaaatgggttcttgacttcttaaggaaaaattagagacttgaacggtccaattccgagttcaaatggccaagttatggccatttaaagtttatatgctctttaaatgaatatttgcgaatttcttcatttaaaatttaatttaaaaaggggtttattgcgtcagccgaggggaaggggcacgcggaccgggtccacaggagtggggcccatgcggcagcctcacggtccacggtggaccaggtgcacccgggctcacaccggccggcgtcgtgggtaacacgcatcagccgcacccgagggcgcgggcggctgatgaccgggccccacgcggcagccactcggcccgcccgaaggcggccactcggcgcggccggcgggaggcggtgcccgcgcccctattgtcaccgacggcggccataggcacggcggagcggcggccgagagaggggaagggaagggggaaaagaggcggcggtccacggctcaccctaggtcgacggcgacgacgaaaaaggcggccggagcggaggaaggcggcggcgcggctcgggtcgacggggtcgacgacgttccggcggtcggcgaactcggcaagggggtggacggggtcgacggcggtgcggcgaagccggaggaggcgacgccggggcgggagacggtcccggcgagcggagaaggccggccgaaggtcggtggcaatagaggagagagagagcgacggcgcgagctcgattccggcgagaaggaaggccggcgagaggcggaaacggacagaggaggtgcggggagggtttaaatagggttggaagggggagagagcggccgaaggggaagaaaaccggcgcgggaggtcggccgccatcaatggcgctgccgagatttgcgggggcaaatccgcccgtttgaacccaagagagagagggaaaaatggggggaaagggagaggggatcacggggagtgatttcccccactttattgcacgcggggacggcgggatgcggcggatttggcggcggcggcggcgcttggcgcaggcggagcggcgggaggatggggatgacgggtgggccccacccgtcagcgagggtggcgggcgggcccgcccgtcagcggcgcgcgcgcggggagaggctgagtgggccgcggggagaggagagagagagagggggggaggagagatgggccggcccggcccaagggagggaagggggacttttaaggtttttctttttataaaactttttcaactttgtttatttcttagtaattattatttgtgctctgaaaattccactaaaatttatttacaccttttaggcttttaggaaaaatacaaaaatcccctaagccttatttgacttttaactttgcacattttaattgttggaggctttcacacggattttaattattctaggcataatttaaaggatatattttagagtcgttttgggacatgacaccttgcttgttagattggtctacgtttcgtatatttcatctgtgctaatattgtagtataaagtggtatcggagtaatagtcgatacacgttaggtttgctcaatcggctatgctgtgagcatacataatccctactttgaagcacatttagatattaagtgatttatactgtctcggcatatcgcccgatctatcccaatcacttgatccaaatgtgctttcattggatagattgcgtactgctgacgtctacagccgattgggtagatctaataatttctatgccttatattcccttgctgatctgatgcaagtaacatcggcttggctccgaacaatacgttatcggcaatccagccgatcggctatcgttgatggatttaactttgttcctttttctttcttgctggttgcaggatcaaaccaactagcgcgctcggaacccgaaagcaattttggacctgcgctagagttaagcagatctctcaggccagtacgtgtgttttccgcatcaacacactttttggcatgcccggtgggaccgactttcgtaaaattttcttcatggcaagcctcaagtagagagaagttgatccaaaaaatgtcatcccaataacaatggacaagctgaccctggagcagaaggcagaatttgaaaagatgagagatgacttgcaaaacgattcctgcattcattcgcacagactcgttccgacaccatggtccagaaatataaggtagttctgtcgaacaacgatgacgcggaaacaagttctggcaaagacgacaaagccaagggcaacaatcaggaggaagatctcgaggcgctcaaatgtatgcaagaccaggttgattatgccgttcatcatgctttggtcaaccaatcaagagtacttgtcaacatgttgaccaacatgatcaaatatgtggttgacggcacgatagctgagcattaagccaaaggtccagtttttctgcctggagggtttttccaaactacaaaactgtcagcatggacaggcatcaacccatctcgagtgccgccccaaacagcccgtggctttaagtgtgcccccctggggcaaggggcaataacattgggcaaaggcagcccggaattcatccttacattcttatcaagccacaaacct

SEQ ID NO: 17412 - DNA, 3957 bp, Oryza sativa
agctaccgatgctttaagggtcagattgtttcctctgtctctgtcaagattggccttcacgtggttttcatcattgccatataattttgtacaaagttgggccgatctggagaaacagttccataagtacttttatagcagttccataagtacttttatagcgggattcattagatgaagttgtccgatttaacgtcaatcaaacagaagcatgacaaatcggttcaagattatatccagagattcagagatatgaggaacaggtgctttagtttggctttaacagattcccagcttgccgatctcgctttccaaggcctactggtgccaatcaaggagaagttctcagcccaggaattcgagagtctagctcacctagctcagaaggtgacggcacacgagcaaaggtttcttgaggctagaaaggcatataaaaaggtgaacaatgttagcacatatgtctctgaaaccgaagaggatgaggaccctgaggtagcaatagctgaatgggcaaggaacaaatgagtggtcacgtgccaatgggtcaaggactctggaaaggaggaaaaaattgatttcgacatcaccaaagacgataggatcttcgatttattgcttcgggagaaacaaatccaccttcctgctggtcatgtaattccatctgctacagagctagggaagagaaaatactacaagtggcataacacaaggtctcacaacaccaatgagtgcacagttttcagacagcagatccaatccgccattgagcaggggagaatcaagttcgacgacccaaaaaaatccatggagatggacggcaatccttttcgtgtcaacatggtcgcccaagcgaggggatagccaatagaagaagctatcggcccaatgccgctatgatcatcagcaaatatcaagggaagcttgagaggcagaaagaggagtgttacaaagccaacaacagtttcgatcctcattgggactacaaattctttagattctactaaaacgaagggatgaggttaccctcgaaggaaggtgtgcccgtgatgcagtgatgccgacgaaaaccacgtcggtagtacaaaaaaatttcgtcccggaaaggaaaatcggtcggtgcagaagaagctgcttgttgatcagagattgggacttgctagccgattggtttctattggattatattgctatactatattatcatcagctgattgccttcatatcattatatacattggacatatagccgattgctcaaaaccctatcgccatcggctggtatcggcatcggctggaattactccatgggcttgtcaactgatcggctcattgatctgctatttgcatatcttgtcagttgcaggatcaaactgactggcacgcccacatctcaccaaactttggacctgcactggagctaagcagatctcccaggccagtgtgtgtttttcgcgtcaacaggttgttaacgattatagagtgttttattgagtagttcagctactagcttggtggtatcagtgattagtagcttttttttgagagttttattaagtttgtttctaaaccatgtagatgaaataacagaattggaacttgtttggtcaagtatatcagttattaattctatgacaccagaaaattacattgtttcatcgcatttaaaggctacaggtatttttcttttttacggagtgatcaaaccggatcaagggataaactactgcaaattatatcttctcgccctagtggacttctttatggagtgaactatatcaaatgttttgcttttgatgctgatctaattagtctgctgatcgttacggagatgttggtcatttccaactcttaatcttgctaatttttttccttcttttgctccttgataggctcgcttggcaaggaatctcccccacaaaattcagaaaagaggagggactgcataatcaggtactgcatactccccctcacagcttcagtaatgcttgcatgaaaaagttattaaaacaggctctctcaaaacaaaattcatttctttgccagttactaagcttaccgtctttaacaactgagaattgctttattaaagaaaaatcaaagtaaatatgagtgatcttgagtgttgtaaatttgatggtataacagcatagaagcacatggattttatgctgctatgttgctgtaacacaagtttgccaaacatttatgcagcatctccatgttctatctagtagtggtttattttgtgtacaacagtgagatattactcccaatgaaatttctacagatttttataaacatattgaaatatgatccattctctaaaaatatgaatgatttgcactatatcatgtaataatctagctcataatgtattacttactttgttgtattttaatcatgaatgatttgcactacgatatttccacatttggttgattaagtatctgccaatcaattgccattcatcctttttattttctgggagcaattttaccatcattttttgcattgcacctttgactgatatttctaagcattgctatttccttttgagtacctcgacaaacagagttgagcccattgtatatcctataactgattaatgcttgtaggtatggatctatttgagcttcaacaaagccctatcagaattttgacatttcttgtgcatgtcaaaggttctgaatagatacacttcaccatttcttttattgcaggataacatttttagctattgtttccggttaattttcaacatatatagattcatctatgttgacattgacgatcagcgattgtgccaactttattcagttaaaacctgatctagccatttgcagttgtgcaactgccgttgataattttttttccttcttggtatagtcacatcattagtttgttgtatatgcatgtaggcacttattatttatcatgtgcagattttatccattggcataagttatactaatatctgttgttttatcctttgtgttcacaaaatttgtattgttgaagatcatttgaactttgaagtctattgattttggcgaattctgaattcgagcaaggttaccattgaccatattatttggataattttatggttgtttctgagatggatttcgtgtccaaaaattgttgatcactgattgcctatatatatgtgggtgaaccagtttaaaggttagcaaatcatatccaaatctctgtcaggtgctattttggcaatatttccatgtattacatgctcaatcatgtcaactcacaagacatacaaggcaatattgctatatctttccataaatatcatgatagcaacaaaggtaacattatcctccttagcctatatatgagtgggtgaacaagtatgaaccaagaaaaaatactcaccactgattgtcggctgcataggactgctggaacttcaactcgtcatcttggtattgttctccaatctatctcttttgtgttggaaattattatactttagtttgcacctattgatctcctacttcttctgtattgtagtaaggcatggcatccatggatgatgtggatgatgaggatttttcaccacatcaagccacaactaaggagtcaatgaactctaaggatgatgtgaaggtgcaaccttcatcaaggcaaacagcaaacaaggggaattattacatggccacgtgaatgccatcatgatgatgtttcagttcatatgtgatggctaccagcgtgttgaaagttccatggaagaatacaagtccaagaaggtagaaaaaggacaaggtgagaaaaggaaggtgggcgaagggtatgatcctcgctggtatctcccatcgagaaaacaatgaagatctacaatgacaacgtctccaatgaacccaccgagaacgaaccatgatttaatattgttgctattgtgttttgaccttagaataatataacatttcttgtgaatta

SEQ ID NO: 17413 - DNA, 1027 bp, Oryza sativa
ttggggcgcccaaaaaaaattttttgggggagaaaaaaaaaagaatttgcttgtgccttatggcatggctgtttggtccactggtattggaacccgtcccctcataatggatttcatgaagcaagttggtcaggtatatctcgtacagaactcataagagaatacatttcaacatattacactaaattatgtttttaaaacacttatttaatttataggcaaaccgacgagtgctagctactgatgaatggctcagggttcatggatgtgatgatgtatatgctctcggtgattgcgcgacaataactcaaagaaaagttatggtatgtgtgtacttctcaatgcaaagataccatattttttgttcaagtaaagaatgcaccatattttgtcattggcaagaacatctcgatatgttatggtataattataatttaacatgtttcatcgcctgctctctagaatactaagctagcataattgaatttcaaatagtggcctatgtacagcaattagcccttttcagtgttaagttgccagttaattatatctaagtctttgttttgataataagttcatatgattaaatataaaaaattacaaatgctgaaattattatggtttaaagactgcaactttgtgtgaagctgtttagccatctcaaacatatcactattatagttataaagatttacaccgtggtgttcctttctgaaccaacttcaaaatttttggaggatgttttcagttcctacttcaaattctttttgtgagaaaggcaagattgacatgatctagcatctacccagatgagtcgtcaacgccaactgaacataaacgcctgccattgttagcacaccaatgtcatgttttggtcactacttttagatattaattcttgacattctgtactggaacgcggtgatatggaaatttcacgaagattttctttttaattttttcggataagcctaccaaggaccattgttggctcttacaattgcccaaaaaaattaaaaaacgtttc

SEQ ID NO: 17414 - DNA, 508 bp, Oryza sativa
cgggcccgcgtgtggaattcgacatactatttcgcgtattcgagctcggtacccgttaaatagtcgagaagatgtccgtgattgtaaactagcagtaggtgatacaaggtgtttaagcctgcctccactactgcacaaaaagagatatatcatcttcagtttactcagaaatcttgcctttttataatatcaatgtgtcctttattttagtattcctagtacatctcactgatcagaacacattcacatacccacttttcgacaccagaaatcttggatcagcataaataactcttgtaagtgcaggtgacctgggcaacagctgaggtttttccccaagtttgggggccaaggtacctccaaactgtagcaacgccattgaaatacttgctggatacccacaaagcttcaaccttcaatatactagctgccatttcacagagatagagtcaggtgaagcataacaaaagcaatacacaaaagaacgatattcgagtaagttcacaat

SEQ ID NO: 17415 - DNA, 2724 bp, Oryza sativa
  unsure (1)..(2724): unsure at all n locations
taacggtgtnngcaaggtgtatcntagtgacttgcaccaagttcttctcctgttatatttaatagatgcntntaatgtttataatagacaaaacttagcatttctggacctcattaatgcacacacgtcgcgtaaatagctaggtatgatttgcgcttcttaaattcattctttttcagttttacaaatactgtcatccttgatagccccatgtatttacattttacttcattttatttgtgtccttcatgtcgtacttagagttttatttatagctatatatgtgaaaatttatagtatctgaagttcccgtgaatgcaaggattaactgtttgtttaaccaaatcctgcagtttgttgtagctaaattttgtaccctatagttgtgtgctactcgttaccacccgcattttacattatcaaaagtgcataacagacttttaaatctgaatgaattgtcgaaacatcataactaaccgcacgctagcttttttggtttacttgtttaaccgacttaattacttcaaccatccccacaaaaaaaaaacttacttcaccataaagtactgcttttgtatgaatgatttgtgtatattttatattaaacatttttctcatctagagtcgacgtcacttcctcatcatgtttatttgatttgaaagggacggaatgcataaacaggagaccattattggtactaataggtgcaagcaggggattctcttaaaggtctacttcctatataaaaaatcaaactagggataaatctgatcacatgtaaatctgtgttcagatttatcgttagatttgattttgtttgcacagaggggtatggcagatacttgaagtaacaggcatgtaatgcttcttctggccgttcacgataaaaatagcaactacagatattttgatcaagattttaaaaaactgctccataaaaaaaactatagatttagtattaaatttatcacaaaactatataattaaagcaagtaaaaaaactatagatttctaaatataaaattagcacaaaactatagattttagagtttaaattccttgtattaccattatgtcgaaactatgagtgttatagaattttgactaaattggtgctaaatttattttttatgataactttattattaaattagtagttttgtgatacgccatcttaaatttgtagttctgtgataaattaaatgctaaatatataatttgtgatataccaacttaaatttatagttttaggatgatttagtcaaagtattattttgtatcttgtattgcgcattgcaagatacataaatatgaaaatgtccactctcaattaatactctaaactattttttctgttctatatatttgcctcttgcataaaagaatgtctattatgtattcattttcttaggaatatatcgaggagacaaataatgtttttgtatgaatgatttgtgcatattatatatcaaaccttttctcatccaaagtcatcacttcctcatcactttgtcctgtttatttgattcgacagggacagaatgcataaacaagagaacattattagtggcaggagattctattgaagatctgtggcagctacttgaggtaacaaggcaagtgatacttatggtccattactcgtgacgaaaatgagatcgatcgtttgtgtattcatgtctcagtatttatttacaagatatacaaatgtgaaaacgtccactaatatcaattactccctctcaggtaaaaaataattatcattttaaacaaaactaatgttaaactttaaaaactttaactttgaataacttctaaagtattttccttagatcttaaaatgtattttaataaaatcatatatttattagtacttctataatattgtaatgatctctattgtaatagaaaatagtggtaaaaattagtttttggagatcgtgttgttatatccagaacgccaagtatttttaatctggagggagtattactctaaactatttttttctatatatttacgatctcttgcataaaaacatgttcatcatatactcattttctgacgaataaattaccgatctgaagttgatgccaaaatttaggaatctcgtttccgatatacctttcagcctctatcatcagcatctttttgggcaatagactaaccctcacatatgcagtgaatttcccacttgttgcctccacatgaactcctccacgccattcttcctctttcctcctcactacaagcccttcctctcgccctagcttctcaactctgtccagaactgacctggaatccgcacccggcacgacgaatcgaactcgatctggcaatggaccgatcaacccgcttagatcgcatcccgaggcgaacccgattatgtcgaaagcatttagctccattgcttgctccaattcagcctcccagcctcccatttctccacctctagtttagaatgagaggatgcagcttggatcataccgaatgatgacaagctcccatcttgttggaaccaagggtgatcgaagatttcaccaatcttgatacgggtatcgggttccggtcaagcatccgcccgataagagagcggagctccggcgagcaccatttcgggcaccggaacttggcggcgcagatcttccggtacatggccatgaggttgccgtcgttgaacggcaggtagcccgccggtgagcacgaagagcaccacgccccagga

SEQ ID NO: 17416 - DNA, 1209 bp, Oryza sativa
  unsure (1)..(1209): unsure at all n locations
cgcgcatggattgcacttcngtttgtacattgccactatatgaaattgaagtttgcatccctgcacgtcgactctagaggatccccataagtcgttatgaagctatttggtttaatataagaatcctttgactcggttgtgcagcaggcatggggagaaggagaagttgtgcgcaaccttggggacttcaaaaccaagatggcctacacaatggacgaacttgtcaagtggagcaaatcaaagattggcaacataaagaaaggtattgaaagtccgaggaagaaattaggtgaactcagaatggcagggatgcttgactctgaaccaaaggtgaaaaagatcaaagagcagcttcaggaaatgcttcgccgtgaggagatatggtggagacagcgatctcaaatcacttggctgaaggagggtgacaaaaatacaaagtatttccacctgaaagcgtcctggcgagctcggaagaataaagtgaagaaattgcgcaggcctaatggcagcctggtgtcaaatgaaaaggagatgggagaggttgcccgtgatttcttccagaatctatatatgaaagatgaaaatcttgaccctactgaacttttcaatttgttccagacaaaaataacagcggaaatgaatgagtctttgatgaaacccttctctgaggaggagataggagacgtcttgttccagatagggcatttgaaagcgccagggtccgatggtttcccggcgcatttcttccaaagaaattgggacccttaagactgatgttattagagtgtgttaacagtgaaatttggtaagcctggagtagtcaacggcttagagtcagcatcggctttgaagtctgagattagccgatgagagttgtcaagtcgtcagttgtcggattcttgctatattcggttaaggaaattgatctactaaatgaagtttatccagaagagaccgagttcaaagagaatgcggcatggcaagttatctattaattaggaatagtttgtaagtttccttttatctttaggaaagtttctttcttgtcctacaaggactagtatctacccataggtataaatatgtacacccggggtcattgtaaactatcttcacgatcaatacaattcggcgcatcgccacccttttacttctacttttgtttttacgttccggcggaacttggcacccgacatggggctgcatcgt

SEQ ID NO: 17417 - DNA, 3957 bp, Oryza sativa
aacttggcacccgacatggggctgcatcgtcttcgatctccggcgaagggatcagtccaatgttccgtcggcccaggcaattgtatcgtctacgtcggcatcgttcaaggctgcatcagtacattcgacctcttggattactctggtttggataatatatttgcctggctatttatcatatgtctatgttaatctagtcctagcatctcaatttagctctatcggatgtctctcactttagggtttctgccggtatcggctaaatcgccttgctagattagattagtttagacatctaccaccctgaaaactcagtcatcggcttgattgtctagatattatttttctttttatgcttagtgctgcatcagttaagtttgatctactaagtcgtgcttagaaccataatttctagcctgcttcttgattgccaataagggtttcatcggggttacagccaatgagttatctggacgttgcatcggcttacaaggattgcatgtacatataagttggatttagccgatcgcaacaaaggttttactgttttatctaatcctgtggatttaatgacatcggacctccagccgatgtatgctttaaccttcggatcaatacttgttctactatatcatattgttagccgattggtttctactgggctattcggatcagtgcttattatatcttgtttctagccgattggtttctactcggttatattgttattttattacatcatcatcaaccgattgcctttatatcattatctatattggacatatagccgattgcttaaaccctatcgctatcggctggtatcgacatcggctattatcagctatcggttggaactactccatcggcttgtcagccaatcggctgttttatctgctgtttacatattttgtcagttgtaggatcaaattgactggcacgctcgcatctcatcaatctttggaactgcacaggagctaagcagatctcccaggccggtgtgttcgattttttcgtcaacagagtggtacaagcattttttgaaaacggcgaaatgcaggagggagcaaatgacactgtcatagttatgattccaaaaactaagtcaccggaggagatgaaggatttctggcccatcagtctatgtaatgtgatatacaaggtgatagctaaatgccttgttaatctatgtaatgtgatatacaaggtgatagctaaatgccttgttaatcgactcagaccgctccttcatgatgtaatatcaaatgcatagagtgcttttgtatcaggttgcatgatcacagacaacgcgctcatcgctttcgaatgcttccatgccatccaaaaatgcaaaagggagaaccagaatttttgtgctctgaaattagatctttcaaaggcctatgatagagttgattgggcgtttctggatggggtgttgcaaagaatgggttttggagaatcatggaggaagtggacaatgtcatgtatgacatctgttagatacagtatctgtttaaatgggaacctgctagatccttttaccccaacaagaggattgcggcaaggtgatcctcttagtccatacttgtttctgtttattactgacgggttgtcacatattctggagaagaagagcttggaaggttcaatccaaccaattaaggtgtgtcggggagccccggggatctcccacttactttttgctgacgatagcttattgttttttcaagccgaggttgatcaagcgagaatttgctggaggcgctcagtctatacgagaaaagcacagggcagcttattaacccagcaaagtgttctctgttgtttagtgaattttgctcataggagaggcaggaggagatcaaagctgttctgcagattcaaagagcaggttttgaagataaatacctaggccttccaactcccgaaggtaggatgaaatcagaacaattccaaccaatcaagggaagattttctaagagattaacagattggtgtgagaggtttctatcagctgcagggaaggatactctgataaagagtgtagctcaagctctccccacctacacgataggagtgtttaagatgcctgaacatttttgtaatgattatgaatagatggttcgcaatttttggtggggacatgacaaaggggagaggaaagtacattggatatcctgggaaaagctcacgagccctaagcttcatggtggcctgggctttcgggatactcggtctttcaatcaggctttattagcacgtcaagcatggaggttgatcgcggagccgaatagcttgtgcgctcggttgctgaaagcaaagtattaccccaatggctcccttactgatacagctttcccgtccaatacttcaccaacttggaaaggaatcgaacatgggctggaattgctaaagaaaggactgatttggaggataggagacaggcggactaccaagatttggaggaatagatgggtggcgcatggtgagaaagttgaggttatacagaagaagaattggaataggctcacgtatgtacatgagcttttgatccctggaacaaacgcctggaatgaggcattaatcagacatgttgcgacggaggaagatgcaaatgctattctaaagatccatgtgccaaaccaggagacatctcactttcctgcatggcactatgagaaaacaggccttttttcagtaagaagcgcctataagctacttcctccgtttcacaatataagtcattctagcattttccacattcatattgatgttaatgaatttagatagatatatatgtctagattcattaacatcaatatgaatataggaaatgctagaatgacttacattgtgaaacggagggagtagcatggaacttaactaagagtgctcaagttcaggccgcatcaagtactgctaccaatggtgaaaggaagctctgggagaatgtgtggaaggcagacgttcaaccaaaagttaagatttttgcatggaaacttgctcacgacaggctgcccacttgggagaataaacgaaaaagaaggatacaaccagtaggcatctgccctatctgtggtgtaaaggaggaaaatggtttccatgcgactgttgaatgtacaatggcgagatcgttgcgagaagccatcagagagttctgggcgctaccgccggaaaggaagtttgctatgactgggcctgactggctccttgtcctgttggatagcttgaatagttcagacaaggcgcgtgttttgtacttgttgtggagagcatggttcctcaggaatgatatgatccatggaaaggggacggccacaattgcagagtctgtaaatttcctcgtcaactatgagaaggtactgttgccgatccgacaacaaagcgatgacatcaaaggaaaaggattaatgtataatgaaccaatggtgaaattactgcaggttcagacaaccaatcaggttgataaatggcacgcccttcccgaaggttcagcaaaggtaaatgtggatgctggttttatagaagacacaggagtttcagctgctggaatcatcattagagactgcaggggtttagtgctgtttgctgtgcaaaaaaatcctgtgctactgctgtccaagctgaggcattggcatgtctagaaggattaagggcagccatggaatggattcatatgccaagaatcttggaaactgacagcgtagaggtgttcaaggctctgtcacaacaggagctgtcgagatcacccttggcagcgacaataaaggaagcgagagggatgatgcagtgtctctaaagtgtgcaggtttgcaagatcaagagggaagcaaataggattgctcatgctttagctcaaatggctatgaggtctagatcgtgtgtggagtagaagttgtgtgctcccgcaggaatcttaaacaagatagaccaagaatgtaatcatctcggggatcc

SEQ ID NO: 17418 - DNA, 1439 bp, Oryza sativa
tcgtagacgcactcgaatcgagctaattttggaacagaaacataatcttcagttggaaacaagaagtggattcagaatcgaagcaaacttaacaaaaagggaaacaaaaatgaatctgaaatgattggggatcaaatcgaagttaaaaaaaaaaacacccgatgccataaacccaaaccaaaacccagagcgtgaacatttcaaaaccgccgccgccgccgctgtgtcccctagcgccaccggcccgtgagagagagaggaagagtgagacagtcagacagagagtgagagagagaagagagagaggaagagcgagagagagaagagagaggaagagtggaagaggagtatgacaggtgggtttcatattttttaataaatagaatgctgactggattatcacgcgtacaccacgtagaccaaaaccaccgcggattgggtcgagggggttaattcgttcggtatgcatagttgggtgtgaagaatgtccggttttatgattaggggggtaattcggtcgaccactacagtacgggaggtaattcgtactttttccttttataaaggatcctagtggttacaagagcctcagtaacatcttaggtcctgggttcgactccacgagggagcgaattttccaagatttagcggcattgtgctttcagtggtaagcgacgtacccgtcgacaacgaggcgtctgtggtgatttcttcaatctccaggatttactagttcagtcttcgaagatgctcataggggtagggttttgcgtgcgtgtgttagtaaggatgagtgtgcgtgtgctgtgagtatctgtgttgtgctgtgtaatttaaaaaaaaaagaagtacatacagttgttgtaaaaaaatacaactgagtttgtgggtggtagatacgctgccaccatcattatcttcacttgcgagttgtgataagatcatcttcacttccattcgtttttagccttcttgcatgacagcagcaggctgtctagctagtacagggaattttatttccgtatcatgagatcgagtttttccataaaccaaaggcaacagctctaaacgtgttatttcttatagaacaaaaacatccgaatcggaagcattagtggcctcataaacaggagcatgaattaattaacaacatggatcgaagtgttaaaactagattattctttccaatcacctacttattaaagaccaaacgacagctacgaaagagtcacccccgatcgaaactcgaaattaaagttgtagtccatccaatagtcatattttatcttagcacacagaccaacgataagtgtttctacttatcatctatttaaacatgatactagtcattcctcgtaaacaagcgattcattaatatttacatttctcgatgtccatgtagccaatcttgtgtggaagaatggagagtcacgcattaa

SEQ ID NO: 17419 - DNA, 1507 bp, Oryza sativa
  unsure (1)..(1507): unsure at all n locations
ccccaaccggagacgcaagaggcatgnagatcggcttcctcttccccggtgtcgatctgaagcngtcatcaccaatccctccttcaccggtgagcgcacgcattgtagaggcggtcgtggacggcgaactccacggcatggccctgctccagcgtgacaccgctgctgccatggaggacctcgccgcgaaggcggaggcggagcataaggcgctttgagtagggctcggtgaagacgaactccgcggcggcgaggacgacgccgaggcggtcgaagtggcagaggaggagcctcatgagctccggcgacgggcagtgcagcacgtcggcgtgcgtcgagagagagagagggaaaagaaaagaggagagagagagaggaagccgtgtgccgggatgccgccgtgcgtcgtcgccgtcggcggcgaaccctggtgatgcgccgccgccgccgcccctctgtggccgagccgtcctggctcgggccggccaccatcgcgcctctgctcggctcaatagcaagcgtgaggaagaggaaggggaaaagaaaagaaagagggaaggggcattttggtacttacacaactctttctctctccattttaacccgtaataataaaataatgggagaagtgtccagcagctaattactacttttttacagtgtccacaatcaaatacacgatcttcgggtgtctcacagcaaaatccacaatctttcggtgtactgtagcaaattttgcctttgtgaaaagttccctttctatagaacctcgaccggggctgctccactagctctcttcttcccctcaccttgctcttctctagcaaatccttgtagtcttgtgagcggtggtggcaggtgtatcctagtgacttgcaccaagttcttctcctgttatattttatagatgcaatttatgtttataatagacaaaacttagcaattctggacctcattaatgcacacacgtccgcgtaatagctaggtatgatttgcgcttcttaaattcattctttttcagttttacaaatactgtcatccttgatagccccatgtatttacattttacttcattttatttgtgtccttcatgtcgtacttagagttttatttatagctatatatgtgaaaatttatagtatctgaagttcccgtgaatgcaaggattaactgtttgtttaaccaaatcctgcagtttgttgtagctaaattttgtaccctatagttgtgtgctactcgttaccacccgcattttacattatcaaaagtgcataacagacttttaaatctgaatgaattgtcgaaacatcataactaaccgcacgctagcttttttggtttacttgtttaaccgacttaattacttcaaccatccccacaaaaaaaaaacttacttcaccataaagtactgcttttgtatgaatgatttgtgtatattttatattaaacatttttctcatctagagtcgacgtcacttcctcatcatgtttatttgatttgaaaggg

SEQ ID NO: 17420 - DNA, 883 bp, Oryza sativa
tgcgtgcaaagcccatacatattctacgcgcaactgtcacgcacaaaaacgaagtttttagtaccacatggaaaatctatgacgactgacaccggcataaaagacgacgcgctcgcatcgctcctggcgagctcggtggcgtgagcttgttaccccagctgcgggggggcgggagttggcatgtttcggctgctggagaaaatgaggtttctccctcgatcgaatatggatgcaaacatcctcccgactttggcccacgagggagggaaggtgtgagtcaccctgggctcttgacggctgcgtcatggagcgaagaggacgctgaatcgtgggagaggtgtgtggtggccggtgcccgacgacggcgcctggcgatgcgtggggagaaggcgagcagttgtatgtgaagaggacgctgaatcgtgggagaggtgtgtggtggccggtgcccgacgacggcgcctggcgatgggtggggagaaggcgagcagttgtagttgggacccgccacaccccgcacgtgcgcaagtccatgacgtgagcgctcccggtcattaggagccacgtcagctggcggcctccgccgttgagcttttccctgccaaccgacaccctttttcccacccattggcgaatgccctatagggttgggttgagataggagtagaggggagtgaggtggaagaagattgctaggtggcttgtgggctccacgtgggccctgcactgactcaaccaccacgttaacaaaaccggaaagcaatactaccttgggattaaaagtggaccgttttgcaagataaggggtcagggcccgttaaaactcaacgacaagataaggaccctagataacttttttggagatgaggcgcctgtgcatatt

SEQ ID NO: 17421 - DNA, 1522 bp, Oryza sativa
ctgctaccgctgggcagtggtgaccaggttggtcatgttgtccaaccatcgctggacaggggtctccggctccgaatttatggggggatgccgtagaagggctcccgccgcctaaagtgcgcctcgggatgagccgccgttgccgtatgtcaggcggccccgtgccccgacactgcgcggtttctccccgcgcggcggcggggagaggttcctccctctgtgggggggtcgcggtgggcaggagtgggagagttgttgcgacggtggtgggggccgcggctcccgctagcatcgtcactcccggagggagtaggggtgtgcgccaccacttcttcctctaggacctcgaccatgatcgttgaggatggagggaaacttgtggtggaaggaaacgatttctctttcaaacgcgcgaattccccctacctggcgcgccagctgtcgaggaatgatcctctcttgcgggtgattgagggacccccttttgtgagttcggccgggggaaagggcgcactgatcaagaacgtatatctgcctagagtctttcgagaccgcgtgtgagagctgggattgtacaagttcgggccgctagggagcgtaataccctactcctgtgcgtgggatttaagggttgagtgttacaaaggtttctaaactccagggagaactcttactcttcttcctctggggcttaggctaagtgagagtcatccccccttttcagtgggcaaggtcctccttttatagttcaaggggataccacatgcaccgcctctacctactccttcaagggagggggcccacgccgcttggagcggaccaccattcgtgccttcaccggaagctaagcagccgtccgtcctcgagtggggcccagcgccgtcccctgcctgacacgggggacgcccttgtcattcccctttaagtgaatggagacttttggcggttcacctcacgtggagggggctctagacgatgcattgatgggacggggcatacctgcccccactccgccgagcacagggcggaacgtgggggcaccgccgcccgtccgattggatgtgatcggccacagaccggtcacgcccgattgacgcgggtcaatcgggcagcgccgcacgtccgccctcaccgcattaaatgcggtgtgggacggttggggtgctattcattgatggcggctcagattcggccaccgccccactcactccccccgccacgtggcggccgggcgagggcctcggggcgaggcagcctgagggtcaaaggggcgtgacgtggcaccccgaggccccctggctgcctttgcgtcgtccgagatgtggggggagggccaggctgtatggccgcgtggctggacgggattgagacttccccatacttctcatatcctcaggcccatatcaccgacaattattctcacccctagttagctaatgtaactagttagttcaggtggtggtttgggcttgtctcaatgtggtgtagtgttaaacagtgattggttaatattgattaaata

SEQ ID NO: 17422 - DNA, 2124 bp, Oryza sativa
ccataacttggccatttgaacacggaattggaccgttcaagtctctaatttttccttaagaagtcaagaacccatttttgtgctttgtttctgcttgttatatggagtttattagagtaaaagccttttctttttcgttggtcgtgtagacgctgcagcttcggaagatccgctcttcgtggaagttgaagtcgacgtttgggaaagcgagcaaggcaagtcacatcatccttgaacacattgaatcccagtttataaaattatattgatttaaattattgcattatcgctttatttaaattcccgcgttatcactgttttgtttagccatgcctatttgcctttgtatgaccttattattgttattgttattattaccttgttcaccctagaataaacaaaaccccaactagtggacactctactcatggtaccactagtatgaatttaggtagatgcttcgctggttaattaggcaacattaggtggttttacaactctagactttgggaatattctcatcacctggacactatggaatggatggattattgggaattggattcacacctccccctctattcaaaaccctcaaaatggttttaggctgggctcggggtgcatggttttgatagtagcacctcggccataaaaggaccagtcttcgggcctctgttgcaaagcactaccgtacttccacatgtctagtggctaaggcttagtttgtggctcagtctggttataaacaaaagtacacggatggagatggacgaagtcgggggtcaatggacatctctagggcaaatgaaggctacacgagctgcggcccggtagtcgagatgtcatggcacagggccggtgtcctgctgctaggggctcggtcctgcctacctgtcccgaaggttccggccgtaggtggggttgggtcggtaatcttgtctttggctgggttgggttggaaactatgtcacgtcttccgtccgtataccgtggtggtatgtggcacgtggttacacgtgagaaagatgtgtcttgtgggtaaagatgtacacctctgatcagagtataacctattcgaatagccgcgccctcggttatgggcaagcctagcaatgtacccaagttattgttttaattcttaaaacctgcttaacaactaaaatgtggaatggttggcctgggttggcttgggacgagctgggacccagggtcgggttgccagttcggtctgaatcatcgtaggccttgggttaaggcaggttcgtgtgggttcacggccttgattaataatattgtatagctctaggactgtgtttacaaagtaggttggagcaactaagtgacttttaatgctgtttactgcaatccctaaccccctatattatggctcccttgtactcccttgcatttattctgcacttgtgggtatgtcttgctgagtacggtggttgtactcagtcttgctcaatttttcccaaacccagaagaggagttcctagaagatgaaggttttggtgtctagctcgtgcctgccgtcaagcacctgtggtagtcgccctagtcttccgctgtttcccgtttgtctttgtgtgtgctgggccttcgccgcccatgtaataaattaattatttacgcttcctcttgataaactctgaaatgtatcaacttttggtgtaccttgcctcctgggacaaggaataatacacgcacgtaaggaacgcccgttgggttagttccggtcgtgacataaggtgaactagtagattgatagagagcttaatacacttcaaatagatgatattttaatataaagggcaaatttagacgatcaagacccaagtagtggaaacacgatggctaaatcaggtaagatcggctgaaactccgatactaactctattagcattcatagaaagagctagataaaatgtttcaagacagtacttagtagatcgaacctaaccaatgcagcattaagtgtgaaaagaaacataagatctaagccagaacgatgaagactcatttgatatggtagatataccgcataatctagcttaatgttgatatctaaatctggccgcccgtttcgatgatagaggctatccgatgagattagattaccaa

SEQ ID NO: 17423 - DNA, 990 bp, Oryza sativa
gagtagtcagatttgtcaactagaaatttgattctagcgcaaactacagaactcctcgaatccgattaggatattagccactgaacagatcaatgtggtgcttgtatttcagctcctcgacgtgcttgttttgttgatggagatcgatgccgagtctggcttggacccggccagctgatgccgcccaccggttggcgtcctgcacgtcgatgggttagtgtcggatcagttttggattccgccaacactatggtcctctgccgctgcgacatcttgaagcttgattggtctcgccggatcgaatagttgatggcgatgattccaatctcgttgggagacgtactttggccaggttggatctccctgatccgaagtcgtcgagtagcttattgttggagaatccatctcttaaacccatctcgtctaaatcctgaagcaccaaaaaatccccctacctggcgcgccactgtcgacgtttgatgtcgcgattccggtatttgcatagtatggggatcgtcggtactaggacatacgcgagactgaggtaaaagagacagaggcgacgatttttatacaggttcgggcccctgaattgtcaggtaataaccctatatcctgttggccgaagccggtattgctcttattcaccataatcacacgagtacaatatttggggtagcctatctaactgttgtcgacatggcggtctgtatgtctgactcgtagtcgacaacagggtagtattcatcctttagttcctgcccggcaagatcagagatagcacttttgtctctcctgacagtatccagagacagggtaggggactagccgggctaatccctgaagcggatatccaacgggttgcctgggcggaggtgggtttgaaggtggggcgtttggtggttcccgggattgtgataatggccgcggtgaattagaggggcccggtcccctctctctcctaaggggtctggtttatataccaaaaag

SEQ ID NO: 17424 - DNA, 730 bp, Oryza sativa
aggtggtcatccgatttcttctctattcaccaaacgcagtttcgttgaaatttaggtacaaacttgtagggcctgatcatcaccctgcaatcgtctgttcgtacaagaaggtcatccgttcctcacattgcaccaaagcctctgaataatgatcaagaacgctggaatgggtttgagtaacgtacagattctcaaacttcatacagtcactatcatataaaggtcatgttgatcatgcttcacaattgagcaacattctaggagcattcattcctgttcccattgcagcaccattcaaaccagcttctccatatttatcatatattgatcgcttctcatcatcagccaagacctgcaatcctatttatgttagaagcaaggtacctgtagccctacgtcagcatagtcataagaacctctgggatttggttatggtcagctgtactaacctcataagcattgctaatatccatgaacttttgttcagcaccaggatctctaaagaaaaatacacaagcatcccgattgcgttatttgattatgtagttatgagaaaggtaatgcaccacctagtaatcaggtttataatggatcgaaagcagataaagaagcaatatatcgagtgtatctgaaacgcaattcccatataatggttagtgcacacttgttcacctcaggatggtagctcccagcaatcttcttataggctggaaaagaaggaccattttag

SEQ ID NO: 17425 - DNA, 1458 bp, Oryza sativa
  unsure (1)..(1458): unsure at all n locations
cgcgcccattgagnntttgattgaccattaggcgacacattgactatagggccaattcgagctgggtgcccttatcaccacattgaaataaatcgtcttatatacatattgttacagcaaaatattacgttgatgccatatgtaatatgaaaaacgtgccttgcacgtgcatgaatactagtttttttaaagtcactctttcatgactgaataaactaagaaacatcataaatccttctttctagtttccaccctcgttgtttctgctacactttttgcttctatactaaattagttacgtctaggttatgcttctatgatacaaagtgagcgaggctcaactaaagaatgccttgtacactacatcttgtcaggaaggatggacaacaagatggctttcaattgaaactaatatgcatatatgaaagtcattaatataccattgtttaaaactttgaaatcatatcttgatgtcgcttgaaacaacatatttgcatgaagtgacacgtttggtcgacaagcgcatgtcatattcacaatgatcatgcatatgcggcctttcatatgcgcttattttagtagtggatgaagaatcaatgtggattgctacatctttacgtgctttgtatgttcttcgattttgttgtagtggatttagtatttgccatatgtgcttcgtgtttgttcttattggaattaaaggatggacatcctttatacgctccatttatatcttaaagacaaagtagcttcggatcgaatataagcacacagtaaaattgtagagtaccaatgatggtaattagttacgacgatgtactaggatatatcaccccgagtttcacatgtcaaatatgatgatatctgagcctatttttaacttccaaaccactatattgttaaaactcagtacaataaaccgccaagggtggtaatgctactaggtgcactatagtacctagggtagataccatatctagatggcaagttcaaagccaacagagcttgggctggagcttgagccagattccgatcaaagtagagatcatcaaactgctggagttgtagctgctgcgctatgacctgaaaaatgttaatatcctcatagtgagactgttgcgccaccagccaaagctggtgccagacttggttgtttctcagttgaaacgcaactgattgcaataaggggcttgccgtatgccatactgctgccttacgaactcattatatgggctaagcacctgttgctgtagcaggagaagcgactgcagctgatattgcctataactttgacctaaaacatcaaactgcgcagaggcgctgcatgcagcaatagtaagaagagcaaaggcgaaaatgatcttcattgctacgggacactagatcttntctttttgctgtataatgccttgactgtgtgaacgatggngagggtttncattgcgcttgtctatttat

SEQ ID NO: 17426 - DNA, 1547 bp, Oryza sativa
  unsure (1)..(1547): unsure at all n locations
cggagaaaaaccctttttttttcccccccccgggggggggggaaaaaggccccgcccacgncttacttctgggaggcgctcttcccgttcctgtacgtgaacatcctcgacaccacgggggggctctactccatggcgaggttcgccggcttcgtggacgacgcgacgggggacttcgagggccagtacttcgccttcatgtccgacgcgacggccatcgtgttcgggtcgctgctggggacgtcgccggtgacggcgttcatcgagtcgtcgacggggatcagggagggcgggaggacggggctgacggcgctcaccgcggcggcctacttcgcggcggcgctgttcgtcacgccgctgctggcgtcgatcccgtcgtgggcagttggcccgccgctggtgctcgtcggcgtgatgatgatgcgcgcggtggcggaggtggactgggccgacatgaggcaggccgtgccggcgttcctcaccctggcgctcatgccgctcacctactccatcgcctacggcctcatcggcggcatcgcctcctacatgctgctcaactcatgggactgggcctgccacgccgtcgcggtgctccgctcccggcgccggagaggggcgcgcgccgagacgaggagcgccgccgccggagacaatggggaacagaggaagaacttggaaatggcttaattagcttttttttttgcataatttcctttttaaaagatttagaaggtgattaggatttgctatatatactggaagatggttcaaaaggcttagtaggatgttcaagtaaagttattaatcaagtttcagtccctgagtgcctgtccattttcggaggtaatataacaaaacaatcatcatttgaaaaaaaaaaatcgaccttttacaatagatgtcgagaacttgtaaaagatttgcacattattccatcgaaataacatggtgcgaaggtctaaatatacaacgaaccaaaattttctgacaagctgatctaaattcatttgtctgtccacttttaggtgaaataacttgctcgagtgtccatctgtttgtcattttttttgaaagaactaaaaagagaatggaactaacccttgtgagcgcctgagcgggctcctcatttattgatttttttaatcataaaacaaggtttagaaaaaataaactataatacccttattaaatgaaatatagctagggttggaagggtggttagggtaaaatgaaaaaaatgaatactaagacatgattagtactgtagatgttaattattttgagataaaatttgaatactaatgagacaattattttagaacggatatagtatttttaaggagaaaaaaatatgaaatgttatgagaaaagaaagggcaaccgatgccggcgaaagtcaagaattgcgtatcaagtaaacgggtatgaccttacatgatggtatctttaattaaatattgctaactgatgccaacttatgtgaattggagtgatgggagcttttaagtggcactatcaatcagtcataacattttgacttgttgaca

SEQ ID NO: 17427 - DNA, 721 bp, Oryza sativa
cgctgctggggacgtcgccggggacggcgttcattgagtcgtcgacggggatcagggagggcgggaggacggggctgacggcgctcaccgcggcggcctacttcgcggaggagctgttcgtcacgccgctgctggcgtcgatcccgtcgtgggcagttggcccgccgctggtgctcgtcggcgtgatgatgatgcgcgcggtggcggaagtggactgggccgacatgaggcaggccgtgccggcgttactcaacctggcgctcatgccgctcacctactccatcggctactgcctcatcggcggcatcgccttctacatgctgctaaacttatgggactgggcctggcacgccgcacaggggctccgatcccggcacctgaaaggggctcgcgcctagacgaggagcgcccccgccggagacaatggtgaacagaggaagaacttggaaaaggcttaattagcctttcttttatgcaacaattctttttagaagaattagaaggggactaggacttgctttttatacctggaggagggttcaaaagggctaagaaggatggtcaagtgaagttaataaataagttcaatgccagaaggcctggccattttcgggagggcataattacacaaaaatcgttttttgaaataaaaaatccgccttttacaataattttgagaacttgcgaaagaattccccatttgtccatggaatgacatggg

SEQ ID NO: 17428 - DNA, 2733 bp, Oryza sativa
  unsure (1)..(2733): unsure at all n locations
aagaagtggtggcgcacacccctactccctccgggagtgacgatgctagcgggagccgcggcccccaccaccgtcgcaacaactctcccactcctgcccaccgcgacccccccacagagggaggaacctctccccgccgccgcgcggggagaaaccgcgcagtgtcggggcacggggccgcctgacatacggcaacggcggctcatcccgaggcgcactttaggcggcgggagcccttctacggcatccccccataaattcggagccggagacccctgtccagcgatggttggacaacatgaccaacctggtcaccactgcccagcggtagcaggctgcgggtggccgacccgccgcctctggtacctcgcgtaacccaccgctctttcctcgtcagcaagaaggagggcccgtcggtcggccctgacttcgaggtggtcgacggccccaacgtcatcgaggatctcgggaagccggggacgtcatggtggcctctacgaggagggacgctcgaatcaacattgagcaacacagggacgagcactgggcggcccgcatggggagggcgcctcctcatccggagtgccccgctcctccacgcgaggcggcccgcccctcacatttacccctggagggaccagttgcagggccttcaaggcgagtctccagagtccggtggcccccgaagtttcgccccaacctcacggagaaatatgatggcagcacgatcatcatgatgcggggggcgacgactaggtcatggcgaattacttccccatggctcttaaaggtcaggtgcgcggctggcttatgactcagccccccgactccatccactcctgggaggacctgtgccagcagttcattacgaactttcaaggcacgtatccccgcccaggagaggaggcagacctgcacgctatacaacggaaggacgacgagtccctccgctcatacatacagcgcttctgccaggtccgcaacactattccctgcataccggcccacgcggtcgtttatgtgttctagaacggcgtgcgacacaactgcatgctagagaagattgcctccaaggagcccaagaccatcgccgagcacttcgagctggcggacaaggtggctcgaaaggaggaagcgtgggcctggaactctcccggcaccggcgcggcggctgcagctgcccccgagcccgcttcccccccccccccaagggggaagaggaagccggcccactctgatgacgagggccacgtccttgcggccgatgggccctcttgggccccgtgcaaagaaagagccaccggcaacaagccgagctccactaccccccccccccggcgaaggtcggtctgcggataagtggtgctcgatgcacaacacctatcggcacagatcggcacagcctcaccgactgcagctcggtcaggtacttggccgagcggtacagaaagaccgatgaggagaagcggcagagtcaacgggagggcaaggcccccgcgacccccgctagcgaccggcggggggaggccaataaaaaggcccccgccgatgatgatgatgacagcgaggacctggaattccagatacctcagggaaccgtcgccactcgcgacggggggtttgcgctcacacctcccgccgcagtttcaaggccatgaggcatgagcttctggccgcgatcccaactcacgaggcaacatggaaggcgcgctggtcggaagtgaaactgaccttcgaccagagcgaccatccgacggtgctcgcttggggagggaagttggccctcgtgatctcccgaaccatccacaacatcaagatgaagtgtcctctagtcaacgggggggccggcctcagcatcatctccccggctgcctttgatgcccttaagtccccggggatgaagcttcagccgtacctgccgatcatcggcgtgaccccgggacacacgtagcttctgggtcacgttgagctcccggtaacctttcgtgactctaccaacctccgcaccgagcgggtcgacttcgatgtggcggatcttaatatgccctacagtgcggttttgggaggcccgcgttggtgaagttcatggccgccacccactacgcctacctccagataaagatgccaggccacagtggccccatcaccgtctttggcgatgtcaaagtcaccctggcttgtgcagagcagcgcgccgataacttggcggcagccaccaagccgcaggccccggagccctccacaccccgcgcctccaagaggcgcctcgcctcggccgacgagttgcccgtcaaggagattccccttggcgatgatccatccaagaccgccaagattggcagtaccttggacgccaaataggaaagtgtgctcgtctccttcttgcgggcgaactccgacgtcttcgcgtgaaagccatcggatatgcccggggtccccagggaggtgatcgagcaccgcctcgcagtgcggccagatgcgtgacccgtccagcagaaagtacggcaccaagccccggagcggcaagccttcatccgagaggaggtgatgcggctcctggaatccgagaagtcatccacccagagtggctggcaaacccggtggtcgtctcaaaggccaacggcaagctccggatgtgcatcgactacacggacctcaacaaggcatgccctaaggatgggtaccgagctcgaattcggcctgtttcaaacgatncgtcttactatgggacac

SEQ ID NO: 17429 - DNA, 6523 bp, Oryza sativa
aaggaaagctcaaacgggtgattcgtaaccggcaatgtcggtctcatcttctccagtcaggtgttggccacctcgttcttggcgagcacccacgggaagcgcaatcgacggtcaccgaatgcctgcggaagctgtcggaacaacgaaagatcttccaaccccctgccctctcctgatgatgcagtgggtcgaggccacctagtgaccgtggctcggtaggcagcgacaacggcaaccacggcagccacggtgaagcctgtagcgagctccctccttcaccgacacagctcgatggcagcaatcgatgattggggattgggatttgtgattggaattacttttttgctccaaagaaaatgttttcactagcgggcattttaacattgccgccagtgaaattctattttcgctggtggtggtcttagcttggcggcagcgaaaatgattttcactagcagctgtcttagcgtggttgctagcgaaaattgattttcgttggcagtcaactgcccgccagcacaaatgtattattttcactggcctttgattgctagcggtacagcaacctccagcgaaaacccatttcggccgcaagtaaaaatggttttttagtagtgaatcaaataaacatgatgaggaagtgacgttgactctagatgagaaaaacgtttactatacaaaatatacacaaatcattcatacaaaagcaattacaatttacaaaaacaacactaatgaacatgattattctagatgtaggaattattctggaatactcctcgtcggaaacatgtggaacgcatttctctcaaaacgcaaaaaccgtgcccagacaccaatccgccgctggatgtgaagccaacggcccagatggaggccaacggtgccaaggcgcaggccacgcgtgtagggctggacgaaaagctcgtggctcgttagctcgctcggctcggctcgtctcgtttggatttgttaacgagccgagctagagttagctcgttagctataacgagccggctcgagctagctcacgagctgctcgcgagccaaacgagccaaggcccagtacaaacagcgtgctcaaccacacaccataagtccaacaaggcccacgagacaaggtcacagctcaagcccacaagtagagtcaacggtgccaggtcatgaaacagcaagcccaactaagcccaatagtctaaccctaaaatccctccctacctgtccgttccttttctcaacgattcccagaagcgccgcttatcctcaagccgagtggccgacagcgccgcccaggagtcgaggagtcgtagctcgtagcgccacccttccttgcgcgcgcggttgtgccctttctcgccgccggtctccccgcttcacctcgcatcctcaacgtcaacagctgccatccgctcctcacgctggctatcgggaaggtcagtaggtcacgccgtctccttccctacttgcctccggccaccctaagaccccaactcgcctcttcctcgcgcgaatcgcctagttacccggcgggcgacacccctactcccgtgtggccgcgcgtcctcgtcgtcttgcttgccctgctttctttggctcacgagccaaacgagcccactcgagctagacaactagccgagcctagcttggttttctagctcgttagggtaatgagccgagactagctagaccgagccgagctggctcgacatccacccctacacgcgtgcctttgcccaaatcttatctcccgggaggctcacttccctccccgagtggctgcgacgacctccacagctcgagacgaggtgccacttcttcttctctctctccatcccccattcctcccctctcttcccgtgtcccgtcgtccacagctccccgaccaaatccctagccctactattcccgcgcccgcccctccctcgcgtggtcacgcccgacagcgccgtgccgccaccgcttcttgccctactgccgcagttcttcaagaggcttttgtcctgatttgctgcagcccggtaggtattatatatttttgtggttggtaaattcggcagcaaaaaagaaaaaaaaataataccgaatgttataaacccgagcatctcatggtgtccatgtatcagcatatatgatatgttaggatcggtaaggatgcatagcacacgattacaaccaccaactccacctcgaagataatatagcgtagtgtttgccagcttcgcacgttatggccgaattcttatgtataacaaatttaccatggtatgtaagctcaaaaatgcaaaactaattatcctcgaacctaaaaaagtgtatacatgcaagagatgatcaatcccacatataaatacatgcaaataatacacgccctgctcgacagccactgctgcagctgtacctaagctactagctgtggccgcggtgtgcatccacaaccgtagcaatggctgctcagcaggcccatgatctctgaaaaagttcctgcaagcagtacatatgtatgtacagttgtacacaccctcgcccctattcatcctcttaaaggagtaaggagtaatgacagtcgatatgtgttggttgattaaaatttagaagagaacgtttttgaatagaattgtgaacttactcgaatatcgttcttttgtgtattgcttttgttatgcttcacctgactctatctctgtgaaatggcagctagtatattgaaggttgaagctttgtgggtatccagcaagtatttcaatggcgttgctacagtttggaggtaccttggcccccaaacttggggaaaaacctcagctgttgcccaggtcacctgcacttacaagagttatttatgctgatccaagatttctggtgtcgaaaagtgggtatgtgaatgtgttctgatcagtgagatgtactaggaatactaaaataaaggacacattgatattataaaaaggcaagatttctgagtaaactgaagatgatatatctctttttgtgcagtagtggaggcaggcttaaacaccttgtatcacctactgctagtttacaatcacggacatcttctcgactatttaaccatgcaccatcaccgagatttcgccatcgaaggagttcaaggttcattgtcagagctgatgctgtgagttacttcatttgcttttcttctttgctggtattattagaaaatccagtttcctgacatggatttgatattttaatttacaggatttctattccacacttggtgtttcaagaaatgctagtaaatctgaaatcaagagtggtaggtgtggttttatttgtcagtttagggcatgcagtgattggtgctccgtacaatcgtaggagtattacccagctttgcttcttctctagtttgagcctggttgtaggtttgtaggtaccctataatttaccaaacaaaccagactgctttcatgtggctattagtcgtagattactagttttaaatcatactgttcacgtgtgaaacaaaatatatgtacaacagaaactgttaagcttcccagggaagatatgaaatatataactagtctttttcaaacttggccatagtgagctttatggcccacttgtttgttctcgaaagctttactattcctactagtaactcaaatatttgctatttcatctaatttgaaggctatctcagcaaaaccccttgaactattctaagacaagcctatgctgtcttcagtatcattttctgcaactgatcatcttgcgttctagactcgatactgtttatatttctgaaaatctattgttggcaacttctcattgatgcattgtttgtatggccctcaatccctgccctccacgtgtgtgggcagaaattttgaacaaaaatcccaacccacacccgtagataatctaggatttgtcctatccaaataatgcctaaggggatattatgttagaaatccttcagagtcaattttgatcaaaatatgtgtagtagtttaatgttgctttctattgtagttctaaaatggtccttcttttccagcctataggaagcttgctaggagctaccatcctgatgtgaacaagtaagtactaaccattatatgggaattgtgtttcagctacactcgatatattgcttctttttctcctttcgatccattataaacctgagtactagttgttgcattacctttttcataactacataatcaaataagcaattgttatgcttgtgtatttttctttagagatcctggtgctgaacaaaagttcaaggatattagcaatgcttatgaggttagtccagctaaccataaccaaatcccattgtttcttatgactatgttgttgtagggttacaggtgcttgccagctaacataaataggattgcaggttttgtctgatgatgagaagcgatcaatctatgataaatatggagaagctggtttgaagggtgctggaatgggaacaggagtgagtgttcctagaatgttgtccaattctgaagtatgatcagcatgacctttatatgatattgattgtatgaaatttgtgaatctgcaggattactcaaacccattcgatctctttgaatcattattcgaaggctttggtggaatggggggaatgggaggccgtgctgctcggaacagaccaatgcagggtgatgatgaggcctacaatctggtactcaatttcaaggaagcggtgtttggtgtagagaaagaaattgagatcaccagactggaaggctgtaatacatgtgatggaactggtgccaagcctggaacgaaaccaaccacatgcaaaacatgtggaggacagggacaagtggtctcctcaacaagaacgccacttggaatattccagcaggtctccacctgcaatacttgcggaggcactggtgaattctctaccccgtgcaacacttgtgggggtgatggccgagtgcggaagacaaaaaggatcagtctaaaggttcctgctggtgttgattctggaagcagattgagggtccggtctgaggggaatgctgggcggagaggaggccctcctggagatctttatgtgtttattgatgttctctctgatcctgttcttaagcgagatgggacaaacattctatacacatgcaaagtttcatatattgacgcaattcttgggacaaccgtcaaggttcccactgttgatgggatggttgacctgaagatcccctccggtacccagccaggcacaacgttagtgatgtccaagaaaggtgtcccactcctcgggaagtcaaatgctcgtggagaccagctagtgcgtgtgcaggtcgagattccaaagcgtctgagcagcgacgagaggaagctgattgaagaacttgcaaacctaaacaaggctcaaacagcaaacagcaggagataattccatgaggcttcattggacaaaatgctttggcaatatgcaattttaacgcaaattgcagtgactaagtgagcatgaactggtaaatcacttcacaaactgtacgctcatgctgcgccgtaccatcggtgggaactgtgaattctcatgtctgtaacttcatttttaagccatagaaatctagttccatccaaaacaccaaaacggatggtgttttacagtagcttgtcatatgcttttaggcgagcttattagtctatttttcataatactttttcacaattttgaaaggcctagggagaaatatttaatggtgcaaaagggacgagttttgaaacatttgtttgtcgcagaagcaccagaccattctgattgttattgtaagctgtaacatcaaagttttggcagcaggttttcatgtgctcttaagcgttgggggtttgttccgtttggttttcaactgtatgctagctttctctattagccaatgtaatggcagttgcaaaatctgttgtagtgcaggcgtgcagctaaatgcagtatagctgactgttaactttaagctgattgttccatgcatgtgccagtaaaaggccagtcaggaatgagtctcatggatcaatatatggtgcagacatgtcagtaggatataggagtattacattatagttttttcagcttcaataacgttcatgttagcttgtacattgtatggcaacccttccatacttgcgttagccacaaaagttcaccatgttagcttggctttagatcagtttaaactgtcctttaatagcaaattaataatccataaatgaaattttacttccactgtttaccagtgctactactgttctacctccagcgttcaacagctgagaaacgtgaggagtccagcaccagcagtaccatttactgcaatgcgagagagatgttctccgtttcctccttcactgaggcttaggagtaggagtagtagtgattttttcgtgtcgacttgtttaacattatcgttaacaccatcaagtgtcaatgccagtagcctgctgcttctgatcatttcttccttccctcttctaacgccattatcgttttatctcaccttgcatttatgttcaagtgaccatggtt

SEQ ID NO: 17430 - DNA, 3134 bp, Oryza sativa
attatccacccgattatctaatggcaatacagtgcctaaaattcctgcttccggagtcttaaactttacccgaatccaatctggaaaccgaaaagacagctgcttggctgatggcaagtcactgggtacattgatttgtgttaattttcagtccaataaaacagcgcaaaaattgtaagggtgatccctctttagtaaagccatgcattctgcaaactctgttgcaatgcaagctgtatcctatatccagtgccgatgaaccaattctgtttgcagactgtaccctatctctactctacaagccaaccaaaggaaagtgtttgatctgcagtggaatactagcaggtattccaccatttcagggttgggagtgtgattgatatgcaggagattgacattgtgcagaacattggccgtcaggctgccgctgccgtcgccggtggtgtcggtgagaaagcccggtggtggtggttgtgccggcggcgaggagtggctgcaacaggatgggctgttgtgcatgggcggatcagcgggtggcttatggcggtggccacgctgttcgccggcgacggacccggcggcggcggccttcacgagggacggcgcatgatgatcctggataatttcgagacttcgggccggcgtgcgtgcaaagcccatacatattctacgcgcaactgtcacgcacaaaaacgaagtttttagtaccacatggaaaatctatgacgactgacaccggcataaaagacgacgcgctcgcatcgctcctggcgagctcggtggcgtgagcttgttaccccagctgcgggggggcgggagttggcatgtttcggctgctggagaaaatgaggtttctccctcgatcgaatatggatgcaaacatcctcccgactttggcccacgagggagggaaggtgtgagtcaccctgggctcttgacggctgcgtcatggagcgaagaggacgctgaatcgtggtagaggtgtgtggtggccggtgcccgacgacggcgcctggcgatgggtggggagaaggtgagcagttgtagttgggacccgtgccacacccccgcacgtgcgcaagtccatgacgtgagcgctcccggtcattaggagccacgtcagctggcggcctccgccgttgagcttttccctgccaaccgacacccttctccccacccattggcgaatgccctagaggtttgggttgagataggagtagaggggagtgaggtggaagaagattgctagttggcttgtgggttccacgtgggccctgcactgactcagccaccacgtcaacaaaaccggaaagcaatactaccttgggattaaaagtggaccgttttgcaagattaggggttcagggccgtttaaaactcaacgacaagataagggaccttagatgaacttttttgggagatgaggcgcctgtgcatatgacccataggcaggcgacaacgcggcagcagagcgctgcacgacctccgcctccccaatccgtcccgtctcctcgcccgccgccctcgactcccgtctcctcgcctgccgctggcgccgatctccatcctgctagcagaggtggcgccggcgtcctcctgctcccgccgcattcgcatcctaatccatcccatccggcctcggcctcgaatttcgtctcctcgcccgccgcttgcgccgatccccatcctgcgagcagaggtggcgcccggcgtcctccttcttccaccgcatcgtcgctcgccggtgagcatccctccctacccacacctcatcaggtattctgcgttatccctcaaaaagtttgggggttcaaccgaaacagggttagatctgcctctgcccagctccacctactttcaagttgttaattttgatttccgtttttagcagatgtaatttggttattgaatctcatccaaacacccttagaacgaaaaatgtaagctcacataatttgtactcatccaaactcacataaatttcttaagaagaatctagaccacaaactacccatagtcacacaaaatatctttttatcaaggtatattcttataagtaatttttattccacaaaattttctaaaggacatactgtgacacttggcatgaatctaatttaacattctttctttatcaggttataaattgaaaccattgaacgtactttgtcttcccgtccctaaaacattgtgatatatctgtaatattttaatatttttaattttaaaaataatttagactaataatatagatatttaaattaggtaattagtaaattcaaatcaactatagtttggaataaaaaaacaaaatgatatatgccaagtacaatctaataacaatagaatgcacttttggttaatgtttactcctaatttcttaatttctagtttggctccccccaccgttatggtaaaaaatcgttatgttttaactatttatctgctagagcatatgtaatatttatgtaaactatgttctttattaccaatcaaaatagacaccttacctactttcatcaaaagaaataaaaaatgttgatgatgtagtaggtattattctggaatactcctcgtcggaaacatatggaacgcatttccctcaaaacgcaaaaaccggggccccgagccctcgacaccaaccccgtcggatgtgaagccgacggcccagatggaggccagcggtgccaatgcgtaggccacgcgtgcctctgcgcaaatcttatctcccgggaggctccgctccacttcccttcccgagtcactcaaaccatccaatccctccaccttcccttcccttgcccccatttcccaccgccgccgcgccttgcccccattccccaccgccgcggtgcggccgccgacgacctccacacctagagcacgcgtgccgccgacgaggtgcccttttttctctcactctcgtctcccccattcctcccctcttcccgtgtcccgtcgtccacagctccccgaccaaatccctagccctactattccccacccaccaggccttcctcgcgtggtaaagccgacgatcgggcccgacagtgccgccgcttcttgccctactgccgcggtcttttagaggttgtcctgattgctgaagccaataggaatgtatattctttcgc

SEQ ID NO: 17431 - DNA, 1334 bp, Oryza sativa
aaccccaggaatatcgagcatctacaccgtttctacccataatgtcgcgcgttttttgctttcttggggctcgggccaacccccgcacactcctcagcctgtgcgggcttggccgagggctaccactgttaaatatgttgtatccaatccctccctcagcaataaatttttctgcttaatcaaaagctgttgcgcgccctttcttactccttcctatggctcgtcctggcttaaggacgattcgcgcttgctccggaccctaagtggcgttggataacctgaaaataaccgaaggggagcctgaacgcgggccgtgccccgggctgcagcgaaccctaggggctcggaagggcctacacatggccatccccgacccccgatcaccgtggcctcggtctggttagtcccgctgggcggctcccctggagcgacggccttgcccctcgccacctaagtgtcgcggaccaagtgcaaattccccctttttaccggaacgagccccgaggggcgggacaaagggagtaaaaatggcaacttgatcgtaaagaagtcaactaaatgcgttcgctttgtttttttccttgccgcaggcatttagaagagaaagcacggatgtaaaagtgcaaaggagaagctttattacaaccaggatggcacaatggcctagagtttcaagcgttcaccacgagcacataacataataaaggaggagaggcgggggcaatcacggagtgcctgggcctccaagtacagcgccgctgaccaccttgtcccaatccttgttgccatcatcgtcgccgccgtcatcactcccgctctcctcatctgagggaagcgcgagggtgaaccaaggggccgtcccctcaaagcttgagatgatcacgtcggacgcgtcccgaacttgctcctgagccctcgtctcaatccctgggggaaatcctcgagcacgtgccacggaaggatgttggggtcgcgagcttgatgactcgcgaggacaagctccaccgcagcccgtgccaaggaagccgatgacgacttcacgggctcgccgaccttctgctacagccttttaagatccgccgccattttgtccagccgaagcgcgagcgccggtcttgtgggcacgagcttcttgtcccggcgcacgaagatgcccacccggcgtcccacgcacttcagccgttcgatggcatcgtaaagttggccaggcccgatgtcgttggtgaggtggagggccgcgatctccccagcctggttctgtaccagacaccccaggttggcgagagtatcttggccgccggtgagctggctgaccaactcggcgtcgccggact

SEQ ID NO: 17432 - DNA, 5931 bp, Oryza sativa
agctcaagcgccctcgccaccatcgccgtgcgctcaacacgggcgctttccacatggcgggtctcatgcccagcaacggcctcctcacatttggtgagctgctcgcctagccggcgcgccgccacctcgcggcggttcacctcggcctcacgctcggcgagcgcggcatctcgttcccgccacgcctactctcggagccacagctcctctgtgcgacgggccactaaagcctcagtggcaatggtggtctggttgcgctcggtcgcggcctcctcgcggaggcgaagggaggattccgcctcggccgctgtcgcctcgtggacggccaaggtagtctcgtgctggtccaacgcgcgcgcccgctcctcaagcgctagggcccgctcctccagctcctgggcccgctgcgcctgtgcccgaccgcacccctcctgttcgcgttggttgcgatcgaagacctcgatccgccggcgaatcgtggcctcgaactcctgcgcgaagcgggtgcgctcgtccaaggccttgcgctcggcctcaagcgccaccgacggggccggcagcgaggcgtcgaccttcgatgcccgccgcacttgggccgcggccgcgtcgaggaccccgcgggcgtcctcaaccctcttcgcaaggacctcggcgtaggcctcatactgcaggcgaatgttgcccagcacctcgtctaaggcgcttgaggtgatgagcgccgcctgccgctcctcctccgtctcacgcatgaccgagtccagcgtctcctcgcgcgcctggatctcctccagctgggcttggtgcattttgcgccccgtctccctgcggggaccccaccctttcggcggcgggggcgggttcaattttttgacccacgggtgaggtggggtcggggccccacatttttgcggggaggggacgggggaggcatttcaccgcgggtgacccgcggggccccgtgggatgtaaattaaaccttaaaatgtagtccatggaagacccaaaagagcccaatccaacaatagtctaaaatataaaaataaaaccctagccttatcctctttcctctcccaatctcctctccccgtcaccctcacaccacacaggcggcggctacgtcgaccgccaggcatgggcggtggcgacggccagggcgcgggcggcgacgtcgatggcctggcgcaagcggcggcggtgaccagggcgtggccggcggcgtcgacggccaggcgcaggcggcggcggctcgcctcatcgtcttccaactcgctgtcctcgtcgccattgtctatcttccagtccaccggcccaaccgggtagtgcggggccctgctcacccccaaggtccctgtggggatcggggctggtgacgttttccacccaaccacctctgcggggtcaaggtcggggggagaagtcgggagcgggggcgggggcattccagctcaacccgccccgttgtcaaccctaatccgggccatgacatatgaaattcaaagactcagagagcaaaaaaagtttactggctaaaactcaaaagtactacagctccaacttgagacgtttctgaacatatttatacattccagcatatcaaaacactactggagaaaacatctttgcccggtcgagcaaaaaccacaatagtcccggttgcaataaaaaccgggactaactattatctttagtcccagttcaaaaggttcgagctacttttttatctttagtcccagttggaaacaccaatcgggactaaagatcatttttagtcccggctaaaagaataacaggcggtgccatacccctctaactaaagatatgtttctagtcctggttggtgtaaccaactgggaaaaaagatcggcatgtgcggcggagaggccaaggcgtgcgcgagatcgaggaggagaatacgggatcagttaataagttctatctcctccaccctcaccttatctcttcaccccatctcttcctcttcttcctcctctcctcattctcttcctcccttttctcaggtagcgacgggcagcggcggccgggcggaggcggaggcagcctcacgccgcggcggccgggtggcaacggatccgggaggggaggcggccggcgaggaggccggtgcggcggcaggcggtggaggccggcgctgctgctgtattttttttcttttttttatttttttcttaaagcgtgattcaatctgtgttgaatgtgtgattcgatctgtgttgtggttgtgaactatttggggatgaactattgtgtgaatgatttgggatgaactatattgctatgagtgatgaatgtttgatctgagatgatttgggcaaatagcaaaagaacagtaaaaaagaaaaagagaaaagaaaaaaaatgaaaaaaaaaccctatagtcgggaccacatctttagaacaccaaccgggactaaagtcccggattcgccgtcccggttgcataaccgggacaaatagatggttgccaaccggcggcaaaatcggttgtgcagcagtgaaaggcttcaacccaagcgatacaactccagcttcacaggacaactccatcttgacccaacagaactcagtcttgctgatgacagtgcagtgctgtagacgtcagttcttccgcacattgttccagtttgatttgatcctcctggctttgtaaacctgaccaatataagagggaaacaaacagatgaaacacaccatatcaggagacttgatcttctttatccttcaaaacatattacgggccggcttcctagagggcccaacacatggcggccaatcccgcaatgtgattttttttttccatttggtatataaactatgccctgatcaaaaattgctcgaaagagttgggacgacatttgagctccaaacacataagccattagccatgaggctccaaatatatttggccaactcacagtgaaaaaaaaaaacaggtcgttgacagtctccttttccttgcaaaaggcacaagtttcattaccattccagtttcgtcttacgagattatcttttattaatattgcattgtgtacggctaactaaatttttttttatctttaatggtagtttagctttcaatgcaatttatatgatgtggccatatacagctgtgttgtcacatcctgattttttttcaggatttataaattatttaataaattattattagaatttatattaaatgttctttaatttacaagtgaagttaaatgtgggaaataaaatttcctaaatataaagcatggatggatttaatttttattaaattctccatgattaattacactctctaaaattttctcggatttttcagagctcaattcctaaatgatacaaagaacagttcagtaattatttgatcattaatgatctaattataattgttaggagcttttcttgtttaaaaatccttaaattataaattgttgtttaaaaggaattattagaaatgatcttaaaagcctaaaagagaagatctaattttaattaataaattccaatataaaatagggccagataaaatttcattaaatactttacttgattctaaagttcctagatttttctgggatttatttgagccaaggaagtatttttaatcaatggaatatcatttcatgaataatttaaattgaaaaaggtttttaaaagtctcttttggctttgggccgaaagccggcctaaaacctctctctttctctctccctccccggcccagtcggcccaaaaccgctctctctctcctccccggcccaagccggcccgcatccgagccgctgctctcctctctctctcccgctgacaggtgggccccacctgtcaggcctgtcttcctcctcgcgccggccgccgctcgaaccctagcgccgcgccgccgtcgtctccttccaaatccgaccgtctttttcccaatccggtgaaatcaatagaggggaaatgatcttctcaatctcctctaccttttctcttttggaatcgtcggctaatttcgtttggaaatccgtggattcgagtttgattcggatcgacttctctcctccgaaccctagctttccttctcgccgccggtcgccgtgggcctccgtcgccgctcgctagcccctttataagcacccccgagctctcctctatccgccgccacctttgccttagcccgccgtcgcgtctagcgccgcctccgcgcagccctagccgtcgccgtcgttgccgtcggttcagccgcgccgcgtcgccgttgcagccgccgtcgtcggtcgtcgtcgccaccatcgggatcgtgaggtcgtcgtcgtccccgtccaccgcttcgccgccgccgaagaccgccggagcaccgccatcaccgtcgacccgaagaccgtcgccgcttcttcctcgtcgccggcgccgtctgttgctcttccgccgttgttttggtcaccggtgagttcgccgcgtcgccctctacccgttggtgtcctccgtttgcgtcgtcgcgccgtcgttcgccggtgagcatgcgccgcccgagccgtcgccggtgatgacgtcatcgctgacgtcatcgttgccgttcgccatagaccggtcgtagaccgtttagatctcggccgttcgttgtggatagggtagatctcggccgttcgtttccatgagccgccgccgtgcacccggtccaccgtgaacccgagcccgctgacgcaataatcctcttttccttttcaaaaataattcattattgcgtcataattcaattaaaatctatataagtgttttaatccgatttaatctttgaaaattcataactaattctttgtaactcagtttaatgtggttcaagttgcaaaagttgtgtaaaataaagatctacgtattaaaattatccataaatagaattaaatttatttaattctttttaaatgggctttaattagatttaatcttgtaaaattcataataaattcatatgaagtcagaatgaggccgttcaagtctcataattcatctaaaattatgatctacatgtttgagtactttatatgtactgtttatttggtttttattagtctttttcttcgttttgcgtgttagcttgtcgtttccgtcgttgcgaaggttcgcgagtgcgccggaagtattcaagaagactaattgaagaccgattattgcaaggcaagtcacacagatcctaaacacaatcctttgagcatgttgatcctatatttaaattctctatttatttcaactatgcatttattttcgaatgtcactgggtggtgtgaatctattcctttgttatggcctgtttgcattgattactttattccttgataccttgggatattataagtgtgtaacgttattattatgatggatttgtatattaaattgtcagtttgtgtacctcggctgattcctggacgaggattttatgcacaaataagttcggaaattaccagtgaatttccgggcgtgacaaaaatatgaaacctagcaaagttatcatcgctgaagtttggctagacccaagagctagcactaaccacatctccacatcctgtgccattttcaatttgtatccatgatccactaggaacccaatgatgcttcacctttggctcgtaaacatttgttgtgacccctattccatatatatatcatcccaatatattatccctgctttctacaaggaaaaaaaacatttatgaatcaaaataacgtaaatacatatacgaaattttgcagcatgttaattacatgaaggactgaatgtgcaacacttagaccctgtttggcaaaatggttatgggaggtggagttgggaaatgaaaaggagaggatgcctaggattaaatgagatgaaaagaatggatggctagaattgaatcttacctgatgggtggggcatatttttccaaacccattagctagtca

SEQ ID NO: 17433 - DNA, 1789 bp, Oryza sativa
cgcgagtgcgccggaagtattcaagaagactaattgaagaccgattattgcaaggcaagtcacacagatcctaaacacaatcctttgagcatgttgatcctatatttaaattctctatttatttcaactatgcatttattttcgaatgtcactgggtggtgtgaatctattcctttgttatggcctgtttgcattgattactttattccttgataccttgggttattataacttgactatttgagctttatatattggttcagctagatattagatatgattgcttagccatgcttagaaacattagcacactattgggataacttatgactcattattatttaatgatggcttaatgatagttcacgatggtcaatcgtgattggttaattaattacttgccaactaaaacttgataatggtgggttgtgagcacatggttttgagagtcgtgctcatgacaattaaggaccggttcgcgagctactgttgtgaaacattaaccgtgccaaccacaagccagcgtgggcaacggctttaccttttgtataacatgattcattgcggagcaccagactgagaagtggcggagataagcccacgggggtcgctggggagtccatgccttgttttataaggggatgattatgatccaggaatggtgcactgtggtgagttgtgttgtacaaagggtattgtcacaacctctattcgggtactttccagtatcgcgacgcatggtagacatgatgttgaggctgtgtcttgtgggtacagtggtacacctctggccagagtaaaactattcgaatagccgtgcccgcggttatgggcgagttgagcaatgtttttcgtgattagtctcacacctctcacaataattatggatgctataactggtaataatttgtttagctcctggtttggagttagatctgtacggccgggtatggttgttcagaatggttgggcctgtgcagcatgggtgtgttgttcagtgttgattaaaatttctgattaattactccactgttttacttctcttaaatgttttgctaaatgctgcttttgcaaatgagcctatattatgccatcctttggtatctttgtgcacttgcatatttgctgtgtggcttgttgagtatgtcatatgctcattcttgcaataatcaatcaacctcagttgaagaaaaaggatccagaaggataagacgtttggcttataccccagttgagctgcctgtgggagtggagctgaagccatcgctagaccgttattccgctgctgttttcttttcttttgtaagtgtgtaacgttattattatgatggatttatatattaaattgtcagtttgtgtacctcggctgattcctggacgaggattttatgcacaaataagttcggaaattactagtgaatttccgggcgtgacatgtgtgaagatggttgtacgttgactttacagaaaactaaactggccactggggctcctgtcacgcccagaaatttgacttccgtcaaccagaagtcacacttgctgaacttggcgtatagctggtgctccttcaacttttcaagtaccagacggagatgttgctcatgttcttcctcggattttgagtagataagtatgtcgtcgatgaacaccacaacaaacttgtccagaaattccatgaacactttgttcatcagattcatgaagaatgcgggtgcgttggtaagtccgaaggacataaccgtgcactcatatagcccgtaccgagtggtgaaggccgtcttcggaatat

SEQ ID NO: 17434 - DNA, 2473 bp, Oryza sativa
cccaaagttaaaggcttggtcgtatgtaccctttctgcagctgctcatcaacatgcttcttgacctctgataattcgttggccgccattctgtacggtctcttatagattggagcagttcccggtgccaagtcaatccggaattcaatctctctcttgggtggcatggtagtgaggtcttcggggaacacttctggatactcgcagactatgggtatatcttccaattttctcaagttcttctctacggtgtccactgggatttccgtctcaatctaattcaacgagacccctttctttggcgagactagagatttgtacaccacggtttctcccttctcgttggtcaaggtgactgtgcgactcgcacaatcgatgactcccttaaacttggtcagccaatccatcccaagaatgacatttaggtctttggattcgagaagaatgaggttggctagaaatggtgacctttgaatttctattgttatagaagggctgaattgaaccgaagtggagctattccctggggtatgaacccgcatcggtgtgctaagttcctctcttattaacccatgcatcccgacaaatttctttgagatgaaagaatgcgttgcactagaatcaaaaagtactgttgcagggattgagttaacagggaacgtacccagtacgacctccggtgctgcttgtgcctcctctgcagatgcgtggttgacacgagcctggataaaccttggcccggcacgcctgggcttcgggcatttgtcagcgaagtggccaagctcgtcacagttgaagcaggaccctggttttgctcccgtctccttcttggcttgcgcgggctggcctgactgtgccggtgccactgatgggcgtggagctgcaccgcggttgggctgacctccatggtggttctgactgccactggtgccctggtggaagttgctagggttgaacgggcggtgctggcggacgatcatggtggtaggtccaccctgctgtccgggagtgaagcgcggcctctggtgacttccctgatgtgccctgaactgagcggccttcctcttcctgtccatcttgttgcgttggtcctcctgacggattgccttgtcaaccagcctctcaaagtcggcgtagtccccagatatcagttggttggtcagctcgtcatccagacccgccatgaacttctcctgcttctcggcgtcggtgcggacatcctctggtgcatatcgcgcgaggcgattgaactcatggaggtactctgtcacagtccaagctgacgcgggaccctgaagctggtgtgtggcaaaagcgaccttctcctgatcattacactgcaggagattcagcttcttctctattgcatggagccagtcgttcgcctccatagggttggtggtgctggagaaggtgggtggcctcacgcgtagaaactctggcaacttggactgagggggagggggaccaaactgttgatgctgctgttcggcgtgctgcatcatcctctggtgcatctgctggtgctgctgctgcatctgctgcatcatggctgccatcatctgagtctgatgtgccataacttgggcaagcgtcggattctcgggaagtggtggcggaccattgccagaatcactgttggggtgcacaccatcagcgcgttcttcgccgttgctgccctcgcctgttgcgcggctaccagtcctggtgtagaccatctggagggaaaagcagacggggaaaaagaagaaaaacagatgctcaagaactaagctttattacaaaggaattaaaactgcaattgttctgatctgaattaaaacacttaaaaagcaagcaaaaatccttattaagacagccatatcataggcacatgatatcgaccgtcaactgaccccaaacaagcaacctaaacacgcaaactaacaaccagaagctagaccatcgataaactaattggaaaacgagactaatgctcggaccggctcctgcggtcggtggagtcgaaggcgtcctcctgctcgtcacccggtccctctgagcgactcctggagcctgacagatcagtctcgccgctgccactgggagtagcagacaaccaacctccggtgccactggctggacccctggcggctgatgctggagcgaaggagagagtgaacgcgggagctggaactggagctgcaggaactgcgggcggaactggaggtgctgcgggagctgttctataggctcgtaccgttgcatcctttaccaataaggaggcaagcactcaagtctcagtaaatcaagaaaaatgtgtagaatccattaaaaatggttttgttctctgtttcagtagtcttatagcctgtttgcaatgtttgctttgtatgccgctagattccgatccctccgacgctccggtgtacttcgagatagtcgccgaggttcccccagcagcagagcaaggcaagtcatgcttgtcacttgaa

SEQ ID NO: 17435 - DNA, 1534 bp, Oryza sativa
ttcagataatccactgggttgatttatcactggttttaccttgtgctttctcagtgtctctgctttttattgtaaaaaaaattcctttaaaggtttaggtgatctactttgttctacatacctttcctaccaaactttaataatctgctgataaggacaacagtaatggaatccattactgcagtgggccttaataataaaattatacctgatttctagtcaattaaagtatatatctaaagtactgattgctatatttttatttttatcaagatatttacatcatcattttttggccatgcggtgtctacatactataaggttttaagccaacaaatgagatatattctgattttctctttggcagagtttgtttggaaaattttgccaaatgtttatatggatgcatttcctttgtctttaggtgcacatgtgcacatgtgctgtttgcttgcttttgtccaaaatatgatttggacttactggagtttgaattatcaattatgttaattggccacatacctatccatgtgcatgagtgcatcgctgttcctagcttttctttttcctgagtggatgctgcttctagctaggtgaattgttcacattcacacatcggaccagggcatgtgttggcccaacttgagattaggctttgccacacccctaagcccaaccttcattggacctgtaccttgcttcaaaggcttgaaaagtagcctcatcctgctagaccaagcttatagggaacagatagacacatctacacacacaaactgaccctggtaatccattaattgactccacatctaccttcatggctacaacatctgtctttcctttcatctgcatgtgcattttgtttctcaattagtttacgaagacagacatttttttccacccatcacttgtgtatctgcaatatttgctttcacttttgaaacattgtaatcacgctactttgtttctgccaaatagttaatcatgctttattgtctgtattgcagtattgcaagttgccgtgaaaggccattctagggaatgcagaaagatgtgcttgcacgccagagatatctcctatgaagagaagggcatttctcccattgatttgacatcactaattcttgatgagcgaggatttcagttgctcacctggtgcattctgcaatcacaaagtaataatgatgctatcaatgtcagaaatactgctatgctagatcatgcaatttctgatgatggttgaagtttttgcttttacggttttcctctaaaattccaataaagaattgtccgctagcattgttttgaatgatggaacttgagaagaatggaaacattctactgcgaaggtatgagattggaaaattattggggcaaggaacttttgccaaggtttatcatggtaggaacatcgtgacttcacaaagtgtggctatcaaggtgatcgacaaggacaaaatttttaaggttggcctaatggatcagattaaacgagagatatctgtgatgaaattagtgaggcaccccaacattg

SEQ ID NO: 17436 - DNA, 2715 bp, Oryza sativa
  unsure (1)..(2715): unsure at all n locations
gtgcgcnccgtgacatacaatcgactgtatacangccgaattctagctcggtaccctgatccaaacccaagaagtagaatgccaattacaaaaataatggaaacttactggttcaagaaaggacttgatagcaagctaatccttaagaacgtggagacaaatgaaccagttacagctcttgctgatgttaatgttgttttctcctccatgggtagcagtagtagcaaaaagactgaggagaaacaggatgcaggaaagctaaccaaccttaacgctttcgatattatttctctttcggaaggctttgatctttctggcttgtttgaggagactgataaaaagaaagaagcaaggtttacatcaagtcaatcagcttcagctattatctcaaaactagaggatgttgcctcatgttcgaagttgacagtgaaaaagaaagaaggtggtgtgctgaaaatggaaggtgcaagtgaaggaaggaaaggtgtattggcaatcgatgcagagatcttcgaggtgactccttcatttcatttggtagaaatcaagaagaacaatggagatacactagaataccaacatttgtggaaggaggacatgaaaccagctcttaaggacattgtttgggcttggcaaggtgaacgccaggatcagcaacctgaagatcatggccagccatagaattgtttcaatgtcgaaatgtttcgttgccttaggaaaggcactgcttatccttttgcttattattcgttctatcttctgtcttcccaaaatccatagctcaatgaaattcgcacaacaatgtaattggattctaaggaatctgaacttataatgcagtgtaatactagttattttttgttgttggcagttcagtgttcgtaattgaaatacatcaaaggataagctacctcacatcgtcgtctggatgaacatagcacctacttaatatttgagtactttcacatgtttttgtaatgtgattgctgattacaggatattaggcatacagtgtcaacagtggtacttacagagagttgcaggtgaatctttgaaagttgcaattgtgtttagaaaagccgaggatttcagaaatttaattgtgtttagaaaagcccaagatttcagaaatttgaagcactcagttaattctcatcattttgcctgttggacaaatgattagtcatttaggtgctcaactctacctccttttcttttcaggactgcactacttatcttttttttttttgaaggattgcatccttttcatccttgacagatcactagcactagttataaaaaatactaatgaaaaacatttctatcctgacactagtagttgtactccaaaagcaatggaaaaattggttgcttgtcggtagtagctgctatataaaaaaaaatcagtgtgactttgctgggtgcaatttccaattgctgtcacttgtctgtaaaagtcatcaatcaacaaaggcaaaggaacaacagctaataatgaactaaattaagtaacttcaaatgagggagcactgctatagtgctatgctacgagtccttttctttttattctccctttttgttggaggaaccagtagccaagccagtaggtaaagaaaagctgcttttatcatactcatccttgtggaacaaatagcaaagacatccttttattttggcttacaaaaaccttatctttgttatgtagtttgctttagactggaaccctgattcattcagagtatcaccctggcccctgaccctgatggagtgatgtgatgtaatgggatcatccagagagaagtgagtggaccaaagttatatatatgctcatggaatctataatgttatgctctagaggcagatatttgtgcacatcacactagtagcagagggaatgcttatcttcatgaaatgtggcaaggggacaaacaagagagccctacctgtccattcaatgtcaaattaacaggaatcctgtctcaggactaaaattgttggggtctttaaagccttgtctggggcatggaattatttcttttttttatgattcatataggaattgattttttttttgtgaaatcctcttgttctgaatggttctcatgagctaaaggccgtgagccttggagcaagctcacaactcacttcatgtttaattagagtacctttacggtagtctctattggtagtatatggctcaaatactctagatatccatgccttttgagaagctcaaacttgaattatagtatgtcagtgttgttcgaaactcggaactgaaatatgtgaagtgtatgaattaaatctcccaaggtgctacaaattaaattctaacgtcgacaatatatgccgttcactgtagagtttcatttaataagtgaaacttctgcttgagattgttcttgagcctctggtccaaaacccaccaatggtcaagaaaatggaggtcactttctccatcgtttgcaaaagctactttgattggcattgcattgatcatcaacataacatggttctgcaagggccacatcatcatcgtcatcgtcatcgtcatcgtcatcgtcatcgtcgtcgtcgtcgcagtagtatttgacggacaaaacagtgggaatcaaggcatcaccaactcaagcgtgctgagagctacctgcatattggtgcttggagtctcagtgagtgcttcacatcagttgcaacttgcaagtttgccaatac

SEQ ID NO: 17437 - DNA, 676 bp, Oryza sativa
  unsure (1)..(676): unsure at all n locations
atcaatatcatataaaggtcatgctgatcatacttcagaattggacaacattctaggaacactcactcctgttcccattccagcacccttcaaaccagcttctccatatttatcatagattgatcgcttctcatcatcagacaaaacctgcaatcctatttatgttagctggcaagcacctgtaaccctacaacaacatagtcataagaaacaatgggatttggttatggttagctggactaacctcataagcattgctaatatccttgaacttttgttcagcaccaggatctctaaagaaaaatacacaagcataacaattgcttatttgattatgtagttatgaaaaaggtaatgcaacaactagtactcaggtttataatggatcgaaaggagaaaaagaagcaatatatcgagtgtagctgaaacacaattcccatataatggttagtacttacttgttcacatcaggatggtagctcctagcaagcttcctataggctggaaaagaaggaccattttagaactacaattgaaagccacattaaactactacacatattttgatcaaaattgactctgaaggattctaacataatatccccttaggcattattggataggacacattctagattatctaccggtcgtgggntgggnatttttgttcaaatta

SEQ ID NO: 17438 - DNA, 3074 bp, Oryza sativa
taaagcccatttaaaaagaattaaataaatttaattctatttatggataattttaatatgtagatctttattttatataacttttgcaacttgaaccacattaaactgagttacaatgaattagttatgaattttcaaagattaaatcggattaaatcctttatatagattttaattgaattatgacgtaataatgaattatttttgaaaaggaatagaggattattgcgtcagcgggtcgggttcatggtggaccgggtgcacggcggcggctcacggaaacgaacggccgagatctatcagtccacggccggaccacgggagacgacgacgatgacgtcagcggtgacgtcatcaccagcgacgacttgggcacgcatgcccgccggcgaacgacggcgcggcggcgcgaaaggagagcaccaaaacgatgcgggtgacgcagcgaactcaccggtgaccaaaacaacggcggaagatcaacggacggcaacggttacgagcaagaagcggcgacgaccttcggcttgacgacggcgatggtgttccagcggtcgacagcgacggcggaggggcggacgagatcggcgacggcttggtgatcccgacggcggctttcccgagcgacgacgacgaccggagcgacggcggcgcacggctggacaaacgacggcgcaaaagctcacggggctagggcgctacagacggcggcgggcgaaggcgagagtggctgcgggtagaggggagctcgggggtccttttataggggcaaggaggcggcggcgaaggcccacggcgaccggcgacgcgaaggaaaggttagggttcggagagagagacgaatccgattcgagatcgaatccacgagtttccaaaccgaattaggcgatgattccaaaagagaaaaggtagaggacatcgagaagatcatttcccctctattgatttcaccggatcgggaaaggggcgagcgaatttggaaaggcggcggcggtgcggctcggctagggttcggccgggcgacggctggaggaggaagacagccctgataggtgggccccacctgtcagcgggcgaacgcgcgcgcgggcggctgctgccggactgggccgagggagagagagagaggttttgggccggctttcggcccaaagccaaaagagacttttaaaaaccttttttaatttaaattattcatgaaatgcaattccatttattaaaaatactttcttggctcaaataaatcccagaaaaatctaggaactaaagattcaagagaagtatttaacaaaattttatctagcccaattttatattgagatttagcaaattaaaattagatattctcttttaggcttttaagatcatttctaataattccttttaaacaacaatttataatttaaggatttttaaacaagaaaagctcttaacaattataattagatcattaatgatcaaataattactgaactgttctttgtatcatttaggaattgagctccgaaaaatccgagaaaatttcagagagtatacttaatcatggagaatttaataaaagttaaatccatccatgctttaaatttaggaaattttatttcccacatttaacttcacttgtaaattaatgaacatttaatataaattctaataataatttattaaataatttagaaatcctgaaacaaaaatcaggatgtgacaattttctgggtaatcaatatacattttgctacgaatacattggattatacagtacatatttttcctactaatttataccgctttgagatggtatagagctatattttccatttttaggtattgactttggaataaatttcgctacagaatgatgaagcgcaaaacaaatcttgcactgaccacagccgtcctggtttcgttcaagttagcagcagtgttgttcttggatgaagattaaaccatgcttccgtctataatggaacacaatatagaattcaagttcttatatttaaggtactctctattttacatgaaattcaatatggttaaaattacgtggttcactattatattaattaagttactcaagatatataagaaaacaccaattttgcataatatgttatatctacatactatattcagaagtacatctgatgcatcaagagcaatgcttagattatcttgcatgttagcacaacattactgttggcggatggcatgaggcctttcgaccaaatctgccgaaacccgtggcaaaggctatggagcaagaatggcgagaggcgaggggtcgtgcgagtaagccagaggcgtcccaggcgaagggtgcaaggcgaaaagtatctgccgaaggaagacgacttcgccatggcaagttcgctcccgcgagggccgaaaaagtctttccgacccatcaggcctaggggctatagggccggcgatcgcccgacggcccatcaggggcccatgagcctccataacattatgtacccctgtaaatgtccctttcgtaagggcaaccatgtaaatttccctgtataacctaaaccctagtagtaagaacctgtaatggggctataaatagtcccctagggccatgtaatggggggatccggagtaaaaaattctaaaattaatacacttcgtttctttccaaccactgttgagtaaccacgtctttcgacgtatgcagttgtcgtttcgacaacaattacaataaaagaagcttactacaaatcttagatcataatagacatttccctagggtcttccaacaataccatttcactttgaatagagaaaagacgttatattatactaactttgttcccaaatacttgttagtattgaccatcactattctaactttaattgttaataacattaaggggcaattgtgtttctgcccttgctttacatgtcaattgtgattttacccctactttttaaggtttgtgattttgcccctgcttttttgaaacgaagcagccgtctgcccctggtttggacggtagtttggtgggcccaggatttccaaattaaacgaagaaagaaaatgctattataatttgtgaatgactattcta

SEQ ID NO: 17439 - DNA, 3998 bp, Oryza sativa
aggcatgtgccccgtgcacactttgaacacaaattaaattattttaggacccgaagactaaaaaactgacggttggtatatggtgagaagaatacggcaataggatattggccaagttctcaattcagttacatgaaggtaatgggcagttatacaaagtggggtggatatgttcagggtccaaccgtctaagaaaattctccacaaatgggtaatagacattttgcttcagaagcttatggcacagtggcttttattagggacatcctgatcgtgaatgagaacaagaagcttgttaatccaaaccccgttaaagcctatgcaggatcctgtaatccaagtaaatatacctggactacctatacatttgtcgacaaatttttcctcaaaaattgacagatgtaattatagttcaatcgtagtgtaattacactgtaacttatatgtaattacactgtaacttgcatgtaactacactgtaatttatatgtaagtttcacataattttgaatcgttagatctattataagatttattttgatgagaaaaaaaaacaaatcatagcacacacatatgtgaaagaatttgttcccatgacctctattttaccaaaataacatgttatggagagatttttaaaagttacatacaagttagttacagtgtaattacatgcaagttacaatataattacactacgattgtactgtaattacatctgtcaaaggaaaaatttgtcgacaaatatatagcaaaatcgaccttcgatagttatggaattaatgcttactgtatgcatgtatactacggtggaccaggtaactacagctaatggtgtactctgcaagctataataacatatgtaattgtatgcaaaataacgggattcaagggctcaagccaccaccatggatacaccttctagctataatttcttcaattatttgcaaccactttcccactagatttttttttttgtaagtagtaaagatctccttttgtaatgaacaagtgggctatgcaaattaacagaccaagataacacacatagacaacaggtagagaatctgattcaaggaaaatttgcacaatggctaactagagaacaaaaaatagggtacagacctgaacagcccacagtaagaaccaaaagatcaatcaatggtccacgtgtaaaagaattacaacagataaagctgtgacagtgtgaaactttgttcctctcgccgtcctaattaccttccctgtgtgacttacaacctagtcttagctctgaatcaagttccttccctggagcgtctcatgctctcatcaatcaacttgaatgtcttctttacaagtttctggtctagggccgtagttctgtagattttgaagacgcggtccacacggtcaggcttgctgctctggaagtagagctcttcaaacttcttcttgacaaacctgtaaaacgtcactccagaccataagccacagtaatgatgaacgtttgatactatataacattagaatggaaaaacttatcaaggcatataagtgcaccatgcagcaacattacaaatggccaaatgcccatgttcatctgagagggcgagtagtgcactcactcatatgcatgttcaacctcctgtttcccaggtgcaataggctggtagtctttaaaccactcgcacacacttaaaggaacctacgtaaccagcgtaaacataaatgttggtaacatttagtactaaactatgcattggtacaaagagcaggccttaccttttgtattttcttctcgaatatatcaaatttgttgagaaacagaatgaatgatgttttctgatggtcaatatagcaccgtaattagtttcaaaatgagaaaaaaagcatgagcacaaaagttgcagagatggatgcatgcagacctcaaaacatctttgctttaaaacccagtcaaagagttccttgggctccatcattctgttttttgtctcatcttcaaatagcatctgatcatatctgaaatgaacaagaagcctatgagaagaacttagcagattatgataagttcaacaatcaaaaaaattgtacttactcgctaatggcagcacaaaagattaccgcattaacaccttcaaaaagatgaatccactttctcctctcattcctctggcctcctacatcatacaacctatatacctctccacctcttttgttttctccaacaggactgcagaaagaaacccagttaactagatgattcaactcatcttaaaacagctacattcagaacctctcaggtcatatcttagaagtgaaaggggagaaaaaaaggacttcaacttgtcgttctgtacatagtagagcaaccagcaaaaaaatgtgcaaaaaatagtgtcagcagattacctaaattgtatttgtacaacaccatttgtccgtactcttgcataaagcacatcctcctgcaaaatgactcataatattgacaactataatactgcaagcattcttaagtatggaagatcaactaccagcctttcaaacgaaccattagacaaggtacaatcacaaattatccatcagactgctaaatgcagaaatatggagtcatatcttcacttagcacacacaatgttaattggaattttgatgcagtgtggacttaaacaagtgacaaacaattttctatgcttaagaaatgacgggaaatggttgcaaaagtggatggtacagtgatcatatttgtggtttgcaacttattgaaggaactggacaaaaaaaatatatgctagtgtcataagattaatatgtgggaactcaaaagctcaaggtgcttagataagtagagttttattcacagcagttttgcaccctatgtttcacagggacattttttaccttcgttatgtagactgcgtaataacggtagaataatagtttctcctccctaatattgaattttaaaggatagcctccaatattatttaaaagataaggataaacatatgcccatcttttaaaactatttggcaacctctgactcagtacacatagttaaccatttgacaacctctgactaagtagactaaaaatcaacatgaaatggtgtcagcacaaatatctgagaatatgtaaataattgtctatgaacatggacagcacacctttgttggcacataacctgcttcagctaatcgatccaaattttccatgaagtattgtgcacaatcaggaagttgcagaatacttccacgtaagtaagtttcctacagtatagagcattgcttcagcacacctggccaggaaaactatataacttcaaaagatttgaatggctatttgttttcacctgaatggctgggtcttgccataacctttttacatcgagtacaagttctttgttcagcagtggataatccaacctgccatcaatatctgatagtttttctccaatttcctgatgatatgacaaagtaaatgacatctaagaaacaaaattggttggtaaggtgtacagtgtgaaactggtgatatttgtctttcaatgcctaagaaaagtcagttttcctttaaagttccaaagcaacggaacaaggtaaatgcacaaaggtatactttttttaacctggttgagaaaaaaattgaatcttataacacccacatttgataccaagttatttttagcatatcaacaattgtctgaagcaatcaaataaacaaggaagaataaatgttacaaaatctcattgttcttttctactttgttcagtacattgtacggttcaatagatatctttttcaagttttcattatagaatgaccgtgtaaaatataagactacaatagagccgagcacagtctacaaggtcttaacaggttaaaacatagagccgagcagcttgactacaacagaaatgttgcaaatcaaaatgtttgtattcccagatttaacaagacatgttcatatgcacagatttagctttaactgttgagtaaagagtaagcacaaa

SEQ ID NO: 17440 - DNA, 2581 bp, Oryza sativa
  unsure (1)..(2581): unsure at all n locations
taacctttttacatcgagtacaagttctttgttcagcagtggataatccaacctgccatcaatatctgatagtttttctccaatttcctgatgatatgacaaagtaaatgacatctaagaaacaaaattggttggtaaggtgtacagtgtgaaactggtgatatttgtctttcaatgcctaagaaaagtcagttttcctttaaagttccaaagcaacggaacaaggtaaatgcacaaaggtatactttttttaacctggttgagaaaaaaattgaatcttataacacccacatttgataccaagttatttttagcatatcaacaattgtctgaagcaatcaaataaacaaggaagaataaatgttacaaaatctcattgttcttttctactttgttcagtacattgtacggttcaatagatatctttttcaagttttcattatagaatgaccgtgtaaaatataagactacaatagagccgagcacagtctacaaggtcttaacaggttaaaacatagagccgagcagcttgactacaacagaaatgttgcaaatcaaaatgtttgtattcccagatttaacaagacatgttcatatgcacagatttagctttaactgttgagtaaagagtaagcacaaacctggttatctggggatataacatactttgaggaatctgattccacttgtgagagttcttttgctccttcatatagtatctgttaacatttaacacattactcgacaaaaaggaaaagtatgaacgcatttccttatgaacagaatacaaatccctagtcgaatctcctacataatccccactttgcaataagaaaaaaaagacacaccctttccagtattgcatactttaattgtctgatagacgtttgcatggataactgatgtgtagctcctaagttctgcctcatcaaagccagtttggaaaaggagcttaatctgcaggtgaacagtaagaatacatcagactaactagcggcgtacggattatgattctccatggaatataacattcatcacctgtttaaatatcgtagacttccctgattctcccgcaccttaaaacagaagcaattgagagagagaaagaaggatggatccacattgagaacaagttcaaactaaaaatttctaggatacatttatttatcttctttttttttggaaataacatgagaaaggtttttttatagaggtaaataggaacaacataaacaattaattttctgaaccaatagatactaaaggtagcacagataattgtgacaaggaaaatgaccacttaaatttgggaaagttagcaataccaagaagtaagagcttgtggatgtgttgctctgcttttgtctcttgcaaaattcgcctgtcaatgtctgcagactgttaccagctgaattagaagaaaccaaatgtggcaactctcaaatcaagaattgagttagcatttacttgttcaataagtccgagtgctaacttacttttgcatttttggttgtttcagcctcacttaaagaatgagatctgctacaggatgagcccatgttatcaagcacacaggtaagcacggacattattttagaggtatgctctcatgcctgagcctctctctttccaggaagcacgttgacgtctagatctcaggatccatgagctgcatacatgagcagtaagctcgagcgaaatgtggccagcatttgaaaagaaaagattgtacagagtaatggtttgcatagttcaatattgctgacccacattgttatacatatccagaaatattatatgaaggaaaaacattagtaaccattttccgaccaggattcatttccgaccaggatccatttcaatcactgacacttaataaataatacgtgaaaatatttagaaatacatcaatatcattgtttaataataatacatcaacatcattgtttattaataatatttttccttgcgacggtggggaatgggggcaaggaaagggaaggtggggggattggatggtttgagtgactcggggagggaagtggagcgaagcctcccgggagataagatttgcgcagaggcacgcgtggcctacgcattggcaccgctggcctccatttgggccgtcggcttcacatctgacggggttggtgtcgagggctcggggccccggtttttgcgttttgagggaaatgcgttccatatgtttccgacgaagagtattccagaataatacctactacattttttatttcttttgatgaaagtaggtaaggtgtctattttgattggtaataaagaacatagtttacataaatattacatatgctctagcagataaatagttaaaacataacgattttttaccataacngtggggggagccaaactagaaattaagaaattaggaagtaacatttaaccaaagtgcattctattgtaatagattgtcctggcatatatcattttgttttttaattcaaactatagttgatttgatttactaatacctanattaaatatctatatattagtctaaatatttttaaaataaaaatataaaatttttcagattttcact

SEQ ID NO: 17441 - DNA, 3062 bp, Oryza sativa
  unsure (1)..(3062): unsure at all n locations
ctaaattggttgtgcagagaaaggaaatttagatctgaacagcaaattctatttaacagatcgattcattcagtttcaccagaagacacactgacacacaggtaataccagctgggttaattaagaacgtcaatactagaaatggtttcacagttgatagtctctctacctctcttaatcctgctacagcctatgaccacacaagaattcctgttctgttgtttatgctacttaaaaaaggtaaaactctttacgaaagagagctcagttgcataattagcgcaaacaaactaccctatatcatcggcaacaccgacaatccaaaggggaaacctgtcgattatcgatctagcattctagccaccgctgaaggctagatggaaactcatcagtagctgttggccacggaagacaattttctcgttggccttctcccccgtgtttgtcagattcacggccaaaatgttatatgatatttcctatcagctctgtcaggtcttgacaacacatcgaggggcttcatccggcaccccaatttcaatcgaaccccaaatcctccgacggctaaatggcagactcgtgctcaacccaagaaacagcctaaaatcaactgggtagaaagcaaagaagcgcacatacacgacacaattcgcagcgcaaaaagaagacggatacctttgaaggcaccacggatgattgcagccggctgccaagaaacccgaatccgactcccaagacccaagaatgacccgggggcagcaatgcaggtttgcagggtgggacggggggctgctccgatcgcttcgttcgttccttccttctccactgctgttcttggtggaggggaggttggggcanggaaggaagaagtgcggggaggaaggcatgaaaattgggaggagaggagagggatggcggatttatggtgagacggacgcgaggtcatgtatgtggtccggcccttcgctggccaccaaacctttcactgcaacgggtggcctcaattatgccttttggccctttgcactgcattattgcttgcttgcttgtttgatttcgagggttttctctaagggccttttgagttcgtgaacaccaaattttttaacatgtaaaatcgaatatacggatacatatttaaatattaaatatagattaataacaaaaaaattatagatttcgcctaaaaactgcgaggccaatttattaagcctaattaatccgtcattagtaaatatttactgtagcattacattgtcaaatcatggcaatctacacacaatttatgtaattaatattttttatatttaatactctatgcatatgtctaaacattcgatatgacatggtgaaaaatttttatttaaaaactaatcaagacctgaattgcctttgcaaagtgtcagatggtatgtctgggaaaatctaagattctaagaatcaactgctccttccattttatataatatagacataactacatttatttaaagttgttcataatagaaggtgtgtataaatgcatgttattaactagcacatctttttcattaaaatattattatttaaatcatctaccatcaagatctctaattttattaggcgcatgtaatatatttattaaggtaatccaaactatgatggtttgggtggtcgtgtggaattgagggagtacttgataattaagatataataatacgggggagctgtgaaacccagcttcttagaagttagctcgttcatgtttcagattatgtatgtagagcgtctcagaatctcaatgaaagtacatattattttggagaagcctttttatttcgagagaagctgcagttgtcaaaaatttttctaaacaggcccagtgactctgactcgtagttaagggtgcattgtccactttttaaaattgtactccttcatatttcacgtgcacgctttcaaaattgttaaatgatgtgtttttgtaaatgttttctatagaagaattgcttgaaacaaatcatattaatttttttttcaagttttattgttgacataaaaattatgggtacttccactttaatatttgtttaatttgcctctaattattggtaaaattacttattttaaatacatatttttgttaatcacataaattttcttccatcgcctcttgcacgaaagcgaccgaggcattcacttgttgctcccatgatacgatcattacactaacacgatcattacactaacgcgtcaggtacatcattcatatcatacatgtgcatagtggaataattatccaaaaaaaaacatttgtgattattattggtcatactaggttgcttaaaaaaaatttcagttaaactttatccactgggtatattaccggtacaacgcacgggtattttactagttttttttcatataaaacagaaaagtctgaaaacgcgtggaccaattttggtaactggccgaactcccattagactttacgggcaaccggcccatcacgcttttttgcgtggccgtaatcgaaaagaattcgtccccctagttgtgtccccggggagaataaatttcctaatctaaattattccgccaaaaatccgccgcgattggccaccgctggctccatggcaagcggaagcggcgagggcaagggccgccgccaccaggacaatatcccaagcgtcgtcctgctcgagctctggggccacgtcgccgacgatgaccaccggcctgacgccaccaccgccactttcacgacgagcaccggcctgccaatctcggtgaccttgtgcgccgccaccccgccaagcctctcgcacctttccgtcgactgccctggtctggtggatctggatcccaatcccttagataagtttgtggcgcccacggtgatcagcacggatgccgacctcgtcctccttcgtgtccctgtcgatcgctttgccagatttgatcactgtttcagcgactaacttagtctacaaggtgcactctcactctgaaagcgcaaagctgcaccgtctcccgagcccacgtggccgtggctttgcagacgacaacattgccatactgag

SEQ ID NO: 17442 - DNA, 3008 bp, Oryza sativa
  unsure (1)..(3008): unsure at all n locations
cttcgtctacaggtgcactctcctttgaaaggcaaagttgcaccgtctccgaagccacgttgncctggctttgcagacgacaacattgccatattaagttgcggcacggacgacgacgactcntacgctgtggcgctcttcacccctgcatcatgtcaactcaggcttcacntgtgtcgctctaccccgatggaaagccaggnagttgaacctcccatcagttgacagtgaagaagcgctgaaggggaacggtgtgccccgtccntgactcagcactgagaaggatcttccatgccacacccaaggtgattacgcttggaggtgctaaaggtacagttggctgggttgatctctggcgaggcatctttctctgtgatgtgctcgacgagattgagagccccaagctccgcgatttgccgctgcccttgccctctacgggcaactggcctttgttcctcaatcgctgcccctactattgtcgtgacatcgtcgtcaaccagagcagagacactatcaagtacgtcgagatggaattcaccatcttgaactcatctcaagatccacgctcctcgtatcacgaatgggtggccagccaagaatttcgaagttcgcatctagacatcttggtcgatgatggtagcttgaagatcaacacatggaacatgcctatcccggtcactcatgggatgactggaagcctggatgctccgtcacttccaaccacttggacactgccctgcatagttacatgaggaaaatagactacaagaggaaaaatgccgccatatccgtggagagtcttcacacggcttaccctaccctgagcatcgctgatgatgatgatgttgtttacttgctatccaagcgcaccacaagtggaaactattctaatccctcgaggagatgtttcctcgtttgctcaaaaaccatctaaatggttatgaaaaattctggaaaaatttgacaacattcatacaacacatatatacaacttcacaaaatcttaagtccaaactcaactcacacgtcgagatataaaaaagacaaattcagcgtatgaatagtagagtactgtttatatctaaatttgtcttttttgtttctcgatgtgtagatcgaatttgaacatgaattttggtggactagtaggtatcattatactctacattgtcaatttttttttcagattttttcacaactatttgcatcgaatttggaagaaaaaggtataccactccccaccacaaggggagcagccaagatggtattcactcttaacatgagggcacgtgttctcgaagaactggagaaacttcatagcatgagtcaccttggttttatgcgttgcttcctttccactgggatctccaaacatcttaagcctacaggtaatttgctgtgatatctggggaaatttatatataccttatttgtgctgtatgagttgaaaacaaaactcaggctgcaggccgtgcatggttggaaaacaaagctcaggtgaattttgttgcaccgcactgtaacatttggagtagatgttggtttaccgaagcttgcttttgccaatatattggcagcaaatccacatccaataaatggtgagctcattcctagcaaaatgtagcacaatatgggtgtgaaaacacaatataaggatctaaggtcggatcataataatattccttggtttaggaattaggatggtctgtgtgaccaaactactgagattatattacaacttaccaaggtagtgtacttaatttaggagaatatgattgataatgaggatacaatgcaatggtagagtagtactcaaggatcactatgcactgttgtgagttagttgatgacaagccttggggcttcttgctgtagttgggaagcaaaatggagttgggagctgtcacgcccagaaattcccgaatagaattccaagcagaatgtgcattaaaatccccgtccaggaccagccggggtacacaaacgacaatgttgacatacagatccacgtcttacaaacatcgtaaagtcttacataaatgcagcggaaaacagaagaaactggagctaatccttgactaaactgcagcgggaacaccactccacaggcattctcgacggcacggacgaagcctactcctcagagaaaccttcatctgacccgaactcgaactctggggttgggaaaaatagagcaagactgagtactacccactgtactcagcaagtcataccggaatagaggtatgatgcaaggaatcatcaaagaagagctaaagtggttcatttgcataaagcgagcatttataaacagagattgaaagatttaaacagttgtaaaaattaagcagtattaatcatccactgtccaacgctacaccacgttgcaacaggcccaaccaaccacctataccatccaaattcattagactaaactaatgtgattctaatcacggtgaatctggttgaccgcccataaccgcgggcgcggctattcgaatagttttactctgatcagaggtgtacaactgtacccacaagacacagccccacgacacgtttccgtgcgccggcatgccaccacgacataccggaaagaggccgtgacaggacccttcgcataaccccctctagccaagcacaccacacctcaggtttcacccccgtccccagcgggcaacgggcagtcccctctcgtgcctaggtgaatccggaagcgacagaggccgtcgcagggcccgccccgctccatcacgcccacccttgcctggatgcgtcgactagaggaaagctacactacaagcccagccgttgcccacgctggcttgtggtaagtacgataaattcttccagggcatcccgcgaaccggtccttaactgccatgggtgcgaccagcaaaaccatgcacccacagcccaccatgtggttcattttatttaaccaacaccagagcggtggtattaaaccaacattaccattagaactaacagtctaaacattaatatga

SEQ ID NO: 17443 - DNA, 1541 bp, Oryza sativa
tctttggcgatgtcaaagtcaccctggcttgtgcagagcagcgcgccgataacttggcggcagccaccaagccgcaggccccggagccctccacaccccgcgcctccaagaggcgcctcgcctcggccgacgagttgcccgtcaaggagattccccttggcgatgatccatccaagaccgccaagattggcagtaccttggacgccaaataggaaagtgtgctcgtctccttcttgcgggcgaactccgacgtcttcgcgtgaaagccatcggatatgcccggggtccccagggaggtgatcgagcaccgcctcgcagtgcggccagatgcgtgacccgtccagcagaaagtacggcaccaagccccggagcggcaagccttcatccgagaggaggtgatgcggctcctggaatccgagaagtcatccacccagagtggctggcaaacccggtggtcgtctcaaaggccaacggcaagctccggatgtgcatcgactacacggacctcaacaaggcatgccctaaggatcccttccctttaccacgcatagatcagatagtcgactccactgcggggtgcgaccttttgtgttgtttagatgcctactccgggtatcactagatccgcatgactaggaaagataaggaaaaaactgctttcattattcctgtaggcaccttttgttatacaactatgctttttggtctcaagaacacaggccctacattttagcgcatgactcgtattactttgagtgatcaaataggcgtaatgtagaggtgtatgtcgatgacttggtggtaaagacgcgccaccaggacacgttgttgcaagacctagctgagactttcgacagcctcaggtccacgtgcatgaaactgaaccccgagaagtgtgtgtttggtgtgccggcgggcaaactcctcggtttttttagtttcctcatgaggcatagaagctaatcccgagaaaatacgcgcgatagagaggatgcgccccccagcaaacttagggatgtgcagtgcgtcacgggatgcatgcccgccctgagtcgattaatatcgaggctgggaaagagggcgttgcccctattcaagctcctcaaacgctctgggccgtttgtatggtcggaggaagcggagcaagctctcagccagctgaaagcttacctcacctcccccctatcctagtggccccgggaccagaggaaccgttgctgctctacttggctgtgaccccccattcggtgagtgccgcccttgtagtagagcgtgacgaaggtgacctgcgtcgcgagcccggctatgggaagggaccaggggtccccttaactagtgatggcccctcgtcccccaacagcccgatgcccgaagcccccaacccccgggaaggccctgaggtccccgtgggagagagagaggccccggcggacggccccgaggcctgtcgcactgacgtggctcgagaccccctcggggcccccgagcacgggcgccccgagctaggttgccctaacgacaaaggtcgaccccaccgaaag

SEQ ID NO: 17444 - DNA, 2057 bp, Oryza sativa
  unsure (1)..(2057): unsure at all n locations
tgggccctttgnnggtgtggattccgattcactatgggcgaattcgagctcggtaccccgtctatttcatcagctaggcactccgagatgcgaaaacctgataccctcaggcccagaagatgctttacgcagtcttgatggcctcaaggaaattgcgccattacttccaagcgcatcgggtttccgttgtaacgtcttaccctctcggccagatcctgcacaaccgagagggcactggtcggatcgtgaattgggccatcgagctcgctgagttcgatctgcactttgaaccacagcacacgatcaaaagccaggttttggctgacttcaacgctgagtggaccccggcggacgactctattccgtcccatattccctccctccccggagatggagaagacccgaacgccgatattcgcaccggacattgggttatgcactttgacggctctctcaaccttcaaggtgcagggaccggagtcacgctgacttcgccaagcggggatgtcctcaagtacgtcgttcgacttgatttccgagccacgaacaatatggcagaatacaaaggactcatagcgggactgagagcggcagccggaatgggcatccgctgcctcctagttctaagcgattcccaactggtcatgaaccaggtcttttggcccaacccgctcttttggcccttcgcggtctggggtctagacatcctagggcccttcaaagcggccgaggcgggtaccagcacctatacgtcgccatcgacaagtttaccaagtggcccgaggcttacccggtcgtcaagatcaactggcattatgccctcaagttcatcaggggcatcacatcccgattcggagtacccaaccgtatcatcacagacaacggcacccagttcaccagtgagctattcagcgactactacgacgacatgggcatcaagctgtgcttcgcctcgctcgcccaccccaagagcaacggccaagttgagcgggccaatgccgaaatcctcaaaggcctcaagaccaagacgtacaacatcctaaagaagcacgggtattcttggctcgaggagcaacccgcggtgctgtgcgcgaatcggaccaccccgagccacgccacgggggaaacgcctttttccctggtgtacggccctgaggcggtcctatgctcggagctttccctacgtttgcctcacgtcgcgctgtacgatgaggccaaccaagatgatcttcacagcgatgacctcgattatttggaagaacggagaaggcgcgccgccctatgtgcggcgcgctaccagcaaagcttgcggcgctaccatcagcgccacgtccgagcccgatcactacaagtcagcgacctcgtcctacgccgcatacagtcgtgtttagggctgagcaagctctcaccaatgtaggaagggccatacaaagtgatcggtgtcccccggccgggctcggttcgactaaccatggaggacggcacggagttgcctaaccccaggaatatcgagcatctccaccgtttctacccataatgtcgcgcgttttttgctttcttggggctcgggccaacccccgcacactcctcagcctgtgcgggcttggccgagggctaccactgttaaatatgttgtatccaatccctccctcagcaataaatttttctgcttaatcaaaagctgttgcgcgccctttcttactccttcctatggctcgtcctggcttaaggacgattcgcgcttgctccggaccctaagtggcgttggataacctgaaaataaccgaaggggagcctgaacgcgggccgtgccccgggctgcagcgaaccctaggggctcggaagggcctacacatggccatccccgacccccgatcaccgtggcctcggtctggttagtcccgctgggcggctcccctggagcgacggccttgcccctcgccacctaagtgtcgcggaccaagtgcaaattccccctttttaccggaaccaaaccgaggggcgggacaaagggagtaaaaaggcaacttgatcgtaaagaagtcaactaaatgcgt

SEQ ID NO: 17445 - DNA, 987 bp, Oryza sativa
attgggacccttaagactgatgttattagagtgtgttaacagtgaaatttggtaagcctggagtagtcaacggcttagagtcagcatcggctttgaagtctgagattagccgatgagagttgtcaagtcgtcagttgtcggattcttgctatattcggttaaggaaattgatctactaaatgaagtttatccagaagagaccgagttcaaagagaatgcggcatggcaagttatctattaattaggaatagtttgtaagtttccttttatctttaggaaagtttctttcttgtcctacaaggactagtatctacccataggtataaatatgtacacccggggtcattgtaaactatcttcacgatcaatacaattcggcgcatcgccacccttttacttctacttttgtttttacgttccggcggaacttggcacccgacatggggctgcatcgtcttcgatctccggcgaagggatcagtccaatgttccgtcggcccaggcaattgtatcgtctacgtcggcatcgttcaaggctgcatcagtacattcgacctcttggattactctggtttggataatatatttgcctggctatttatcatatgtctatgttaatctagtcctagcatctcaatttagctctatcggatgtctctcactttagggtttctgccggtatcggctaaatcgccttgctagattagattagtttagacatctaccaccctgaaaactcagtcatcggcttgattgtctagatattatttttctttttatgcttagtgctgcatcagttaagtttgatctactaagtcgtgcttagaaccataatttctagcctgcttcttgattgccaataagggtttcatcggggttacaggcaatgagttatctggacgtttcattcggttacaaggatttgatgtacatataagttggatttagccgatcccaaaaaaggtttactggtttatctaatctcggg

SEQ ID NO: 17446 - DNA, 1600 bp, Oryza sativa
acgagatttcttttgcatggcattcagaatacagcagtccctaatggtcgccctttatgatttacaggtacaggcaccttggccagtttgctccactgggtggagagcaaacagccgctcaattgccgggtgattggatacatgttggtcacagcacccaatggctatggtattctgtctatgccaggtattaataatgccaccctactgaacatgcttgtcttcctttctgcacttcatcttccctcgcatgtatggacgtgtcgtgtagagtttttaatggcgttttgctcttatggaatgcagtaagcaattcagctggcgcaccaggatgctggtagtatctgattggggcaggcggttcatctatggaagggactcaagcagcctataaattgaactaggatggtgttgttcaccgccctgcattttgccaactgaagctctattagacttggataatacaatttttgcataccttcggaaacaactatttttgcatacagcatcattttttttagagagagagagcatcgttatatttgttcggctattttcacaagctcaggtttctgtagcgtagcaaggttttgtcaccaatttttgatcttgccgatatttctatgacacaatggaggttaaatgatttatacatcagtactttataatacagttcagtatcctagtaatttaaatgttgatgttatgtgttttttttacctcgtccttctcttctagcgagatgacgctaaccacagattcaattccctgtggaggccttcctttagttgtttaggaagattaccgttaattatcttcttgaattgttgctgatggagataataaaagcagaacagagcctagttccgcctttctcatccattccaatttcctgataaagtgaacgtacatcagtaccatttgaaggatacgtgcatcagcaaaataatgaaattcttgaaccaataaatattcccaaatcgaaatttgaatcctaatcctcgtccaaaaaaaaagaaaaaagaatcccaacatccggttttgagcaaaaaagcaacagaattttgatctgtttccaatgaaaacctgtttgagcagaaatttggaaaccgatgaaaacgtgagaacaaagatggcaaaccagtttgagtggaaaaccaatcggtgcagtaaaatcgacgaaatcaaacaatatcccagaacatctataggctcaacaaacgtatattacaaatcgacgaaaaaagaaagaaaccaagcgcatgtgcaagccccagaagctacaagctgtgagataccccgaactcaaagaataattaacccaaagaataattaaattatttaccactggacccatatatcatagacaacgaatgacagataattaattgccacgtaacccaaaggtacaagtgcggtgtaacgttggtgtgcaagccccagaacaagcagcgagacaccgcacggtgctacccgtggaccggatctggatcgatcgttgcaggaaggaggaaacggccatcagtagacgcatgcacaattagcgcgccattgggattatctgtgggcgcgcttctgggcacggagaacttcattgcct

SEQ ID NO: 17447 - DNA, 832 bp, Oryza sativa
tgaaggacttccatgacctactcaaagattcagacgggaatgctattaaggagtcaaaagagctgaacatagaggaattcaagaaagcccttgctcgagtggactcgcaagttaagatgctcccagcaacagctcaggtaattattcatgtctaccattagagagtttgcactttgcacatagggaaagaaatctgttgcaatatatgtcaaattgatgtgtccttaaatatctacaaaccattatatgttttccaaatgagattgggtatatttgtagtctttatgtgccaaattaaattgttgacccaaacacaaagaaccatcttactaattggttgtatggatgtatatagttccttggttttgtcacatatggtggatgaggtaatttcttgatcttagtgacaaaaaaagtgccttagacttctgaatggagggagtaaatttttgtggttttgtcacatggtggatgaggtaatttcttgatcttagtgacaaaaaaagtggcttagatttttgaatggagggagtaaatttttgtttggcattttatatgtcaaattgatgtgtctttgaatatctacaaaccgtttcatgtattctgaattttcgtttggcacttcaggttgcttcacaaaagggagcctatctggcaaactgcttcaacaagatgaaatactgtgaagagaaccctaaaggtccgttgaggatcagaggcacagggcgtcatcggttcaaacctttcaggtttgttttcccttgctctcttagcatacatacattaggcacttaaacactgctgaccatgttgatatggatttacggatgaa

SEQ ID NO: 17448 - DNA, 2286 bp, Oryza sativa
ccacctctatcaccttcaaccccattcaacttacggggaacaatataagccgcatcataccaaactacattctccaagacaagacgccggatatcgactttaggaataagcacggctagtcccttacggtgtctttggatactgtcaggagagacgaaagtgctatctctgtcctcaccggtcttgacctcgaggagaaagcctaccctgttgtagactacgagtcagacctacagaccgccatgtcgacaacagttagataggctaccccaaatattgtactggtgtgattatggtgaataagagcaatacgggcttcggccaacaggatgtagggttattacctgacaattcaggggcccgaccctgtataaaaatcctcgcctctgtctcttttacctcaatctcacgtatgtcctagtaccgacgatccccatactatgcaaataccggaatcgcgacttcaaacgtcgactgaaatcatatcttgatgtcgcttgaaacaacatatttgcatgaagtgacacgtttgctcgacaagggcatgtcatattcacaatgatcatgcatatgtggcctttcatatgcgcttattttagtagtggatgaagaatccatgtggattgctacatctttacgtgctttgtatggtctatgattttgttgtagtggatttagtatttgccatatgtgcttcatgtttgttcttattggaattaaaggatggacatcctttatacgctccatttatatcttaaagacaaagtagcttcggatcgaatgtaagcacacagtaaaattgtagagtaccaatgatggtaattagttacgatgatgtacaaggatatatcaccccgagtttcacatgtcaaatatgatgatatctgagcttatttttaacttccgaaccactataatgttaaaactcagtacaatacaccgccaagggtggtaatgctactaggtgcactatagtacctagggtagataccatatctagatggcaagttcaaagccaacagagcttgagcttgagcttgacccagattccgatcaaagtagagatcatcaaactgctggagttgtagctgctgcgctatggcctgaacaatgttaatatcttgatagtgagactgttgcgccaccagcctgagctgttgccaaacttggttgtttttcagctgaaacgcagctgattgcaataaggggcttgctgctatgccatactgctgccttacgaactcattatatgggctaagcacatgttgctgtagcaggagaggtgactgcagctgatattgcctataactttgacctaaaacatcaaactgcgcagaggcgctgtttgcagcaatagcaagaagagcaaagacgaaaatgatcttcattgctacgggacactagatctttctttttttgttgtataatgcttgaactgtgtgaacgatggggagggttttcattgcgcttgtctatttatagatgcaatggcactgattttctttcaattcctcatcggttgctttggagtgttagttttgctttcatgtcctattaggatccaagtgagtcatgtcattcggacacatgttctattaggtgccccaacaaatcccctttgatttcatcacgaaagtaacttttgtgtccatcacatatactccctccgtccagtaaggagaaacccacttctagggatgaacctggacaatcatttgtccagattcatccctaaaccctaaacattgtccaggttcatccctagaagttgtcatattttgggatcggaaggtgtacgtgatggttagcaggctagaaagataatgatatgactcatcgctcgctttatacgttagtttggtaaggattgcaaccgttatctagctatatttgttatgttttgtaagctattatttcactaatgcatgacacgttgaacattaaggtcgtgtggcctcatgcattttatgttacaaaatttcaacaagaatgacaaaattatggtatgccaagtgctttttattgttccgttgatacggtaccgaacatttgattttatagcaagaattaggtttgcactgaattcttaaatcaccattcgagagatttacaagaaatcaccattttgctctacttgtagtgcaggattgacgtaattcgtattcttgtaaactaacttgttacgtgttttcttgtctaaactttttggatagacttggactgtgttcggaatccagggtacccaacccatctccattatattccacgcgcacgcttttcaaactg

SEQ ID NO: 17449 - DNA, 1553 bp, Oryza sativa
  unsure (1)..(1553): unsure at all n locations
acaacatctgtctttcctttcatctgcatgtgcattttgtttctcaattagtttacgaagacagacatttttttccacccatcacttgtgtatctgcaatatttgctttcacttttgaaacattgtaatcacgctactttgttctgccaaatagttaatcatgctttattgtctgtattgcagtattgcaagttgccgtgaaaggccattctagggaatgcagaaagatgtgcttgcacgccagagatatctcctatgaagagaagggcatttctcccattgatttgacatcactaattcttgatgagcgaggatttcagttgctcacctggtgcattctgcaatcacaaagtaataatgatgctatcaatgtcagaaatactgctatgctagatcatgcaatttctgatgatggttgaagtttttgcttttacggttttcctctaaaattccaataaagaattgtccgctagcattgttttgaatgatggaacttgagaagaatggaaacattctactgcgaaagtatgagattggaaaattattggggcaaggaacttttgccaaggtttatcatggtagaaacatcgtgacttcacaaagtgtggctatcaaggtgatcgacaaggacaaaatttttaagggttgccttatggatcagattaaacgagagatatctgtgatgaaattagtgaggcaccccaacattgtacagctgtatgaggtcatggcttcccaaatcgaaatataccttgtgctaaaatattgcaagggcggtgagttgtttaaccaaattcttaaggtaggttgaagaaaaatctgcaaggaatcttcccccattagaaagggctgtggattttgcccacgaaagcgttattattccaattgtaacccagaacccactgttgataaaatggaacctgaaaatccccgttttgattggccctcttgcttaatagacccaagaggccttttcccccacttgggaaatccccatttggggcctcggggatcccccaaaggtgttacggtcaaagcttccctcgtcttcgcggtactttttctgttatggcggntttccgctttaagagttaacttgatgggaagccccaaaacgcgaaaccaaattcaaatcccctctgtgttctctttcttcccaaattatcttgaatcttttgtcaccacccaaatgcacccccttcaaactattgggactcctgtttcaaaagggctgtctcctccattctttacactcgggcaaataacccttcccgccttgcgtggttaagtggttcctcctcctgcggagccnctctcataaacctgcggacaccgctccttcatctnccnccgctgcgttcttatattttttttggcgggttgcctncttgctttgggcgccctgcaaanataaagggtnttctcacatcccgcnccttnttccatacgggtgntccctcctccctaccgacaaaacaagagcgtctaaacatcccggtaatgagaaggcttccatncaaccatatgggctctttttttgacaaaaagccacg

SEQ ID NO: 17450 - DNA, 1200 bp, Oryza sativa
  unsure (1)..(1200): unsure at all n locations
atcttccagtatatatagcaaatcctaatcaccttctaaatcttttaaaaaggaaattatgcaaaaaaaaaagctaattaagccatttccaagttcttcctctgttccccattgtctccggcggcggcgctcctcgtctcggcgcgcgcccctctccggcgccgggagcggagcaccgcgacggcgtggcaggcccagtcccatgagttgagcagcatgtaggaggcgatgccgccgatgaggccgtaggcgatggagtaggtgagcggcatgagcgccagggtgaggaacgccggcacggcctgcctcatgtcggcccagtccacctccgccaccgcgcgcatcatcatcacgccgacgagcaccagcggcgggccaactgcccacgacgggatcgacgccagcagcggcgtgacgaacagcgccgccgcgaagtaggccgccgcggtgagcgccgtcagccccgtcctcccgccctccctgatccccgtcgacgactcgatgaacgccgtcaccggcgacgtccccagcagcgacccgaacacgatggccgtcgcgtcggacatgaaggcgaagtactgcccctcgaagtcccccgtcgcgtcgtccacgaagccggcgaacctcgccatggagtagagcccccccgtggtgtcgaggatgtccacgtacaggaacgtgaagagcgcctcccaaaagtacccgggcggcttccccgaaagtcagccccccggcggggaattgatgcgggcacctcaacaccttcttgaagacccgagcttttttccccgggggcgtgtccggaacacctgacngcgggtttcccgccaggaatgaagggacaaaaagaatgccaaacaatgccccttgaccttttataagcgaaaggcatattagaaccccaacggtaaccacaaggtgggaagtatcccccgaacagaaatttcccccgaacgggcccccgttgagcccccctgccttggggacttaaaccggcccagaccccgttgaaccggacccccagggaagaggttaaataacccaaggccccctctttttttcccctaaaccaaaaaccctccccgcaaatttccggcttggaaacacgcactttcccccccaggaaaaagaaataaccctaaaaacccccgccttgggatcccccctacacccctctgaataatttctcccggggcgcgg

SEQ ID NO: 17451 - DNA, 1224 bp, Oryza sativa
  unsure (1)..(1224): unsure at all n locations
cagtttgagtgccacatgactatagggcgaattcgagctcggtacccagcatttcttgaaacaccaagtgtggaatagaaatcctgtaaattaaaatatcaaatccatgtcaggaaactggattttctaataataccagcaaagaagaaaagcaaatgaagtaactcacagcatcagctctgacaatgaaccttgaactccttcgatggcgaaatctcggtgatggtgcatggttaaatagtcgagaagatgtccgtgattgtaaactagcagtaggtgatacaaggtgtttaagcctgcctccactactgcacaaaaagagatatatcatcttcagtttactcagaaatcttgcctttttataatatcaatgtgtcctttattttagtattcctagtacatctcactgatcagaacacattcacatacccacttttcgacaccagaaatcttggatcagcataaataactcttgtaagtgcaggtgacctgngcaacagctgaggtttttccccaagtttgggggccaaggtacctccaaactgtagcaacgccattgaaatacttgctggatacccacaaagcttcaaccttcaatatactagctgccatttcacagagatagagtcaggtgaagcataacaaaagcaatacacaaaagaacgatattcgagtaagttcacaattctattcaaaaaacgttctcttctaaatttaaataaccaacacatatcgactgtcatttactccttactnncttaagaagatgaataggggcgagggtgtgtacaactgacatacatatgtactgcttgcaagaaccttttcaagagacattggcctgctgagcaagccattgctaccgtggtggatgcacaccggggcccacagctagtaacttaagtacagctgcaacaatggcttttcaaccaggccgggataatttgcatggattaatatgggggattgacaattcttgcagtatacaccttttaaggtcaaggaaaataagtttgcattttggccttcataccaagggaattgtgatactaagaaattggcatacagggcaaatgggacacattccctttttttcttgggggggggagggggtggaaaggggtttgcttctctcgcggcccaaaatttaatttgccaacacggcccccggagagaccgggttaaaaacagggtatttttttttttttgggccaaatacaaaca

SEQ ID NO: 17452 - DNA, 1901 bp, Oryza sativa
  unsure (1)..(1901): unsure at all n locations
ggaggaggaagagttaaaacaaaaagaacccgggaaaaatataattgcggagagatggaccggtgtgaaaatagaaatgttttcagtgtacaaccgggcgggccgtttattacccggttaaaaaccgacccttgggggggtaacccttatatgaagcactcttaacaagaacgccaaaatcctggcgataccctataaccttttgcaataaaacaggtaaaaatgaggttcaagccgcttagtgatccacttaattttcagcctaggcattaaagaaaaaaatttctgccatcagaccaatcttagtttcagggggtagttgtctaactaatctattctacaaggcgttttacccaaccggcagaaccctaaagtagaaccacncattaaagttaattgaaagctaggctaggttacaatggcatttgtaaataccaggccaatatatatccaacccagagtattcaaggagttcgaatgttctgatcaagcttggaacgatgccaagtaagacgatacaattgcctgggcgacggaacattggactgatccccttcgccggagatcaaagccgatgcagccccatgtcggggtgccaagttccgccggaacgtaaaaacaaaagtagaagtaaaagggtggcgatgcgcggaattgtattgatcgtgaagatagtttacaatgaccccgggtgtacatatttatacctatgggtagatactagtccttgtaggacaagaaagaaactttcctaaagataaaaggaaacttacaaactattcctaattaatagataacttgccatgccgcattctctttgaactcggtctcttctggataaacttcatttagtagatcaatttccttaaccgaatatagcaagaatccgacaactgacgacttgacaactctcatcggctaatctcagacttcaaagccgatgctgactctaagccgttgactactccaggcttaccaaatttcactgttaacacactctaataacatcagtcttaagggtcccaatttctttggaagaaatgcgccgggaaaccatcggaccctggcgctttcaaatgccctatctggaacaagacgtctcctatctcctcctcagagaagggtttcatcaaagactcattcatttccgctgttatttttgtctggaacaaattgaaaagttcagtagggtcaagattttcatctttcatatatagattctggaagaaatcacgggcaacctctcccatctccttttcatttgacaccaggctgccattaggcctgcgcaatttcttcactttattcttccgagctcgccaggacgctttcaggtggaaatactttgtatttttgtcaccctccttcagccaagtgatttgagatcgctgtctccaccatatctcctcacggcgaagcatttcctgaagctgctctttgatctttttcacctctggttcagagtcaagcatccctgccattctgagttcacctaatttcttcctgcgactttcaatacctttctttatgttgccaatctttgatttgctccacttgacaagttcgtccattgtgtatgccatcttggttttgaagtccccaaggttgcgcacaacttctccttctccccatgcctgctggacaaccgagtcaaaggattcttctctttcccaaatagcttcataacgacttatcttcacactgttatgaacaagttcttcttctaatctctccagtagcaacggtacatggtcggaactaggtgtaacaaggtgtgtgatgcttgcctgtctaaatctgcccagccatgcntgcgangctactgctcgatccagtcgtactcttaccattgttgcacctctttgattgtatcatacgtccatgggcactcatgaaaacca

SEQ ID NO: 17453 - DNA, 1474 bp, Oryza sativa
tcctcatcgtcgcccccatcatacgcagccatatcagagtcaggtcgataagaacgaccactccatccccttcctcttccttggcctcggccttttcttccgccaccattaaaccagttacccgatcttctaaactcaggtgctaccaaagtatcaggatactgtatcgcttctggaagatgcacgccatcaccatgctcctttgtgacatgacccaccagaccacaaatcccacagaagaccagcatcttctcatacatcagccggaaaaaccacttcttcttattcaaagtggtgctcctactcgcaggagaggcttacgaacatcaactttcacccttactcgaacaccatcaccactcccttttactgacgcctcatctaatttgatgacagttcctgctttacggactaactgagttgcaatactccctgttctgatcttctctttcagatcatgaatctggacccaagtgggataggtttcaagaaccacagattcaatctctgaccaaccatcatattcagcaagcagcacaggacaaccacggaaaatccatggtccttcctccataactcgctcccaatcagcaagacaattcaattggattgaaaacaaattatctttcatggacctgaaatctacttccttcgcacaattccatgcagatcgcatgctggcaaacaaagcaccatggctaaaggatttctctgtatgaaccctagctagggctaaccatcgggcatccgcttccagctctttgagatcttcctccaattcaacatcctcttcctcgtccttcctgagatccaaaccctccaaaagcatctcaatatcatcctttgcctcatcttcttggcttgccggggatcctttagggttcgccgacttctgactctccgttgcagaggctgcgctcgccatgagatccagtaaaatcgctcttcgtcttcacgtcgacttgcagagcagccatagattgaatttctaaccgactccgggacaaaatcaacccagatcggagaggtagggtgaaactccaaggcgtcgcgttagaggagagaaaccctaattttaggcgtgagttagtgagatacaatgtcaatcaaattttaatggatagtcgatgcgacagtgatcttgatcgtttgattagaaaccaacggctagagaaaaaagatgacgtggaatcaccaggatgcagagaattcctagtagtggggatgatttgtataggtatataggataatagctcacaaaacataacaaatatagctagataatggttgcaatccttaccaaactaacgtataaagtgagcgatgagtcatatcattatctttctagcctgctaaccatcatgtacaccatccgatcccaaaaatgacaacttctaggggatgaacctggacaaggtttagggtttagggatgaatctggacaaatgattgtccaggttcatgcctagaaggg

SEQ ID NO: 17454 - DNA, 780 bp, Oryza sativa
ccggttgattgcctttcaagtacacgatcactatgggcgaattcgagctcggtaccctgaaacaacatatttgcatgaagtgacacgtttggtcgacaagggcatgtcatattcacaatgatcatgcatatgcggcctttcatatgcgcttattttagtagtggatgaagaatcaatgtggattgctacatctttacgtgctttgtatgttcttcgattttgttgtagtggatttagtatttgccatatgtgcttcgtgtttgttcttattggaattaaaggatggacatcctttatacgctccatttatatcttaaagacaaagtagcttcggatcgaatataagcacacagtaaaattgtagagtaccaacgatggtaattagttacgacgatgtactaggatatatcaccccgagtttcacatgtcaaatatgatgatatctgagcctatttttaacttccaaaccactatattgttaaaactcagtacaataaaccgccaagggtggtaatgctactaggtgcactatagtacctagggtagataccatatctagatggcaagttcaaagccaacagagcttgggctggagcttgagccagattccgatcaaagtagagatcatcaaactgctggagttgtagctgctgcgctatgacctgaaaaatggtaatatcctcatagtgagactgttgcgccaccagccaaagctgttgccagactttgttgtttttcagttgaaacgcaactgattgcaataaggggcttgccgttatg

SEQ ID NO: 17455 - DNA, 1825 bp, Oryza sativa
  unsure (1)..(1825): unsure at all n locations
ccgctttgatgactgactcatctagtgcgaattcgagctcgtacccgcattcgccaatgggtggggagaagggtgtccgttggcaaggaaaaagctaacggcgggagccgtcttctgacgtggctcctaaatgaccgggagcgctcacgtcatgaacttgcgcacgtgcgggggtgtggcacgggtcccaactacaacttgttcgctttctccccacccatcgccaggcgccgtcgtcgggcaccggccaccacacacctctcccacgattcagcgtcctcttcacatacaactgctcgccttctccccacgcatcgccaggcgccgtcgtcgggcaccggccaccacacacctctcccacgattcagcgtcctcttcgctccatgacgcagccgtcaagagcccagggtgactcacaccttccctccctcgtgggccaaagtcgggaggatgtttgcatccatattcgatcgagggagaaacctcattttctccagcagccgaaacatgccaactcccgcccccccgcagctggggtaacaagctcacgccaccgagctcgccaggagcgatgcgagcgcgtcgtcttttatgccggtgtcagtcgtcatagattttccatgtggtactaaaaacttcgtttttgtgcgtgacagttgcgcgtagaatatgtatgggctttgcacgcacgccggcccgaagtctcgaaattatccaggatcatcatgcgccgtccctcgtgaaggccgccgccgccgggtccgtcgccggcgaacagcgtggccaccgccataagccacccgctgatccgcccatgcacaacagcccatcctgttgcagccactcctcgccgccggcacaaccaccaccaccgggctttctcaccgacaccaccggcgacggcagcggcagcctgacggccaatgttctgcacaatgtcaatctcctgcatatcaatcacactcccaaccctgaaatggtggaatacctgctagtattccactgcagatcaaacactttcctttggttggcttgtagagtagagatagggtacagtctgcaaacagaattggttcatcggcactggatataggatacagcttgcattgcaacagagtttgcagaatgcatggctttactaaagagggatcacccttacaatttttgcgctgttttattggactgaaaattaacacaaatcaatgtacccagtgacttgccatcagccaagcagctgtcttttcggttttcagaatggattcggtaaagtttaagactcccgagcaggaattttaggcactgtattgccattagataaatcggtggataatatacatattggtttgccaaacacttggaacaagccacaaaattcgagttaacttttatttgattgaggaattcacaaaccgtttatacaaggtctagtacccaagaaaataatagcgtcctgaacaaacaaaaggacaaggaaagaacaaggctggttcttgtcaagaaacaatgtaacttgaaattaaatgcaaggtagattaaaacgatattgcgttatgagaagggagggagaaatgttccaagcccgnggcctctgggctttgacactgtagggggttaccgatattggttaacaagttggacccaaaaaatacttcattttctacttcctaaactcaggtaagagggagaacgggaaaatatttttctcattgagaaaaagagcccgtgggggtggggatctcaaacttttaacctgtgaaacctcgggggtaaaaaattttccttgggaacacgggaagaaaaattctcttgggttttaattctttag

SEQ ID NO: 17456 - DNA, 2170 bp, Oryza sativa
  unsure (1)..(2170): unsure at all n locations
aaaccccctttaattttttaaagggggccgggaaacacgagaaggggttggacccttgttttttaaacacaccatttttttcaaatatttaacaaaaaaccgtgaaagtgttgtttaacagatatttaattggtcatccggccaaaatttaaacccaaaaggtatttccgggaatcctcggaaagggtgatttaagattcagggccaacctaatttcgtgttgaaaaacaaattgtgggtgncacaccacggaacaaataaaagcccttgggtgcccaatatttttgcccctcgtgtaaaatttgatattanaaagcaataggccacncgacttaaatgtccacgtgtcatgcattagtgaatataatagctcacaaacatacggaaatatagctagataccggttgcaatccnttcccaactacggtaatagagtgancgatgtgtcatatcataattttttaagccgtgctaccaacattgtacacctttcggatccaanaaatgacactttccaaggaatgaacntaacaaaggtttagggttttaggtatgaatctggacaaatgattgttcaggttcatccctagaagtgggtttctccttacgggacggagggagtatatgtgatggacacaaaagttactttcgtgatgaaatcaaaggggatttgttggggcacctaatagaacatgtgtccaaatgacatgactcacttggattctaataggacatcaaagcaaaactaacactccaaagcaaccgatgaggaattgaaagaaaatcagtcccatcgcatctataaatagacaagcgcaatgaaaaccctccccatcgttcacacagttcaagcattatacagcaagaaagaaagatctagtgtcccgtagcaatgaagatcattttcgtctttgctcttcttgctattgctgcatgcagcgcctctgcgcagtttgatgttttaggtcaaagttataggcaatattagctgcagtcgcctctcctgctacagcaacaggtgcttagcccatataatgagttcgtaaggcagcagtatggcatagcggcaagccccttattgcaatcagctgcgtttcaactgagaaacaaccaagtctggcaacagctcagggtggtggcgcagcagtctcactatcaaggtattaacattgttcaggccatagcgcagcagctacaactccagcagtttgatgatctctactttgatcggaatctggctcaagctcaagctcaagctctgttggctttgaacttgccatctagatatggtatctaccctaggtactatagtgcacctagtagcattaccacccttggcggtgtattgtactgagttttaacaatatagtgggtcggaagttaaaaataagctcatatatcatcatatatttcacctgagaaacctcgggtgatatatcctcgtacatcgtcataactaattaccatcattggtactctacaatattactatgtgcttacattccatccaaagctactttgtctttaagaataaatggagcgttaaaggatgtccattcttttaatctagtaagaacaacaccaagcacatatgtcaaatactaaattcactacacaaaatattttgaccttacaaagcacgttaagatgtatcaattcacatttgattcttcattcactactaaaaaaaagcgcatgttgaaaggccgcatatgcatgatcatttgtgatattaacatgcccttattcagccaacatgttacttcattcaaatattgttgttgtttcaagcgacattaagatatgtattcaaagtttaaacactgggtattaatgactctaatactgccatttaattcaaatgaaagccattgttgccacatcttcctacaatattatggtccaaggacttttaattgaggtccctcctttgtgtaccagaagtttacctgacgtaacctattcgtttaaaccaaaaaggctctccccctataagggggaacaccaaaaagattttttgttctctttttatctgcccgaaaataactaaaaaaggcctctcttcaaaggaaagaagaagtttcttttatgctctcaccgcgggggttttcgccccccctttatagaagatttccacaaagggttttacacacaacagtaatactcttcg

SEQ ID NO: 17457 - DNA, 979 bp, Oryza sativa
acagatatcaagtaaacatggcacaagcgagcagataggtaaaaccctgaccccatgtaattagcaaaacatgcatatttatttgcaaacagtaaaacatttgtaaattgggatcaacatgctcaaggggaatgtgtgacttgccttgcttcttcactttgatcttccgactcttatccttgcgaccgcgatcttccgaaacgacggattctacacgctggcacgcaaaacgaggaaaaactctaataaaaaccaaggaaatagtatataaaaagtaaacaaacatgtagagctcaattttagatgaattttgcaagttgaatggcccaatttggagttcgtatgaattagatatgaattttagaagttttgagccatttaaatgaattcttagaattaaactcgatttattgcgcaattattatttatttttccaaaggaaaagagggttgttgacgtcatcaaaggggaggggcggcgccggcaagcgggccccaccggtcagcggcacaagggcgtcggtccaccgtggaccgggaccaccgaggcggcccaccgccggtccacgggaaccgacggccggatcggcccaaagccgatcgaacggccacgaggcggcgcggctggggcacggtgtcacaccctaaaaatcctaaatatataaattgttgtttaattggaattattagaatttattttaaaagcctagaagagaagatctaattttaattaataaattccaatataaaatggggccagataaaatttcattaaatactttgcttaattctataattcctagattttctgggatttatttgagctaaggaagtatttttaataaatggaattacatttaagaaataatttaaattgaaaaaggttttaaaagtcttcttttggctttgggccgaaagtcggcccaaaaccgctctctctctcctcggcccaagtcggcccagtccgccgcgcgcgcgcg

SEQ ID NO: 17458 - DNA, 689 bp, Oryza sativa
tgtggtatgccaacatagtaaactacatggtatccaagtacgtaccaccaggggaaatcaatgaaaactgaagtatgaaagccgccgtcacatatgggatgagccatacctgtatcgggtctgctccgatggcttactacgaagatgtgtgccaactgaagaaggacttaagatcatagaacgatgccatgcctcaccctatggtggccattacggtgcattccgcacccaggccaagatttggcaaagtggcttcttctggaccaacgatgtacaaagacttaaaagaattcgtcagaagatgcacaagctgccaaaggcaaggaggaatcactgctcgccatgcaatgcccctcacatacaatttgtaagtcgagatattcgatgtttagggtatagacttcatgggacctttccctaagtctcgcaactgcgagtacattctggtggcagtcgactatgtctccaagtgggtagaggctatgtcgtgcagcgctgcggatgcaaggcatgccaagaagatgttcacagaaatcatcttcccaagatttggtacccccagaatggtcataagtgacggaggttctcatttcattgataaaaccttccgagacctcctacgagaaatgggagccaaacacaatgtggctactccttaccatccacagaccagtggacaagaagaaaca

SEQ ID NO: 17459 - DNA, 1053 bp, Oryza sativa
gttcgagtggccgagatccaccccgtccacccctcctccgtcgaggttcgccgccggagcatcattcccgccgtgcgacggtgagagccgccatgtccgccgccttcagccatggtttccgatcgccggggtccatctccctccccctaatctctctcttttcctctcttagggcctcccggagctcgtccgcccgccgccgttgtcctccagtggctcgccgtcaccgttcgccgtcgttctcctccgcgccggccactctcggtgaggcatacctcctcctctattcccctccctctccctcctagccgcgccgggtcgagccgccgccccggtcgtgcgccgccgcttttgcgccgccgcctcccgccgctggttgccgttgccggcaacacgcgcgcgcgccgccgaccttgccatggccggccggccggctttgtgccgagccgagccgagccaggccgccgccgcaccgtccgatcggccccgggccgatccgggccgttgatcccgtggaccggcggtgaaccacccgcgtggtcccggtccacggtagaccggcccctgtgcgccactgacatgcgggccccgcctgtcggcgccgtccccccttgatgacgtctgccctgggatttatttcgcaataaatgatttaaggacttttgttatagtaataaatacagtgaatcttctaaaattcataactaattcatccgtgctccgtttaagcccattcaagtcttagtaaatcaagaaaaatgtgtagaatccattaaaaatggttttgttctctgtttcagtagtcgtatagcctgtttgtattgtttgctttgtatgtcgcttagattccggttcttccgacgctccggtgtacttcgaaatagtcgccgaggttcctccagcaacagagcaaggcatgtcatgcttgtcacttgaacatgttgatcctatatttcaaatgctctattgtttttcttcaaatactgcatcgttttataatgttactatgggatgtttacctattgtcatagccatgctattgttgtaccatgt

SEQ ID NO: 17460 - DNA, 726 bp, Oryza sativa
ctgttccagtttaacctgactgcaatctattttgttttaattgctgctccttcatgatatcaaagctcggttaaccgttacatatgaaagaaatggatgaattatttaatgtggtgcaagaattttgtgatattgaaggtgttccagttccaaacatgtacgaagaaatactggtaagtaggggtgaaaacggtacggaaatttccgagaattccggcaaccgtttccggtttgcaccgaccgtttcaatcggtatcggtaattgtcggtatcggaaatggaaacggtaatctctttcggaaatggtagcggaaatgatatggggttttttccgaccgttttgtcggtaactgttttttatcggtaatttccgtcaaatttccgacaaaattccgaagaaggaagtcggctaggcctggctagcaggaggaggagcccattaggcattaaggagcagcccattccgaataaagaagccaactaggcctgaccgcatcgtcgtcttcatcggcgctggggcaccgccgcgccatgttgggcgccgccaccaggtcgccgacgccggccgcaacctccttcgccccgacggcctccgtcgcagccggccaccttccctcccccatgctccaccgccggcttccgtgccaccgagccaagcgccgagcgccgccgcaccgccccagcctcctcctccccaccgatgccgcccctttctcctctctcctt

SEQ ID NO: 17461 - DNA, 1489 bp, Oryza sativa
tttctatggaatcagcttgcatcacctaaacccgaattccatagtgcatatcgccaatttcgtccatgtttgtgaagcctttttggggatcaaacctcactttgccctattccgccggatcttcttcctcaagccccaaccaaacaagaacaaaccgtgtgtagtcgggggggcaggattccaactaaggggaactctgagccaaaaatatttctcgatgcccttcaagacttcgaacaaaggatggcatgcaaactggttctatgttcagaatcccgagcctgctcttcccgggtacacttgtcttcctccagtgtaccaagatatttggaactcttttccaatcggagatgaagcagtacaagccttggagttgctggatcgtatgttaaatcttaaagaacaaggcctacagggagagcaaatcactcggcacttcatcaaatgccgactggcgccaatcaaggaaagatcccgcacagcattcgagttcgacggcaaacatgatcccaaccgtgaagaaccagactccctggatttcaaaatcatgaaggagaggatgtataaaatcttctcaaatgcaattgtagtcagctactctcaccaactgccagttgtgccatataatgcattcaatccgcctccacaggtatgcatcggaaaccctcaaaccgtgatcagaacataattttatcttcatgctgagttgactaactatggaagcatcttgttcaggaatatgcattgatgaagtcagatccaccagtctctcagcgccggtctcctcgccaacacaccgctcagggaggcggagggccaacgatcagaccagatccgcaacctcagacctccaaattgactggtcaaacaggtcctcgcaagagaaagctggtacttgatgatgatgaaggcgacgataataaatctggggataagggctcgcctaataaacccccaaagcgtaccatgcccaggaaaaaactggctggccgtgcaatgccaaagatcagaacatcttccaggtattagacctctcggtatgattccgcttcggcatgctttgctcatgaaaatgatacggaatactgaaagaacactttgcaggaaaccatctgatatagatccaactggaaaagatcctgatccagctgcgacagaagcaaatgtatccaaggattctgagccgactgccgaaagccagccgactgccgaaagccagccgacgggcgcccatgcttcgggtgacaaggccaacccgagtgaccagccgccgactggaaaccggtcggcaacaactgaagcagcaacaacccaagagcccccgactggaaaccagtcggatgtaggtcctgatcaagagatccccgaagtagaagcgcagacgacgacttcgcaagggccagaggctggtaacgactcgataatcgggtctccaaataaagaacaaggatcacctcacgtccagctaggaacaccttcaggtaagtca

SEQ ID NO: 17462 - DNA, 7133 bp, Oryza sativa
ttagcagaacctaaccgtgaaccactatgcagagaatgcatcttcgcaatgaggccaaaaccgcaactttagaaaggctggttcctcatttgggaactcttgaagcggttagggaccagctacatgaggccaaggagcacgccaagaagacggagaaggagttaagggaccgaatcgctcagctccaggattcaaactatgagctgagtggttcatcaaaaggtaatccctagatccgtttcatcggtttaaactggcataactgtatcctctctgggaataccgggcatatccgaaggtttccacgcaaagatatctttattattttgaagaaaggtgatgagcgcgctttcctatttacaatctaactcggcgcctattacagcagttttggtaggatcagaaggatctaagggaatctttttagtctcagcttcggtttccccactttttgaaatcttggcagcgggcacttctccttcgctcaccatggttgcagccagtcagatttcctctcgggcagacgccatctcgcgggtttgggccatgtcgcaactctccttgtcgcatgtgacagcttgcttgatgtcgctccgtagggttaggactcctcggggaccaggcatcttcatcatcatgtacgtgtagtgcgggacggccatgaacttggctaacgccgggcgtccgagtatggcatggtatgctgtctcgaaatcggcaacttcaaagctgatattctctgtgcggaagttttcccgagtgccaaaagtgaccggaagagtgatctggccgagtggagttgcggataatcctggaattactccatgaaaaggcgcattgcttgattttaactcggagcgagggatctgcatatcatccaaagtcttggcgaagaggatattgagtgcactgccgccatcaatgagggttctgcgaagcttgacgttacggaccactgggtctagtaccagggggtaccgccccgggtggaccactcggtcaggatgatccgagcggtcaaacctgattgcgatctctgaccatcgaagatattggggcgtgtcgggctgaacagcattgatctcccgttcggtcagcttttgcttccttttagactcataagccatggggccgccgaaaatatggttgagctccttgcggtggtcttgaaatccagccggggtgtcgccgtcgtccttcttccttgacgtgctttgtccctcgtcggagttcttccgagtaggcttggtgtactgctccgcgaactgcttgtagatgaagcactctttggccacgtggttggagtttggatgatgcgggcattgggagttcatgatcttgtcgaaggtgttgacgcgcgaacgctgtcgagaagagtgagcggcggttgcaacaagttcctcaggcttacgcttgcggtccttatgattgttacttccacctcctcccgtagccggcgtatttttcggcttccaactgggacccgactgcttcgatgcggtgacggcgtcttcggctttggcgtactcgttggctttttcaaacatgagcttgactgttctgggaggtttgcgcccaaatttgccgaccaattcttcgtggcgaatccctttggtgaatgcggcgatgatgacgtcgtcggtgatgtcggagatcttgttacgttgttcagaaaatcgtcggatatactctcgaagggattctccggatttctggataacgttgtaaagatcatattgtgtgccaggacgctcgaaggtgccttggaagttggcgatgaagtggtcgcgtaattcggcccaagatccgatcgtaccacggggcagtccatggagccaagatcgtgcagaatccgctaaagccactggtaaatagttcgccatggccttgttgtcacctcctgctgcgcggattgcgagaccgtagacggtaagccacgattctgggttagtggtaccgtcgtacttctctattccagtcggtttgaagccggctggccaatccactcgacgcaggtcgtcggtgaaggctgctaccccatcaaggtcgtcgtcgtagcggtctggcgagtggtgacggcctcgagctgctcggcgctgtatgattgtgtcgcgaagatcgatggggtggcgacgaggcggtgaacgtggccgttctactcggcgctccccacggtagtcgggaggcgagtgcacggaccgctcgtcgcgacccctgctcctgcgattggatcctgcgccggtgatgctgaggcttggatgacggtagtcctgagatcggaagtgtggaactcggctaccagtcggcgtgtggacgctttcggagttaactggaaccgaggccgcaatcatggtcttggtctggttcaagatgttgacgacatgatcagattggttgtgctcgttttccttgaggagggtgtcgaggagggtgatcgcggcaaccgcattctgctgaggggtacggaaaaccggtatcccttcaacatcttgctggccgatgagatcacgcgctcggcgcccagcttccagggttcgctgctgtcggtgttcagcctccttcgcgttccgctcatgctcctgctgctcccgccgtagccgctcttgctcttgtgcttggcgctcctgctccagtcggcggcgctcgatctcgcaacgtgcttcggcttcccgggcttggcgctgctcctccgtttcattgtcggccataaagacgccgaagaaaagaggagtgtagttgtcttctaggcttccgtcgaagtcgtcaagatccgcgtcgtcgtggtagcgagaaccaaactcatcgtattccacgatttcggtgggacgtgagtcgacggtgggagagctgtagtagccatccagttggtccgtcgaaaccgtgccgagtggttggaggatgacgccgacttccctgaagctaggcgaaatcggtgttaagaccgacttccgcctaggcctacgggatggagacggcgtggcggtggagacggttgccgaatcgtcagggagctgtatcaagatcgatgggtaaggctcatcatcttgatctggcgttgttgaagtagatgcgatctcggccgagtggtttgaagccgactcggttgagatggtcttgaagtaactttcagccgcgtttgggagtccaaacgggaccgaaatccggttctctcccgactggtctgattccgagtcgaggagagaaatcttgccgaagttgttggtgacgaagtcgaggctgccgaaccgaaacgtctgcccgggtgggaagacgaggtcgtcgatgccggagatgggacccattgcactgatcggcgaaaagcttgacgctacccctacctggcgcgccaactgtcgaaactagatttcggcaataataaaagggggtggctatcaagctagaaaagtgtatgggtttggagacaaaggatttatacaggttcaggccttcttatataagaagtaataccctactcctgtccggggatgaatccgccgagtgtattattgattgtatgattcgggaaaaatcagcatatgcccctagaggcgcccggaccccccttatatatgggaaggagtccgggttacaaaagataatctatattcctaacagaatatgaagatacaggtaaaatacagtcgtaaccgactaagtttcagggtatttccttgatacacaagttaagaaactaacccaagatacagataagatattctatctacattaggtatcctgtacccagttcgaataccatcgccgtgtagatatgggatacccataatctccacagagatcttccacaagcccgtcaccctgccagtgctggtatacgctatgcagatgcatatgcggaccggcttactttacatgggtcaaataagataagttattgatttcatctattctaatactttgcagtagcgagagtaatatgctagatcatgcctctagtcgttttattttctcgcatgaatagatgtatttgtccggcctttgtgccgactcttctcttgttatatcaccgaccacgaagtttgacaccacgcgcctgaacgcgcttaccgtgtacacaagaaggtgcacatacataatccgttgaattgaacgacggagtgatgtcccgaacgacgacacctcacactcggtaacatacgacatcacctagaagttgtcgtctatctggctaacacagtcgttgatctatgaatatattaacacactcgtcatcgccgatcttatggatcagcacgcttgggacactgttgattgtaacttgtatgttaataatccgtcatattgctatctgtatgaagtagatggtaacaaatccgagtcatcggcacctgcatgcgccgccgccgccgcctgcacgtagcgacacccagatgccaccgcatgacgtcttcccctttgtcaatggttgccgaatcaatccagagactttcactcatcgatacgccatctgaaacgccgactcgacggcctttcgaggccatctgcaacgcaattgacggccgtcgcccgtagcgatgccgaggagcttacgcctgcctcccctcgccgccggtacgcacggcatgcctcccgcgctaccgcacgcggccgggacgagggtcgaagccgccgtgagcgcccgccgccgatagccgtccgccatgccggcctgtatgccgagccgagtttcgtcgacacgtaacatggagctatgattgtcggacgccggtcacggcctgatgccaacgaatgccggtgtcggtgctactagatgttgcaccgccgctccgcctctgaccatggcaacttgccatagtcgtccatctctaccgagggctcactagcacgtttgccattggttccatccgtcgtctccattgaaggatggcaactggatcatacctcacccacttcttgtgggagaaggtcgtaatagcccattgggcaacatatgagatgggttggccagattttcaagctagctagtataaggaggtgggccaagtagaaattggcctattaaaaggagtcgggcacgaaccgtgattttggtccgaaaacggcattttatttcaacagtccttggtttccaaggcattatgcggaactcggaaattatgcggaaaagtcctatgggacattagaaactacggggaatatacattcgccatttatactttgaacattcatgaattgggtttacgccaaatagagaagtattaaggatttataccttagtcccgtatttctaattagttgctttaactatttagttagtttcttgaataaccataatcaatcctagaaacattgtttttaggaaaaagagcttccatgaacttgtaaaacctttgttttagcacccttttggaagcatcatattttatggtttatttcctggcaattgtttgtttggggtaattgattgttctgtgggttagtagttctgtaaattacacatacctttgaatagcagaaaatcatgttaattgctaggattgtaataaaaggtgtgtatagaaaaccattatttactattttgtactcgttttgtgcactttacttactagaagtaaaccggtagaaagttgcataaaaggacatcatgtaagtagttgcatgtagcaaatacatttattgggcaaatgagtaatagaatattcatatatcttctctttgtctaattgtcgccacatttgtagaaggcacaattatatattctctgtatagaataaatgtatacactcatcatgaagagagtatattattgacttagagatatatattagtgcaggactatcatagaagataagctacagctaatttatattaattgtgtccaagtagatgcaatgtcatcgaatttgcgaatatctagacgagaagtctatatgccaatatgccctgcaccaaaattatctatcaaaaagactatatacctatgcagtgtctatagttcatttgattgataatgttatgtccatcttccacgtataaatgactttacaaatgaagtattgtttttatggatgtatgtaaattattttgagtaaattggtcatttgcatttgaagcaattttggcctagatgcaacatgtttagttgttagaattgatacacaagaagttgtattactatcaacatgtgcatttgcacgcacatatatgacttatactattaatatgttcatgaagaacatgcatactcaaaatttgtggaaggaaaggaatttggtgtatttgaatttgatgttcaactcagggggagacgaatagtcatgacagtaatcttgcattcgttcttttgagatagtattttacaatacacgagttacattatagtttagattaagttcaatataaaaaacatggttaagctcatgcagagcatctttatcttttgctttaggcatagaagcttctacataagattactaaatattttttttatataggtcatctcaccttaactatattgttttttttttacctgtagtaattctttaaccttttatggaataaaattgtgaattgtatgtctaacattgaatgtatttttattatccactaagcctcaatcaaccatgtaggttgatatttctaagtgcattgacgccatattggcatacatgtaaagttgtttacttatgcacatgaacaattagaatatttatgtttaagcattgaagcttaaatatatccacctacaaccacattatttcttttagaaaagttgtaccatgaagttataacaaatatgtgggtttcacgacaactattttgtaaattttcttatgattggcatgaaaagggggaggaatatgtgtattttgcaaattaatttcagaatatttgcaataaataagcataagaaattgtggatatgtggcaggcaaattgatgtgttataggtcaaatgctagaagcaaaatagcccaaactattatcgaatcttatttgggataattataattattgtcacacaacgaagtgtgttatttattagccattgaaaattgcatattcatcaaggaagtatgaaattgcatatagctatctaaaagctattggtttacttgtagtaaacaatatcctaaataattaatgacctttgagattcaattggggtgcaggaa

SEQ ID NO: 17463 - DNA, 641 bp, Oryza sativa
tctgggtctctggcaagaacaagatatggcaatccatggagcttcagttactagattaatgcaagattatcttcaggaaaaagccggtgcatgcaaacttgtcggattggaagaggagcagccacaagaatcaaattagggagaaatacaagtttttattcagaattaatggaagtgatgaatcaatcctagataataataataataaaaagataatcaaacaagctcctctgatcgtggcacaaatgggagcagcagtagcataaaccaatggaggaagaacagctcaaatccgtaacgaattcctacacgcacgcgtgccatgctcacatcacatcgaaatcctcaaatgcgtgcaccgatcaagattgatacagacggtgataggcttgccgggttcgtcgtcgacgtcgagctcacacggcggagacggcgtagacggcggcgacgacgatgccggcgaggatccccaccggcgagacacggagcggcgcgacgccggagcccacgggcgtcgccggcgtcgccttcgaccctgtccccgccggagtcgtcggcgtctgtcccgcaggagcagcagcagcgccacctgcacgcacgcggcgaaggtgttcgtcagctatctcgtgctcgtcggagac

SEQ ID NO: 17464 - DNA, 6628 bp, Oryza sativa
gaggaacatattttaaagatattttttttaaaaaaaataaataattgagttaggttctatgaaaatcctgtaaaatctctatgttcaaaacaagactttagagattgatagaatgctattcatttatcaaagatgttagcctatgttttttttaaagataagttaggcatagattaaatgtctctaacatacatatttctttatctttacagtagaagttatcttctctataaaaaaaaaatctaccatagaagttcaagaaaactaaacaaacaccactgaagacaccaaataatgtctactataatattactcagctcatgacttcccacaaaagaatggaatttcagtacaaccaataatccaagccactggtacacaatggcaccaatccgtacacaaattctcctatacaaatcaaaacaacagcacatacacagatacactcaaacacgccacaaaaattatagcaaaataacacaaactaatttaatcgattggtcaatcaaccaacagccaaatgaataatctgatgatgagaagttgaggctttcagaacagcatggcagctagcagcagcagaaacgcaggaaaaccggcattggtggcgaccctccgtgcagagctgggcaccacctgcggcctcgtctgcgtctggctcgtcgccggcggcgtggccgtcgccgtcggcgatccggcaccggccgtcgactccggcggacttggcgctgtaaatttgacaaaataaagaaaatgatagatagtttagttcccatcaccagtaaaaattctgacaaattttgggctgtttggcatgtgttgcagatgaagttagagcggattcaggctaaatatttcttacgcagtggtggcatggccggagaaactgcaacgggtactcctgcagctggaatctgagctgatgtatctgaaaataaaaacaatattgataaattaaccgtatcttataaaccatttaaaagacacaaatattagagaatgacctaatatcaaataattagaaggggtgaggcttcaaacccaggtcatctagccgatcaccttgtggagctagctggaagactcctgagcgtttctctatcctataaacttttaaaatacacatctggctcgtttggaacatagggttctataagataacctttctcgcgcaaaacaacaatttgttttcttttaaatgccacattttaaatttaacctttctcgcgcatatattattacttatatactatctttgtcattaatcttttgcctaaatttttttgttctaacaacaaatatgaaaaaccggagatgaagtttattacctttgcattggaggggaacagacatggagttgcaggctttaggcaatgtaacggctagcgtccggttgatggggatgccgaggggcacgttgccggtgaggacgaggcaggcgcagctggcgctcgtgttgatcatcgccgccaccgactggcagcactccgccgtcggcgcgccgccgccggcggccgtgccgttgccgccgccgccgccgctgctgctggtgatgaagttgaagcacggcgtgaagctggtgatcagcgacgccgtgcacgacgccgccaccgcctgccccgacgccggcgccgccaccattgccaccacggcgaccatcgccgccgccgccacggccaccgccttgttgagctccatgtcactgttttgcggtgtaattgattgcaccgtaaatcgtccggtgatcttgcgttgataaaaaaaaaacgtcaacagtcacgtctcactctaactcgaaattgttactgtttgatgatgaagattgtaatgcgctatgaattcgtttatataggggggatgggagaatggttgacgtgtcgaattgaattggtagatcagaagttggtcatggcagcgtaaccaccgtaaccaattaatcctttttaagatgtttgtgtcaaagtgttaagagtgtttgaggtcaccttggttaggaagggttcgtcaccaaatgcctttgctctagccggaaaatatgctgatgtgtcattttcaccttgtaactaatttagcttccgtaatcttaatctgatcgaatagtgacattattgttgtaacaacctaatttgaccggccataatccatatgacaatgctaaattgaggaatttccgtactcacatttctattccttcaaaaattctttcccaaacgactcatttatatataaaattaattaagaatttgtttggaatgctaatggagaatttgtagtatttcttgtacaactgaaccagctctcgtggtatgcaccgtcggatgttgatctaacagtcagaaaatgctcacaaggggattcggagatttcttctccgatcccattttaccccactattaatatacaactttctctgggtcctttctgctaatttccctattgttacatcgatacatcttctcgggcctccatctgggccgcgagtgttggatcggacggcggctattgattcctactacgattttcgggtgggacccacttgtcagtgacgaggaggaggtggtcgccgtccctgacgagccgcgcgtcgtcgacgtcggcgccgccgctcgtcaccaccctcgtcggcgacaccccgaacctcgccgcgccgagctcgaggagaccacgcagcgtctccggcatgaacaccagcttgctgctgtgatccttcccgcctcgcgactccgggcaggagatggccaccctcaccagcggcggcgagctcgacgacctctccctctcggcggcggcgccgccgcctccgccgccgcccctgtatccgccttcgtgatggaacgcgtgtgacgaggagatgacgccgaagagggagttgcggaagttggccatccgctgcggcgtgctgcgcgcggaggcggcggaggtggaggacgtgcgccctcgccgagacgacgacgacggcgaggagtccacgccgtcgcggagcggcaccggcacgatcgccgacgccggcggtggcggccgagccttgcgcggctcgtggcgcgtcgccgacgcgaacgcgagctgcatgtcggcgtggccgccctgctcggcgacggcgcgaggggtgaggccgttgacgtcctcggcgtcggcgtcggcgccgtgctcgagcaggagcctcgccatctgcacgttgccgtcgaggacggcgcggtgcagcgcggtggtgccgtcgccggagcacgcgccggacacgtccccgccgtgccggacgatctccccgagcagcgcggcgtcgttctgctcgacggcgacgcgcgcgtacggcgccgcgtcgccgccggacaggtcggcgccggcgtccaccagcagctgcaccacggtctggtgcctcctgcacagcgcctcccacagtggcactctcccttctggatctgcacatcacttgatcaaattttcatcagaattttctttttcaaattacaatttgaactgagcatgaaaatagtataaacaattggagtatgcattcttgatttgaatttgaaaagcatatacctctcgaatttgaatcagctccattctccaacagaagcctgacacactgctcattcccattagaagctgctatatgctgtcaaattcagtaacaatacactctgtcaatttcagattaatttcacacacaaaacatacaagcttaaaacaaatgttgcatctaaagtttgaattaacaagaaatcattagtgtaccagagctgtgcggccataatgatcagattcattagggtctaatccacgcttcagaagctgatgcaacaagaagctatcccctttggaagctgcaaagcagagtgtgattgggaaatccatttggcccctggccaacatgtcatcgatctcctttgcgacagcaacaatggaggcaatttctttcttctctctcagatactaaacatcacaaggaagaagaagaagaagaagcatctgaatagatcagaattttcccctttctcgatgccgggagcggttttcgttgtcggaaaattttgcttacctgaataagattgttcatgacaattgtcccatctgcaatgttggactggatgatcctgaggaatgcggcccggtccaagcgaagaagctggcacagtgatcttgttcttgctgtgaagagctgaggcctgtagcacaggaccccgatctcgccgacgacatctcctgacttggccatccctgctagctgcagatcattcaaagaaaaaaaatgtgaattagcatttggtatttttgatgcatttgttcatgaactgattttgaattatggaaggtacagttaatacacttgcctgctctataccattatgaagctctatcaactcctgtaaattgcatcacttacattcatcagcaacaaccactttgccatttattttttgttacaagatcatcgcttagattttgaaaatggacaatgataaaacaagttatagggagtgattttaccatactaccagagactatgatgtagaaatccgcaggcgcttcattctgcagtatgatatcctctcgcggcgcaaagtactcagcattcatctctgaaaccttcactcagattacaatcacagaaaatatcaacaactcatgaacatccaacaagaattgaaacaataaacaaaactcacataatcacactgagatcaattaccagctgaaagatgagatcgtttgagacaccctcgaagaggtagacattctggacaaggccaaagaagagatggtgtgagatgcttgacttgatggccttgggcaacgcctcgaatgtctcctgctgatggagcccttctgaattcgtcctgaacttgaggctcagatgtgacaccatctgctcctgcagcctcgccggcagctgatgccgctgcgcgaagctcgtcgccgcttggatcatgtccctcttaattcacacaccaaaaaccacccaaaattcagacaagatcaaaaccaagaacacaccaagaaattaaccatcatgtgatgtgagtactagagtatactgaaccaagaaacaccaaagaattgctgctgatcaagaacagcaagggatcgatcaaagaaaatgagtgactactgacgaatttatgtctctcttaattcacacaccaaaaaccacccaaaattcagacaagatcaaaaccaagaacactccaagaaaccatcatgtgattcgagtactagagtatactgaaccaagaacaccaaagaatcgctactcttcaaggtcagcaatggatcgatcaaagaaagtgagtgactactgacgaatttcctggtgcggctggtgccgtgaacgacgaggttggtcatgttgccgatgatgtaggcggtgaggccgaggttgaagagcatgtaggtggtggtgaagaccatctcgccggtgttctcggcgtgcatgtcgccgtagccgacggtggagagggtggtgatggaccagtacatggaggcgacgtagcggctccagatgctggccttgtggaagttgggcatgtaggcgctgatccaggtgttcgtcgggtcagggtacctgtcggcgaggaggtagtagaagcaagccgagcagtgcaccgcgaacagcgtcacctgcgccacgacacgaggaagaagacgacgtacgagtacgacgacggtgacaatttttttctgaagattgaaatgttgaggattcttcagattctgaacctggcgtaacttacgcaaacgagcttcacgcatcgaacccagaagtagctgaacttcctgtccttctcgagactgaattcagatggaaagaaattcaagttacaataaattttgtaaaacaccgccaattataatcaaagttgcagaaaaccataggaatgtttgcacgtgacatataatgcaagtattatagttttaaagtttcataaagtcacatcgttaacgaatttgatatatacagatgtaacatttaaataatgaataaataactcataatatgattgtaaaactcaaaattataatagattaaagccaaaatgatctaacattgtgattttataaaattttacgtgtgaaaatctctatgattttgtataacttagagcataatactcgtggttagatgaaatttactcataatacttgttgttgcctcctagctggtctgccctctcccaccccgtggcagctggttccaggactggtgaccgtcctccagggcctgcttacctgagcacctccgcgacagcttcaactccctggtgctcctggtctcttagtgtctgtgggaggagcggaactctagggttttcgactccgctcactcttcggtctcagtggttctggagtccgtccatgtagaggaccatctgtagtctttagctggcgtcgccacttttagggatttgttgggagtctggcttggccccttcccactgcttggagtctgtttttagccgccatagtttctctaagctttagtttttccttcttttgctttttcttccttcccctaacataagccagtctagctgattgcgtcatgtaactaaaactctttttcttctaatatattgacgtgcaatccttttgcgcgttcgcgaaaaaaagaaatttactcataagatta

SEQ ID NO: 17465 - DNA, 5482 bp, Oryza sativa
cgcccctggagcccagcgacggcagcacgccgctcgagaagctgaaccgcgggctcgcctgcgtcgacgacagctgacgcgtcagctccgccgatcccccgccgccggcggcgccgctcaccagcgggacggcgcacttggtggtcggcattatctgatcgtcttcggtcgtcgtcgccggcgccggcgacctccgatgtctcgcgcgcgcgtcgatctctctgagcctctgatatctgcttccctctatccgaccgaacttgcaattgcatgcggcctcgcttaatttaggcgcgcgcgccgcgggagtggcgggagttgttaatttgttgtttgttttttaattaccggtaaattaattaagaggactgctacaaaacggatcccgttgtaacatgataggcatattaactattctcttacacgagtatcataggtatcagatttaggtatcacaggtgctgggtaacagatatcacagatatcgggtaccatgcagctggtactataataggtatcatgtataagatattgtcttgtctaggttttctattaatgataatagctgcaaggataattcatattttgatgatacaaatgggccgacttgggcctggtttacactgattcatcagattgggctgggcttttgacactgacacttcgctttatcttttcgtttaaacaagcattatgtgcttgctttgactaacatactcacgtaatgtattctccatagagatggattttcaggtataaaaaaaatgtacttctcccttctaaagtgtcaacaaaatatataaggaaaatttagaaaacaaataaacagccttggtacgataattaagttacagccatgcatcttgtagaaattagaaatgtagtgataatttgatgtaaagatcaatgaaagaaggagcaaatctggtagtgataatgactacaccctccgtttcaggttataatacgttttgactttgcttaaaattaaattgctttaagttcgactaagtttatagaaaaaaactagcaatattttcaacccaagataaatttattataaaaatatatttaattattgatttgatgaaactaatttagtattataaatattactatatttgcctataaatttagttaaacttaaaataaattgactttgaccaaagtctacgtctcttataacatcaaacgaagggagtaccatttttttttgcaagaatagtgacttaatttctggtgttatatgtgaatgcatttgggatatataattgagctctttcttatctccttgctaagctaattaatttgtgttatctaaaaatcattaatccaagcataaacatttctatctaaaacatgacttaaatatacattcagtagacaaactatctagaaagtacaaatatatatggtgataagagatcttgaaccaaaatttgtgccttaatatacctgaatgtataatatagtagtacctactaccttttcccctacacctgttccatcaaatgaagtccttttgcgctcatcaagaacagtggcatattcccacagcatacaccccactagtctccaacatcaatgacatgcatgattttaattggagcttttgccccacaaaacctctagtttacctaaaagtattttgatccactaaatccaatgctcatatcatagttgatcaggtttctcaagcaaactgaatgggatagtactcctttttggattcttgctctctttctttaaccaacatcagtactagctatatttatttgcctgtcaacttcatgaagagctcacgcaagaaggaaaataaatgtgaaaagtatctagaaaattctaaaaataaaagatttatagttagaaaataattgagaaatataaggatacagaattgagtcatcggtctttaagaaatgatcccacgcaggttatttgatagggtagaaaaaaaaagaaaggaagtagagaaaaggatgtggtttgttaaacgccggacaattcaatggacaacctattaaattattaatcttatgaatatattgtacgaaattaaataggtaaccgaattatttgtatatcatgtgaatatgacatggaaagttcatgcaatgatgcaagtatgtatcagtcgtttaatccattgacaaaagcaatttatatttaaaattcgagggattaattattagtttttaatcaaactgtgattttgtaacactaatagaaaaataattttttatgacgttggcctattattttcgctggcggccatacgcgaaaaccgccagaaaaaacatatcgaggggtgggaggccatggactgccagcgaaaaccgatttttgctggcggccaagctaagaggtccgccataaaaaaaactctatttttttaggcggacctcttaagtgtccgccagcgaatggcggtaggtaagaaagaccgctacaaaaaaaatttgaggcgaataaaatccactacgcgcccaccgcccagtccgtccttatcccttttccattctcccttcccaccgcccagtccgcctctctcccttctgcacctctcctccctcccttctccaccgccgccagctcgtcgcctctccaccaccgccggctgccgtcggcatagctccggccaccgccgcatacgaccgccgctccggccccattctcttcttcctcttccagctccttctctccctccacggagtgcacagcgaaggcagcggcgagctcaggcacgggcggcggttctcgggtgcgggcgcggcggcgactctcgagcgtgggcgcgcggtgctcgggagcgggcggcggctctagggcacggtcacggccgggcggagctcgggcacacggggagggcagatccgccgccgccgggcctcggggagggtggcaccgacctcgacgccgtcgaccgtgctacccggctccctcctctccgacctcgacgccgtcgaccgtgctcccacggctccctcctccgatcgtgttgctagatttgattttttttctttttttttgcgtgttgttccagatgatgcacatatttttgatctgtgtaaatgatgtttgatctgtgttgctgatgattttgtatttcgtatttgaatttggaaatgagcagcgaatctagatgtggatttgaattttgaaattaatgaatcaatgggcggttgcatgggtattttcactggcggctgcgcagctgcatgggtatttctttttgggccaaaaatagattttcactggcggccgatttaacacagccgccagcgaaaatccatttttgctggcggccgtcttaagccaacgccagcgaaaatagtttttttgctggtggtcaataaccgctagcgaagatctttgcctttgctttgtggcggctgcaaatttctccagcaaaaatccaaaatagccgccacgaaaaatggttttcgtagtagtgtaaagttcacagttgttcgatgtgtgatttttataataattggctgtagttttttaaatagtttaaaggccgtaatgaatctattattaagaaaaaaattaaagaggtaagcgatcgaatgaatatttgtaaatcattggtgctggctaagttggacgcatttcaagagtgaagatggtgtcatctgcctcagtttatctcctttttcaaaaagataggtagcattggttttatgtgcatggcttttgcataggtccgtttgaattctgtgtgcgccggccacacgaattaatcaacattgctggctcatgaatgatgatagctgcatctacaccatttgttgctactttttttttctatgactggatatcaattatctatcattgctcaatacgataatgataaatcaagagagagttgatctagtcagtcgcgacgattgatgtgaatgaatgaatacagttgatgtgctcttttttgtattattacacgaaagacagatatatatatacacaccaagataatatatatcgtagacactgacgaatatgtctcctaacacacgcttaaagagagataagaccattcacaacccaaaacaccagacatagtttccataaactctacatcatcaagaaactagtactagacaccactcttccaatgcaaacactactattccatgcttaagtttaatgctaattatctcatatgatgtcttggatgttgtgtagaaaccatgtctcatgcaagacatggtttccttttctttcattatttattcacttgccacattactttttatcctacgtggcagtttatttaatgttatggacaatattctaatattgggttgagaatggcctaagagataaatccctattccaataaaatcctattgaaagcgcacaaccaatgtcattaattaatgggattcaaaccctggtgtggataaagtcatgccctcatacctgaccgagctacatcaccggtgctttcttttaattgttgatgtactcttgatgagatgtcgatttcaatggtttctcaaggttcgactgcgaaactatatatcatgtacattagatatattacatcacatgcacatactcagtacgtgaacactatatattgatttgaatatgtacaaattgacaacgaaccttgctgtttgttcatgcatattgaaaaatgtacatatatacggtttcatctaaaaagaagaaggaattaaattatatcatacatatggctaaatttcgttccaatgttatagttaatacacatatatgtatacatcgctagttccctgcatgacagtgttagattgtgaaatgcgtaataatcagttgtccaaagatttgaacatatcttgcttcgatatatgatgatcgagaacgctgacttaactgtacatgtgcgcggtcctgcagcagtgaaagcgaacagattttataatgcgcatacttgcactgtcgcaatccaaatagatttttccttttagttttgattcgaattgcgtcccaacctggaccaattaatatttttgttaaatcctcgcgtatatttgtcgccattagactcgttcggagacttagtcaagggctagctagagggtcgttttaatttttaaacataagaaggactaacaaagatgctaattaattaaagggctagagggcaaccgattgtgccatatatggtgacaaaatttactgtattttgtagtctctcgggattttcttttattgttagatgagaatatatactgtttgtttagtgaaacactactttcataaaagaaattaaacagttttgattcaatcagtgcgcgtttgaccattatcttattcgaaaatttagtgtaaaaatgtaaaaatataagtcacgattaaaataaattcaatgacaaaataagtcatagcaaaataaatgatatttacatttttaataagttaaatagttaaacattataattaaatatcaacaatgtcgtacatttaaaaattaacatataacgaagatagg

SEQ ID NO: 17466 - DNA, 4808 bp, Oryza sativa
gattgacctctagtccagattcattgtactttgagttttttttttacagagattttggatggatgggacacttcctgctccctatccagattcgtactactagaaagtatctcctccatctaaaatcccttacattctagaacggaaggagtacaatgccacagctagctagctatagctaccactaattccttctttttgcatgtataccattgatgtaattgagcatttggaataaattgaaatactacctccgttccaatataaatgtagttgtgggtttccgtgttcaacgttttgactattcgttttatttgaaaaaaaatatgattagtatttttattgttattagatgataaaatatgaatagtattttatatatgtatgtgactaattatttttttaataaaattttcaaataagacggacggtcaaacattacacacggaaattcacaaatgcatttatattgggacagaggtagtaattgtttagaaacagcccggataaattgtacggcaaattatatatttagttaatcgcgctaactgtaattaattaataatttgagtccaaagataactaactttttcctttagcccgccatcccatcttgtagtttaggatggaggaatttgaaaacaattgtatcatcctctttccttatagtgatcataaatcttatctgatcagtttgctagatgaatggtgatacatgccgtgacgaaaaatctagacatatactgttgacggaaaaaaatatgcagatactccaaaaaaaaaaagaaagatagccttgcgtgttggtcagcatggctaacccaattattccatgaaaattgacatatagtagcatgtaacatagtccatatgaactgaacttttgagaggggaagtagctcagcactttttacattttgactctttttaaaaacttatgttataaataaatctctaaacaaatttattttaataatagaccattttcacggtgccaaggtccctaacgccgaggtacaacgtctcagtgccaatactctcgttcccacaacagccaagacatagaagacatagaggagtcggtgccaaagagactcgcattgacgacctatttataagaagtgctgagtctatttgtaagaacaaatatttatattttttacccttctcagaaaatttattttacaaataggtacctggcaccaatctctttgggaccgatcccctccacgttactaacttagctacatgaggcgaggggtgtatatgactgtgttattggcgccaagacattgatcatggtgccaacaaaaaagaatacatttgtagaataagttttttcaaaggtctatttgtaaaatttatttgtaaaataaattttagaaactaaaatgtgaaaattcaggaaagtagctagtagcatactatacaccgtaccttccatggataggtcatgtcccatcaaatacatcaaatgatcccttcgataaaaagaaagaaaatatgggcatattaccatgcaaatctgaccaaacatttctatgcgacacatataccaaataatggagccctaacatatattcctacaggaacctcgagatcgatcgatagatagatggatggatatatatatcgacgttgttgcgtcaaatcgtccatttttctccatcaaaagttgagtcctttcgatcgatccatggatggcgagaggtgtccattggacgcatttcactggtccatgtttctgcagctagctagcatatcatatgcacttttgttttggagggagatggagaagacgttggcttcatggcgaacccaggaccagccatggcctctttaatttcttgtcatccatggggcgagatggccttttttgagcctcactctttccctcctagatgctccatcaattatggaaaatgcttatcccacgcaatagtgagtaaaaattgtgcttcggagcctttcaagaggtggaaaagtcgaggggtttaaacgccatgatagtttgattcgcatggtagtcattttctcagtcgccatcggatggcacgcggaaattggcatacgtgttgattatgttgtattgatggtataatcacgttgttttcatcaaaagtatattggttttgtagaagtatttataacaaagggtttaatttaatttgtaattaattttggtgtattatttatgtggttttatgaaagcaccgatagatttgcaaagggcatgtttacatccatttggaatagcaaatgccaaatgacaaatattttggtggcaaaagttttagtattgcaaaagtactagttagctggtgattagatgcatcctaaacttttgccattctagcactttttggtggagagagagagtggtcccaaagcactttttggcacaatttgctactacggactagcaaatagcaaatgacaaatatttaacttttgctactagtgtttagatccaaaatggcaaaacttttgccattttggaggatctaaacagggccaaagataactatttttggcacttgctgctccttacatttttacctattttacaatgaaactactaacaaattatgagatgtcacgaattatgaatcatgacgcagaagatcctgtttttttgttttcatcaacagtaaaatcaagcatatgcgtgtacattaattacttaatcaggtcagataatatggctctacggtcagataatagttatgtaactcatgtatgggtatgtttcttttaatattattttagtaatacaggacagatttaggagcgattatatcaccaccatgtgtaattgttctaaaatataaaaacttaggatcggatagaacattttctattatttgtcttgctcggtggtacctatatatagcctagcaaatgttccaactgagtataagctcttatattttaggctgaaggttgtattatcttaaaagaatctgaaattaacatctgctacctcagttcaagctccacataccgtctatgcgaccagacccatgataagaagttcgcgccgccgtccctacgaactccggccaccgtggccgcggccggggagcacggccacgctgagcctcgtggccgacgcatacagatatccgacaagcaagccaaagagggtaaggctgtgtttgtaagagcaagtttccaacactttctttttaattttcgcgcgcacgcttttcaaactgttaaatgatatgttttttttaaaaaaatttatacgaaagtttttttttaaaaaaagttatattgagcaatttctaaaaaaatttaattaatacttagttaatcacacgataatatagtactccgttctatgagcgcactttccatcctgctctagcgaacagtctaaaaagggaaaagaaaagtacagcggaaattatccacaattggcacagtactttcgatgggacatctctttgtgcgaaccggaaaacgtacccccttcctcgactcgtaaagatctcacgtgcatgacaggtgggtcccaccttaatcatggcccactggtaagtctcttaacgtagaaacgtgcgagtacgtggaggttttccttaacctatctatctactcctcgtaaattgagcggtagtatcctttaccctatgctgaaaataaagtccttttttcataaaaagcctgcaaaaatatttacatttctttttttttacaaagaaaactttgccgttgtgctctctgctaaaaaaaaaagtattttcaactgtgatggctatttaaccagtacctagaaaaaaattaacaaagctcctatattttagaggcaaattttaaatactactagcagtcctttccagcaagggagtgaccatcaccaatgaactttcttgtggccttttgggcatggatgcaaataaacaaaacaagatggccaaattttgatgaactacacttttaaataagcctccccttggattctggcctccctcggggagcgagcagcataatctccttctgctagctcactgctccctctcctatcctccatagcctcatcactctccacagcagcagcagcagcagcagagagtgagcagacagcaatatcatatccgcagccttgttcttgctgttctcactaatcaatcaataatacctctcttttcttgaaattttgatttcttctttttatttcctcgagaggaagaacatcttttcttctacttgtttgatggcagagacttgatctttgtcaatcttgtttggttgctcaaatcttttggtggttcagtttggttttttttttctgaacatttgtttgatctgatctttttttttcctttttctaatcgtttctgaatctcttttgctcattggcaccatcccaagaacaacagattaatccgcagtagatttggattaataatttaagatcgcagtaaggttagattaaaacttgctggattaattatctcgagctcaaatgctgaagaagaggtgtgatctgcaagctccctcacctctgagcagcgagctcgccaatggcggcggggggctcctctcgccgaggtcgtcgtcgtcgtcgtcgtcgtcgctgcagggcttctctccgaggagcatcttctccgtcgacgaccaggccaagaaccatccctgcgcgagcccaaggaacccgctgagcggcggcggtcaggtgaccgggctcgccggagttctcgtcgacggcgagggcgagcggcggtgctacgggaggaccggcagggtgctgctcgggatgatgcggctccgggtgcagctgcctcaggagagggtgctcg

SEQ ID NO: 17467 - DNA, 5738 bp, Oryza sativa
agctcgccgatcgagttcggcgtgaagaaccgggacgcgcagctggcgctgctctcgccggtgcagcggtcgccgctgtcgtcggcggcggcgaggacggcgcagggcgaggcggagctcgccgaggactacacctgcgtcatcgcccggggacccaaccccaagatgacccacatattcgatgacctcgtcgtcgagagctccgccgccggcggcgacgcttgccgcctcttcatgcagcacaggtaaaatccaaaaagaaaaaaaaaagaaactctgaattttgatgctctgaacatcgaaatttcatcgttgtaagtaactgagtatgattgattcacttgatatttttgctgatatttgatatttgaaaagatttggagaagtagtttgatgaaattctgtcggtttggtcagcattgagtgcattgtttgttgcggtttttatgaagtttatttttgggtgccttttaaaaattacttccatatgtaactcctgttaagagataatggaaatgctttttaagtatactagataagatcatggtcatactttattgtcaacctacttagtgcaaagcgacgtctttggctgcaattgtggtggtgctcatatggtctattgtcatccactccaataagatttctttttttttcttttcatttggatgaaagctaatgtaaatatagtttagccacagcttggtaaacaatttgatgcagcattgctgtcattgtgagccaatgagtgacatcaattgatctcaggttgcagaaatttgattgaattctggctcatttttttgtggtccctaactcaaacattgataggactgtagatctggggtctccaatctttgtcagtcattagttgccggccctgaaattttttttctatgaatgtgacgtttccttctccttaagttcaggatgagagttcaggatgagaatgagatggatcattagatgttgcctccaatattctctgctaattattgagtcattggatgcattaggccaccaatcagttgttttcttctgaattttcgtaaaacaatacccgattttcgaccaactgatcaacatatagtacatatttgattgaatgataatattgtcatgtactccattacgacaaaggcatactgttactatcaaactgcacacagcttttgcactgtgtgtttatcgcgtcgtgataaatagtatagtttactgattcaccattatttgcctttcagagatgagaaagccttctgcagcagccaatgccgctaccacgaagtgcatttcgataaaaggatcgatgaagcatcggatgtgtcatttaaactgaagaattgattggatcttttcttttttttttcagcctaaattttggccactacctgcttatgagttatgagtgagattatcattcttctacctaaattcttttggtttgaatggatgcatgtgttgtatgggtgagaaaaaaaaactagcagggtttggagagccctatttttgctgtataatcagaagttcagaactggtgatcatgagcaatatttgagcagtctttcctgctgcaaaaatgttcatgtttcatcaccacacatatgcagcattaccccacggtctgcaggttgtctccatgcatctcaccaaaaattcagaacagtgagaaatggagtacttagcctacatccttgtacccatttcccaatcttgccagctaaaatggtgagcacaaatgcaatatttatatgttgtaatcttcaactagttggaaattggagcaaagctgcagcgcagggatctgcacaactaaaaacttttgtaccaccaaatttgacaccataacatgtttttttttactgccaattcaaagcagacattgaagcatgcgggcatcgagaaatctcatcagcacagcaagttaagaaaacagcaacaacaacaataatagagaggatgaagctaattatgctcttaatcatccaatacatttccagacaaaaccaagaacaaacattgatcctgcagactgcagtgcagctgagcaaccatttgttcatatgccaattgtttttactctgcttgtttgatcgaaacagctactggaaacaaccatttattcggatcgaggatagtaaaagcaaaaaagaaaaaaagaaagacacagagttgctttggctgattgggcgaaagctctaggacctgcgaggcggcggggggttggtggagcaggaggagcggaaggcgtcgatgtggtcctggcacttggagcggtcgcccttgttctcctcgaggcacttgcgcagcgccgccacgtcgcacgccgccgccttcttcttcgtcgccgtcccgtcccttccgccgcctccgcctgttcccgcctccgcctccgccgccgccgctgcttccatgggaccctggtggtgtcctctgcagagatggatgagcggaaggctcgaggtcgccgggaggaggcacgccgccgccgccgccgccgccgggacgcgagacgcgagggggagagattgcgctacagttttcttttttttcctcttttctttttcttttcctttttatttttttaacgtgtgattatggtaagctagaggatttttttagaagtagtaacactaacatgaatggaatccattcaatttcaatggatacagcccagagaccataggtggagactgaaatttacaaatttgcaaactatttgctactcttataagtggtaaataagaatttgtcactggacacacatgttatagacggtaagtcgcaaattcttaattgccgcgtcttaaaagtggcaaaaggttaaatgcccctgttttgataccaattgaattttctcaaatactacattcgtccaatataaattgtaattctaatttgtttagcatatattaaggtttgagtagaaagactataatgtctcttattaaatggtgtataggtaagagtgaaatggtagttgaggataaaataggaagaaatttaaatgaaaagtgattaatgagatctttagtactctattgtaacaattattttgggacaaattcaaatcctaaaaatacaattattttgggatagaggtagtaaaaaaaaaacagagaaacctatactaaaacttaaagaacttctttggcatgaagcaatattatgaaaattttagaggaactgagccatttcgtgtgaaaattagtcgaagttcatgcgtctcaaaaggagcccttgtcatttcgttgcatttagtttccagtattaattttgttgtaagagcatgttaatttgattgttctttcctaattcctattagaattaattagtgctaatgtatgaaacaatcttttaacaacaataatatgaattagccaattgtaaaagtttctattctatatatattgttagatcatttttatctatcgatagattgcttcctagtctctactgcgtattgtttcttagtatgggccgcaaaagaaagtgtgttagtaatatcttttagtcgtaaaatttggggtatacaagtcacacagtttgagttacatgtaaaagtttactaatttcattcaagaatgagtttattaattgttttggagtggtcttaattttatcattctgtaaagaaatggaatatgaaacttcatacaccacatgcaaaattaaatttatagtcagggtacacagataggccgggcttattgttttgggccggcctactttaaacatatatctttaaagatagatcgggaacgttaatttcataacaggtagttaatcaacggtgtcgatagtgggggcaaggataattagggtttatgataggtcatcctatatatacatgctatggacggcgccacacacgagtaaacaaaaccaaggtaaacgataaggtctatgatagatctcaccatacaaaatcgatagaagagctagtcgtgtgcaaaggtgaagaaactaagaacaggtaagatctttttcttttttatcaagatgaaagttagatattatttgttttgttgaaaagtattagaagatttaggatttttgattcagcgaatacataaaactaagaacatgtaaggtgtctttctttcttactgagatggaagtaatatatatttgttttgttgaaatgaactagaaaaaaatagatttaggattctgattcagcgcttgaaaaactaaactaaaatcaacaaaaggacttcttttcacttcttttcttttatcttgttttgttgaaatctaatagataatttaagtttaggattcgggtctggcgggtatgaaaaactaaaaacatataggatctctcttttctattgagatgaaaataaaatttcatttgttatattgaaatgtaggagaaatttagggttccaacatagcaaacacaaaaaactaactctttcattctttttaaccagatggaagtaaacattcatttggttttgttgatatgtacttacttactccatcataaaacattctagcaatttctagctatgcatttgaactttatccttaatttgttttatgaaatttttgagaaaatttagattttggattccgatctagcaaatgcgaaaacctaagaaatctctttcattttttatcgagatggaaagaaaattttatttttgttttgttgaaatgcaacactattacttcaatccacaaatataggagtaataattttcaggtatgtatctggatatattcttatctatatacatgacagtgcccagaaagttattagactgaattccttttttactgagatgaaatcaaagattccatttgccccaaaaaaattacttaaaaaaatggatttacactagcaagtattaaaaatcctccatatataggagagatggagaagaaaaccaaaaagaagaaccctagcaagagggggagaaaaagaggaggaagaggggagggaagggagaagaaagtggaggagatcagcagcagcagcagcagccgcggccgcggccgccggaggatggcgccggtgaagaagtccaagaaagggaagcgcaagtccaaggactccggcaagctcaagatcgtcaagtatggcggcggcgcccctcccctcccccccgagctccgcggcctcgacaccgagtggtggtacaccttcctccacaagcactccgagctaggtatcgcttgttccttcccaagatttggtgcggtcgacgattctttaggttgattgattgtttcggcgtgatattccaatcttgcaattccaatctaggtctgagcgcgccgtcagatgagggggaggcgttcaggtatttcttcaggacgtcgaggaggacgttcgactacatctgctcgattgtgagggaggatttgatctctaggccgccgtcagggctgatcaacatcgaggggaggctgctcagtgtggagaagcaggtggcgattgccatgaggaggctggcgtcgggcgattcgcaggtgtcggtgggggcggcttttggtgtcgggcagtccaccgtctcgcaggtgacttggaggttcatcgagtcgatggaagagcgggctcggcatcatctggtgtggcccgggcaggagaggatggagcagatcaaggcgaggttcgaggccgagtccggtctgccgaattgttgcggcgccatcgatgcgacccacattatcatgacgcttcctgctgtcgagtcgtctgaggattggtgcgacccggcgaagaatta

SEQ ID NO: 17468 - DNA, 10243 bp, Oryza sativa
ccagatcaccatgatactggttatagtgaagagaagtgcgagcaagtggatcctaatggcaagataatgagagatgtcattacaggatatcttcaaatctaagaagcttcccattgaacttagctaagctgactggcagtactctggagttgcaagaaggcatctctgttcttatgtttttctcctcagttgtccttgttgtaatcagacctgctggtctccattcggtaaagattagcaatgaaataattcagttaggaattagctagctcaggagcaaactatctcttccttgagttaaggaaaaaatgttaatgtgttcatggtgatgacaatctccatcattttgaggtacaagatatatcagtggtcaattgctttgaatgaaggaaatcgcctttaaggagagtagctattcaactttgttttataaatgtttagatttgcataatatagtaaaactcatgctcgcatgttattaaagcatatccaagaaaaatagtaacctatatatgacatgttgagttgagtgaactagtcttggatgtacatcatctcattttcattttattgcaaggctattgttttctaaaatcatacatctaagtttgacgtgcctggtagtgttttactgaattcctgatgatatttgtgactgcatgatgttcattctgttttgttgatttactatttttttgaagatgatgtggtatcttgttttgttgcaagtgctttatgtgtaattatatctgggctcgatgtaaaactggttgcataatggttataaatcttgtccatgtaaaactgtttcccctcaaaaacacaagtataatgttcttaaagaatgtgattgaatatgcttcttctagttctatgtcttctggtctgctattttagtacattttctgcagactaatattctgccctttttttagggaaaatattctgccattttgggttggcttacctacagattcccggaaaggctaattcgcgcgtacgcgttggcggcgcgcacgctggcccactaaggcccatgcacgcacgagctgcgcttctctctttttttctttcttttttagccgccgtttcttttttttcgctgtttttttttccttccgtacggataggagaaaaaatcgtaattagtttagattagtttcctatttttactagtgattagtttactagtaatttttaaatcttaactttaaaattttcaaatttggacatgaaagttttcaaatctcgagttgaaagttttcaaatctcaagttgaaagtttcaaaattttcaaatctggacttgaaagtttttgaatcgagttgaaagtttccaaatcttgagttgaaaattttcaaatctcaagttgaaagttttcaaaattttcaaatctggacctgaaagttttcgaatctcgagttgaaagtttttgaatctgagttgaaaattttcaaatctcaagttgaaagttttcaaaactttcaaatctggacttgaaagttttcgaatctgagttgaaagttttcaaatctcgaattgaaagttttcaaatctgagttgaatgtcttcaaaatttgactttaaaatttaaatcttaaatcaaaagtttctaaatctaactttaaaaaatcgaaaagaacacgtaaataaattaaaatgtgcagaggagaaggggcgtgacaataggagaaaaatcaagaaaaaaaagagagaaagaaacatataaggggaagggcgcgggccgtgcgagtcaggaagccccccagattccctttctatgtcttaattgcggcaatgtaaaagctgggaacaaaatctggttaaccaacatatatgatgatactcatcagaaggcatactattcaaaatatattaaaatgaagaaataagaggcatactaatgactgatctaatacaaggtcacataagatctagctgctgcaaggtaagcaggcgacaatagccatgaaaatgaccttgtgcaataactagaagacatagaacaaggcacaagtagggatgagcacactggccattaaactcgctgctttctttgagtttgtggcgcttgaggttttgttagatcctgcacttcctgcatcgaattggatcagcccagtcaggtacttgtaactaaatttcacaatcatctagcaattagcagagtacttgtaactaaatttcgatctattatttaccctaaaaaaaatttcgatctattcgtgactttacctgcaggtggtggacttggttcatcctcgtttgtctctgctggctcatcagctaatgtaggtgtatctggtgctggaggtggagttgggacggctgaaacaaatcatccacacattctggttaatcttctgagcttaagatcgacatgaactgatcatcatctgcatttgattgcgagatagcatttattacctgtgcattggctgattggtggtgcctggaccttgcagacaccagggagctccagcgccctcgtgtggttgatggagatgccgaaggacgccgcgctgccatccaggaccatgcagaggcaccgggggtcggactggacgacgccagcgagcgtggtgcagcaggtgaactcggggatcggcgatttgccggagatgtaatccaggcacggggagagcgtcatcatcacgctggagcagccattgttctgcgatgcggcacgggaagcaagcattgtcatcaccaccacaatcaccgccaccactggagcccgtgggacgccggtctgcgactttcttgcagccattgtcagctgccgatcgatggtccctccctccttccctccctcctcctcgacgacgaacaatacaatgccggtcaaatcaagaactgattgatgtatgtctctcagaaaaaaaaaagagtaaaaatgcttttggggcatcaggtgagaatggtttgtgaggatgttgatggaggatgagatcgttgtatgctgcagccactcgtgccggaattgaaggaatgctgtgccgggaaagtgcagggatgtgttcttcctggccacacagttgtctggccatagtgctaatgaacatgtatgccattttactgcagtcctctatttatggaaagaatttgatgcatatgcagaaatttagggggtgttttggtctggttttgctccaatttgggcacagccttacccttttctctcttgttgtttccagaatcagcattagcagactagcatgttgtgacaattatagacagtgaagaatagtgaagaaaacctgtcatcatcaagtgactattttttttttcttttttatcaattttagtgactgttttttttccatatgtatacttatcgaacaacatgtttaagtattttccttggtgaaacaaacaattgtttagtgaatcatacaattgtaaaattaagaaaattctaatctagataactacagaaacatttataggtgaataacttagaacataatttgtagtttggtgaatcatacaaatataaaattaagaaaattgtaatctagataactacagaaacatatctaggtgaatcgatacaaattaaggaagaaaccaaattaaatgttaataagtaagagtaccaaagttcatcttttttttaaaaaaaaaacactaaagttggagtaagttttggctctccagaactctagattgacactaaacaagagtattcagatgactagtaacttacaacttcaaaagttgaaggtttaacatgtatatttattcctaggacatgcctgctagctgtccctcttggaagaaggacgcatatcactgttcttgttggaatattagtgaattccgatgttgtttttgttgttaggaatgcgaattaatcggtatttggagcacctaatattccaacacgaagaggaagcatcttgcctaccgaaagtgcatgcatctcactgaaaatttcataaatatatgtccaattgccaacagttaatcaacaaactaatgccaatacacccaaacaaattcatcaaaattcgtatggtagtctctgtacatctcaccatgcaaaaacattgatcatgtagcaatgtcattagtcatcatcatcacctgtccaataattagttagagctgtcattaggaagagttggtcaccaacgacatgcctaagattccatcacttcacactatataaacaccccaacttaaacacacaatctcacacaccatcaagctataatccgatcttaattacatcattagccagctaattaagtatatatctagcttgcttagctagaacacactctacagctaagctagcaatggcgcgcaataatggcgtcgcggtgatgttcgccgccgtggtcgtcgtcgccggcgcgctggtggcgggggcggcggcgcagagcgggtgcacgtcggagatggtgagcctggcgccgtgcctggactacatgcaggggaacgcgtcgaggccgacggcgtcgtgctgcgcggcgctgtcgagcgtggtgaagtcgaggccggagtgcctgtgcgcggtgctcggcggcggcgcctcctcgctcggcgtcaccgtcaacaccacccgcgccctcgagctccccgccgcctgcggcgtcaagaccccgcctcccagcgagtgcagcagtgagtctctctctctctctctaagatggttgccggagtttggtcaaattcaaactgctttaaatttgtaaaaaaacatagtaacattttcaatctaagacaaatttattgtgaaaatatatttaattattgatttgatgaaactaatttagtactccctctatcccataatataagacgtgcacacattacaatattcaaatttaaaaacgtttgaccaataattattataataaaaattaaaatttattgtttaaattatatcattggattgacaattaaatttactttaagatggttataaatttgttgcaataaacctttataatatatgaggaattttaaatcaaagattagttttgaagactgtgtcaagtttaaccatgcgttatattataggattgagagagtattataaatgttattatatttgtctataaacttagctaaatttaaaataatttaattttgatcaaagtcaaaacgtcttttataactgaaggagtattactatcttcttccatttctctggcgagcctccgccgccgtgggccgtagagtgggtgactgaccgtcgacggacgactacgttgtgttgtgttttgcagaagtcggtgctccgattccgtctccggcgccggggggcgcggcggcgccgaatgcgccgccggctgcagggaccgggtcgaagacgacgccgaccaccggcgcgagctccgccggcgagagcgtcggcaaggcggcgtccgttgcgatggtgatcgtgtcggctgcgtttgcaatgttgtatgcttgattaattagtttaatttctgcgtggattaattgagcagtttgattattgtttataatgccattgatatatactgtgtgacatgtcatttatttcttcatgtattttaaatttcgattattattatattcattgtatgatgatatatcatttgttgaataatatattcaagtgctttgcatttgtccggtacgtttgggtaattcctgatgattactgcaaagatttcaagtttctttgtggatggatctccttgttgtatatggaatccatttccattggtctcatattgttctctcctcgttcaagcacaataattaatttatttttaaattaaatatccgaaaagaatgaacttcaaaacctggacacttttcagcgtaccctaatatatcaaagtgttcactttataataatgaaataaatttccaattgaaaccaatggtttgatggacaaattcctgatggtgacaggttaatttgctggtgtgagattgattcaaacgaatttgatcttatggatggagatgtttttgtggcagctggttcatcttgttttctttctaggaatgtagtaataagcaaattaatggcattcatagagtgcttgtaataatctgattttgaacagttaaaatagatggttaccttacaatttctacaattagttcttggttaactaactgaaatataaatatttagttcagagaaggtacaaatttcagttagcaagtgggactaaaatatgacctttgatatcccagaatcttaataacgaaaatctctgtactgactcatatatagtaatgttgcatattctttctagtcaaagcacaacatattatgccaaaaaaaaatgtgcttatagttggttaattaggttgttggtgagtagtatcttgcatatagttagattggtctggctggccaactccagccaaatgctacctcccaattcatagatttttaccggttggcatatttggttcatgcactatgttctatatgtatatacgcagaaggagaaacgtcacaagtgcaacgacatgattactattttgaattgttttgataaaaactgcagtctcagtcaacaatgtaaaagtaagtacattgtaatggatggctaattaataaatttacgattcacaagcaaaaggtatgttggataactagtggcttattctgtcacatcctgatttttgtttcagggtttataaattatttaataaattaataatagaatttatgttaaatgttctttaatttacaagtgaagtaaaatgtgggaaataaaatttcctaaatataaagcatggatggatttaatttttgttaaattctccatggttaattatactctctgaaattttctcggatttttcagagctcaattcttaaataatacaaagaacagttcagtaattatttgatcattaatgatctaattatatttgttaagtgcttttcttgtttaaaaatccttaaattataaattgttgtttaaaaggaattattagaaattattttaaaagcctagaagagaagatctaattttaatttgctaaatctcaacataaaattgggctagataaaattttgttaaatactttgcttaattctataattcctagatttttctgggatttatttgagctaaggaagtatttttaataaatggaattgcatttcataaataatttaaattgaaaaaggtttttaaaagtcttcttttggctttgggccgaaagccggcccaaaacccttctctctctctttctctcggcccagtcggcccagtccgccgagccgccgctctcctctctctctcagccgctgacaggtgggccccgcttgtcaggttcgtcgtcctccttcggccgccgccgcccgcaaaccctagcgcgccgccgccgccttctccttccaaattcggccgcgtctttccttctccggccgaatcttttgaggggaaatgatcttctcgatctcctcttccttttctcttttggattcatcgcctaattcggtttggaaactcgatggattcgagatcgaatcggattcttctctctctcccgaacccgatctttccttctcgtcgccggtcgccgtgggccttcgccgccgccttcttgcacctataaaaggatccccgagctctcctctatccgccgccacctttgccttagcctgccgtcgcgtctagcgccgcctccgcgtagcccgagtcgccgccggtgccgtccgttgcccttccgccgttgttttggtcaccggtgagttcgcggcgccgcgctctacccgttggtgccttccgttcgcgtcgccgcgccgtcgttcgccggcgagcatgcgcgtccgagctgcccaagtcgccgccggtgctgacgtcatcgctgccgtcatcgctgacgtcatcggagccgttcgccgtgagtcggtcgtggaccgatcgatctcagccgtccgttttggatagggttgatctcggccgttcgtttccgtgagccgtcgccgtgcacccggtccaccgcaaaccctagccgctgacgcaataatcctccttttccttttcaaaaataattcattattgcgtcataattcaattaaaatcaatataaaggttttaatccgatttaatctttaaaaattcataactaattcatttgaactcagtttaatgtggttcaagttgcaaaagttgtataaaataaagatctacatattaaaattgtccataaattgaattaaatttatttaattctttttaaatgggctttaaatagatttaatcttgtaaaattcataataaattcatttgaagtcagaatgaggccgttcaagtctcataattcatctaaaaatatgatctacatgtttgtttactttatatgtactgtttatttggtttttattagtctttttcctcgttttgcgtgatagcttgtcgtttccgtcgttgcgaaggttcgcgagtgcgccggaagtattcaagaagattaattgaagaccgattattgcaaggcaagtcacacagatcctaaacataatcctttgagcatgttgatcctatatttaaattctctatttatttcaactgtgcatttattttcgaatgtcactgggtggtgtgaacctattcctttgttatggcctgtttgcattgattactttattccttgataccttgggttattataacttgactagttgagctatatatattggttcagctagatattagatatgattgctttgccatgcttagaaacattagcacacaattgggataactaatgtttcattatcacttatggttatatttaatggtagctcacgatggtcatcgtgattggttaattaattacttgccaactaaaacttgataatggtgggttgtgagcacatggttttgagagtcgtgctcatgacaattaaggaccggttcgcgagctactattgtgaaacattaatcgtgccaaccacaagccaacgtgggcaacggctttaccttttgtatagcatgattcattgcggagcaccagactgagaagtggcggagataagcccacgggggtcgctggggagtccatgcctctggtttttgagggggtgattatgatccaggaatggtgcactgtggtgagttgtgttatgcagagggtattgtcacagcctctattcgagtactttccagtatcgcgacgcatggtagacatgatgttgaggctgtgtcttgtgggtacagtggtacacctctggccagagtaaaactattcgaatagccgtgcccgcggttatgggcgggttgagcaatgtttttcgtgattagtctcacacctctcacaataagtattgatgttataactggtaataatttgcttagctcctggtttggagttagatctgtacagccgggtatggttgttcaggatggttgggcctgtacagcatgggtatgctgttcagtgttgattaaaatttctgattaattactctactgttttactactctaaactctttgctaaatgctgctttcgcaaatgagcctatactacgccatcctttggtatccttgtgcacttgcatatttgctgtgtggcttgctgagtatgtcatatgctcaccttacaataatcaatcaacctcagttgaagaaaaaggatccagaaggagaagacgtttggcttataccccagttgagctgcctgtgggagtggagccggagcttcgctagattttattttccgctgcagttttcttcttggtgaggacttagtgcctcttaagtaagtatttatcgttttagttaatttgatgaatctgtatattaaattgtcaatttgtgtacctcggctcattcctggacgaggatttcatgcacaaataagttcggaaattactagtgaatttccgggcgtgacatattcgctgatccagagtagaagacgacgatctcatgcacataatagataaacaatgaacacggatatagggagaggcatcacagctttattgatttctcatatgtggatacatcagccaacctctcaagccctctctctgtatatatacccataataggaagagtcccattaggatacgtttccatatatttggtatgaacccatattatttttggcaggagataatagtttcataccactcccccttgggcgaataccgcgctatacacatgtctcattaaaaactccatccaaaaacccagtgggagaaaaggataggagaaaagagtacatcgtacacgctagttatattgcacttgttgcctcgttaaaaaccttgcgtgagaa

SEQ ID NO: 17469 - DNA, 738 bp, Oryza sativa
cccctacgaccgccgctacgagctgcggaacaactacctcatgctcctcgtcgtctactccgcgtgggtgacccccttcgagttcggcttcgtcccggagcccgccggcgcgctcgccgccgccgacaacgccgtcaacgccttcttcgccgtcgacatcgtgctcaccttcttcgtcgcctacaccgaccccaagacgttcctcctccaagacgacccccgcaagatcgcgctccgctacattaccacctggttcgtcctcgacgtcgtcgccaccatccccaccgagctcgcccgccgcatcctcccaccggacctccgctcctacggcttcttcggcatcctccgcctctggcgtctccaccgcgtcggcatcctctttgctcggtaacctaccttctacgtatacggggagtttctgattctagaagaagttgcagctgttagaatcttttcaaataattcagcttttttatccatattctaataagttatagttatacaatctagatgatgaattagaggggaaactattttgatccctcgagggatgtccactcgtttgcttaaaaactatccaaatggttatgagaaattctagaaaaaattgacaacacacgtacaacatatctatacaactctacaaaattttaggtccaaactcaactcacacgttgagatataaaaatgacaaattcaatgtatgaatagtagcgcattgtttacatcagcgtcctc

SEQ ID NO: 17470 - DNA, 6573 bp, Oryza sativa
tacagctgaacttggagtgtcaatggagagatgtatccagcaaaaggttgaggttatcaaagacaaaagtgattcaccattgagaacttctataagcaaagttatgttggagaaatcggatcaaatgaagtctactgaaagtgatagtgttaaaatgaaggacatggcgattgaggtgaaagtcacagttgagaacttcagtgaagcaggtaaaccagcttcagcgcttgtcatgtcaaatgacattaatggtgaagttatggctaagcctaatctaacttgtggggatgatcaacttcatggaggggatgggacatacaaaaatagcatggaagatgacctagcttccagagaacctgttaatgcatgactttgcatttcctgctacaaaatgtttaaggtatcccatatcctagaatttgagctcatcgtttgataatcatattattcacatactaaattattccctgccctttttttgctgttctctctctcccccccccccacccctcccctccaaatggtaatgattttcttgacaataacctacttcaagctacaggcatgatagttttaagaatgctccaaatcattcaaaattagctgtagaacttgtaatataacatcaaagaattgatccatgatcatttgcaatgcttatgttccatgcgaatttactatcatttattctgatatattgatagatttctttagtggcctaataattcctaggagaaaaggactaaaaagaaatcctgctagaaaaccccatatctagttttagtttccttaacatggacaataacaaaaacttgaacataggaaatccattggtaatttctaattccatggcagttctctctttttttagttatattccccacttgttccattatcaaaaggaactttattgaatttgttttgaatccgtaatttctggactaagaactttgtcttacctttttatgcttacagtgagcagagcaatgggagggacgatctagttttctgcaagtagctgcctcagctcgttctccatggctacaacgaagtgtttagagttgcattttgcagcaatgaaatgctgatgtttcagaattttggtagtctgtcgatcatgggggctttttgttggtttagtaggcataagtagttcacaccgtaggacctcttatacaaaccccaaaaagtgggccaaatttttggtgtaaatacatgtgggaaattgctgttggcattttggtgcacctgaaatgttgtctgaagattgtcgatgaaaacagacttgcaggtagtgcctgtacagatataaaaatccatcctcatctgtttgactgttactctgaattttcattcggtttagaattctgaattctggatgggatttcagcatccagattgttcaccagctatggtcaaatttgctgtttacccataatgtgtcagtggcttgagtattcgttatccttcgtaaattctgctgtcttctactcatttctatcacctctgttcataaaagaatgaagcatatatttgaagaaactgaagggaaaaccagcaaacctccctcgttcagaaatactcgtcagtgttggtcgagcgatgaatcaaggaagaaaattctatgcggcggtgccgcaccggacagcccgtgcaacaccgtgtaccctagtgacgcgtgtccaatccctgttgcaacccgagccgatcattgcagccgagccgatgtccaatctcccagagctctacagtatcgagtcatatctaccggctgcatgtaaaatctaattcatttttttaacagtgctctatttgatgcgagatacataatgccgttacttttagacacatatttaactactcgttttatttaactttttttcatgattattatttattttgttgtgagatgttgtaatcactaaaaatattttatgcatgatttatatcttatgtatgtccacaaaatttttaaataaaataaatgatcagacgtgttttcaaaagttaatgagatcattattaaaaaacggagggagtaatatacaggggatttttctagggtaatatacattttactaaactttatcaatatgcctcaactggtcagaaattattttttcatttgaatagggttgggaaattccattttgatgacgtagaaatcacggtttgaaaagggctttgagattacatttttgttgacatataaatcacggaaagtttataaggctgcgttcgatcaactccaaaagagagaatttttagcgcacgcaaaacgagaaagcgtattagctcattattaactataaatttaaaaaatgaatttatttgaattttttaaataacttttatatagaaattattttaaaaagacgtattatttaacaatttaaaaaacgtaaactaccaagatgaagtttggagtagaagaaaataactaggcctaagtaataatcttgcttcgataatcatgttctggtaattgtttattggcacgagactgtgtaactgagggagacgtgggtgtagaagatcggcttggctccaaagaggcaaagatggtctcgggctgcaataatacatcggacacgcgtcaatagtctgcgtggtgttgcacagttgatcttgtgcggcactaccgcagagaatattcttccatgaatcatcaatttatttgatcgtacaactacatataataaatataaaaaagaagcatgcgtttaagcatgtttttttggggcgttgctaacttgcgcgcgctgcctcccccggctccagaagcccatcgggctttttttctttcttttattcgcgatttttttcctttttttcgattttttcttttagttttttctatttttctgattactttttttaaaaatctttagcacacgtagtttttttaaaaatattttgagttgaaagtttttaaatcttaacttgaaaattttcaaatctgatttgaaagttttccaatctcgagttgaaagttttcgaatctcgagttgaaaatttttaaatctgagttgaaagttttcaaatcgaaggaaagttttgaagtcagagttgaaagttttcaaaatttttctttcaaattgaaatttcgaattgaaattttcaaattcggagttgagagttgtcaaaatttaaatcgtaagtcaaaaaataaaaaatctttctttaattactctcattatccttaactatttgaattagttacgttaaccctaagtcccgcgcgccgctggcgcatacgcgccagctagtcttctcgtgttttttgtcctaaaaccgcatcattttcagtccttgaagttgataaaaggaaaaagtccactttgactcccttaaatatacgtcgaatctaattcgtatccctaaaccgtaaaaccggataagacgactccccgaaatattgaaactagtgcaatttgactccctcagcggttttggagggcggttttgctgacgtggcgctgatgtggcgatgttgacctagtcttcatcccacgtggcgcttatgtggcattgaattaaaaaaatatctgtgggacccatctgtgattcgcacattaaaaaattgtgggccccgctgacatgtggggcccacatgtcatcctctctatcttcttcttcttccttcctctctctcccttctccctttctctccccctttctcttcaccttctctcttggcgcaatcggcggcaggggcggcgattccggcggtagttggagcggacggccggtgctccacccgagcgccttgtccacacccagcgccctcgccaccacctcggcgtccgcgtcccgacgctgctcgtctcgccgtggatcgagacgatgctaacacgggcggcgccgagggaggactgcctcgccatgctgctgaacccgccgcggctgcgggacatagaagcgggttggacacgccaccgccgccgccacccacctggccacctcctcgccggcgtggtggggagctcgacggtggggaaaaaaggaggaggaggccgacggtgggaggctatgggggaagatgctgcatgggaagttggtcgccgcaggactgcggggaggctggtggaggcgctcgtccggtggcggggtaggcgagcatggcgacggtctcgtctgggatggggaggcagcggagctccgatggcctcctaaagccagcgagggcggcagctcttcggggtagcagagacggtggggagcccgaagggtggcacgctcgtcaaggggaaagaggcgactggcggtagtggggggagagtggcacaatgagccaatgaggaattgctccgggtggcgttttgcttgatgatgccgatagctttgagtataagtaaaggagagaagctcagagccgactccagtggtggcgcgacggcgtggacgtggttcacgcgtgcgacggcttcttcgaccacatctccgtcccggtcaccggcgccccttcctcagatgacatcgtcagagctgcccttgtgtatttcgccttgcaccgcctcggagtcggagtcccgactgtacgagaaagcagtatagacatgttgcagcccacctcctacggtcgctcgtcgttccccacttcagccgttgtcgactaccgctgtcccctcagcggctgctggccaaggtgaagagagagaccgggggagagagatatataagggggagagagagggagggaggaggaataagggaaggagagggtggttgacatgtggggcccacatgtcggtgggtcccacctttttgtttgaatgacatgttggtcttacaaatctttggatttggttattattgtaatgccacgtaagcgacatgtgggacgaagaccgggtaaacaccgccacgtaggcgccacgtcagcgccacgtcagccaaaaccgttttcaaaaccgttgagggagtcaaattgcactggttttaataattggaggagtcgtcctatccggttttgcggtttagggatacgaattagattcagccgacaatgaagggagtcaaagtggactttttccttgataaaacgcctaggaaacctgtagttgcgtaagctgctgcgttgggccacagtccattaacccaacaacaacatattaacaagcccaagtaaaagcccattcaatctacaccctagatctcaatccccatcactcacagccgtccgatccactccacccgcaactatataacagctccgcctcctccgcgaaccggaaaaccctaaccctcgcagccgcatcgcgccaccgcctcctcctccccctccccctccggcgagagagcccgcgccgttgccgccgccgccgccgccgccatggtaagctccgttcctctcccgcatctcccctttgcagtggtctctttgcgcaggtgctaaggggaggaatcgcgtgtgtgtttgatttttgcagtcgctgatcgcgggggaggatttccagcacatcctgcgtctgctgaacacgaacgtggatgggaagcagaagatcatgttcgcgctcacctccatcaagggtgtcggccgccgcttctccaacatcgcctgcaagaaggccgacatcgacatgaacaagcggtgagcaaaaccttctcgcctcacgcccccccttccctgatctgggtgctagtttgtgctgttgatgatgtgctggaatggtgcgtggcgttggatcgtttggtgtgtgtaggtataacgaatggttattagtgttatcgggctaatttctagataatttgagcatctttgggtttgtagctttgtaactgtgcattttgaatccgaagttttgtggtttcgttggttctactgtgatgttaggtggatggatcatgcactagagttattttgttcgatagtgactgggattcagagtagggtttactggctggtgctttaatttctttgtcgtggattgtgtgatctgttacatactcttacatggcaatttttttgtgcataaggctgccgcaaagctgattattaactgtctgccaactaagttagattgcttggaacttttagaatttattttaacagcacaaccgttgtaattgtaagttatggatttattttttgctaacttgacaggggattcaaatgcctgctaattttgatgtgtttatatatcaattggcgatgatgttgattgcatggctgatcttttggctccagttaattgcctaatactgtgtttattctgacgtgatgtcacaaggtgtcagtttgttgcaactagtttcagttaagttgaatttgtgttctatttggcttaataggtcaggagttgtctgttactacttagcagttcacaattatgttgaatggtagggcatttgattagtttatattttctgggacgtcattaattttgggctactaagatgattagtctatttttatgctcgtttggaacctgagggtttaattagataaaaacgtgttatagttatcacatctatattttatttggtattagttgtttcatgctgcttggttaatctgacatgccatactgtactttgcttatgctaagttaatctgatatgactttgtaa

SEQ ID NO: 17471 - DNA, 4875 bp, Oryza sativa
taccaaacaaccaagttacaatatcggagtataaaagttgacaaaagcatcatccaacaaaactgcctatcaagactgacatcattaaaacgctcataagataagcaaaatgcatatttgctgtgctgatgggcatggaatttatctcttcttggagacaccgacagtctttcccctcctgccagtagtcttggtgtgctgaccacggacacggagaccccagtagtgacggagaccacggtggttcctgaattacaaaaagatatggttcgattacaattaatcgtagtagttcaaatgaaatcaaagcgcaatttgttcaactgtgagaatacaaaaagtactcggtccaaggcctcaaataacgaaagaatatgatttaaaccaagttcacaccactagctggttgagaacaatgttgtcaggatcgggatactaggtagtatcgttttgctcaaagtaatatcgtatcgtagtatcgggatactatgatattttctttttttaagtttaattaatatttatattaattatatatagccattctatataaaaaaatatagtaatgatatatgtcatgcaaatagagacatttatcgagagaaaccacgttggttttgatatatttaactgatttttataaaaatttgagcatatttatttatattattttcaaaccatgttattttaaataatattttgtagtatcgtagggatcgtagaatcgagataccacctaagatttcgtaggatcgtgtagtaatgaatagtaggatggagatactatgaaaattaggatactaggtgggatcggtatcgtttcggcttggtaggatcgtagtatcgtaagatactaggatacgtatcgggatactgacaatcttggttgagaatgactgatgacatgaacagtacatacttagctaggaatttcaccataacacaaatggatatatgatttaaccagagatgattcattcccatttgcccatgattgatgcagtaaacatctcactaaaaccgcacaaatttagctttttttttttacgaatgtaacaaagcatgaaacaacttatcagtgcaacaaaagcatgaaaagataaatctaccctacacatgcaagttaccatgaacctaaaaaatgtggtacgtgagcacaaattaatcagaaatcacctgatcttcttcagcctctcaaggtcatccctgagcttcatgtccagagcgttagaaacaacctgagagaacctcccatccttgtagtccttcttcctgttcaaaaaccagctgctaggaggatgatcacacagacagagaaaggtgcgaagagtgtcctgtagaccatcggccagccgttggtcatgatcatggcgagggccgcgagtgcgaggaagatgccgattgttacggtgaacagaaacacctcccggtcccaggtaaaagatccctgaatcaatcggttaacatctccaatttgtcggtaaaatagtgtgcagtgacagaatatgtatagtcgttttattttccagaatggataatgacattttcactagtgaaaagtgaaaccaaagatgatattggaatgagccacgtcatgaaaataaaatgcaccgttggatgccaatgaggaaaaaaaaaaaggacaagcaacatagaccgtccgatcaaacaaggaaaaaagaacaatgcaacggaactgaggattcccgattcctgaaccgtaagaaggagtcactttgcattcagtgccaatcaatattggctctgtttttttaaaactatattactccattcgtcctaaaatataacaaactttggactctgacatggtctctgaaatggtactttgaccaacaatatctataaaagtaaaatatgttaaataaaaagagttgcatattatgatagtttatttaatgatgaatctagtaacatcaattttatatgattaatcttttttatttgtttgctatcaatagtcaaagttaaaataatttgacttgtcactatgctaaaaatgtttatattttaggattgagggagtagctttgatcggaagctagatactgctgctggatagcagcaacagcggtagaacggcgtttgggaagagcggtggccaccgccttcgtccttatgtgccttccgctcttcaccgccgccttccgctccttcccaacctctgatggacacgccgccctgaccacaggagagaggagggaggccgctcttcgccgctgcttccaaaggggatggattgtagcggcaagtcacggctcgatctcggcaatggcgatcgacagagaccggatttggggggtttcgactatggtggcgattgggcgccagcgaggggtggaatggcattgctgggaagagaggaactcgattgtggcggtggctgggttgactggggactgaaagagagggaatcgagcgcccgagcggcgacggccgacgcagaactcggcgatggcgaggaacggcatcgctgtggtgactcgaagttgtgggctcgcaaaggggatccggccctcgcccgcccgccctcctaccgttgttggcccccgtcccacgctcgccgaagggaagagaaagagagagagggaggaggaagaaggaagaagatagagcatgatacgtgggtcccatacatactcttttgtgaatgacaaataggtcaaacacttttttttttttagttctaatgctacctaagtttcatgtcaatgccatgtggaacgaagaccaggtcaatactgccacgtaggcgctatgtcagcgaaaccatcgaaagagtcaaattgcactgattttaatagttaaggggtcgagttatccgatagtgtggtttagggatacgaaacagatttggtcaatagttaagggagtcagagtgaacttattccggtaacataacccatgtctctacttcttgcgcatgctgctgctccatcagcctgtaatttgtatatgcgacggctacggcgagttggcgagcagccaagcacagagatgcttctgaacagtaagaaaacaaaccattagatctgaaaatctcctttagcacaaatgcagaaaaaaaaggtactgaaaatctatcgacaactaatatgttcctctcgaaacacagaaataaattcagaagttctagactttcagtgaagtcgggaatcctcaaatttttcaaagatatccttaagatgaaattcataagtactcattaactcttagactgatttagtaacttacctttcaggtaatatccatgacatatacggccccatcgtagccgctcggcatgccggcggcggcagagcactggagagagaggaaatgagagacgcaaagagacgagaagaccgaaaaaagtcctcttctcttattgcaccaatcctatcttcctataaagttatctcccactaacttcttaagcttgacatgcaaagatgccacatcatcatccactaacaagatgtcacatcatcatccactaattaacaagatgtcacatcatcatccactaacactcatcacatttaaacatcatacaaacatgctatatatttatagtttttataatttaagagcttttaaaatacaaacatgttaaattatcatccaacataattcacataatgtttcaatgtatatctttattatgttttatgatataaagtatataggtcattctcacttagtcagtgcttaaatgattaatctatggtccaaattatctttctctttttttcctctaattaagtcatatcacatcaattgtttttagtctttagatgattaatatatctccctacttttcttcttccataaagtcataccagcttactttttacgtttgaatcaccattctacatactatttaaatttaaattatcataaaccacattaatttacttaatctgatgttatctagctatcttatatgttattttttttattgttatcatactaaattcccgcagcaatgcgcggggtttcacctagtataatatatagcgatgccaacaactttaattattgagacaatttcgttattgcctctattttaatataattttaccctcggttttttaggttttcgctttttatccctggttttttaaatagacaaagcgtctaccctgtttttcaccgaagttaatggtgccgaaattgttgctgtaaagaaatagaaaagaaaagaaataatgattttgcaaattattgaattacctttatacccctagctattttgcaaagtaaggaagccaaatcgctgcccaaaaccttatctccaatcctcaatcccccatccctggcggcggcgtcccggcttgcaggttgcagcaggcggcgacgggcaggaggctccggtggcgtttaggaaacccggcggcggcggctcggccgggagggcgacgggcaggaggccgcagaggcaggcaggaagttgcggcggcgggcgcacggtgaagaggggaggccggcggctacgcgcaggaggccacggcggcggtcggcaggggctacggtgcgcggggagtaggaggctacgggccagcgacggggagaggtaggaggctgtggggctgcagtgacggctgccggagtgatcggcgctggagtggctgagcgtgacgcggtgcacgctgtgtagcctccgcactacgacggccattgctcctgtcgaccacggtgagtgcgatacgtgaccctgtatctgatactcccgtattttaatatatgacgccgttgactttttaactaacgtttgaccattcgtcttatttaaattttttatgcaaatacaaaaatacttatgtcatacttaaagaacatttggtgataaatcaagtcacagtacaataaataata

SEQ ID NO: 17472 - DNA, 1761 bp, Oryza sativa
aaaaacgaaaacctaaaaaataagggtaaaatcaatattaaatattaaagtaggggcagaacaaaattgccccttaattattcagtcttcttccacggtttaagtatagattgacaaaaagaaaatttattatggaaatggattacatcttcgacttctgtcataagacacacaaccataagtttcttaaaaacattattaaataaatcaaaatgagaaacaaagtgatgggaaaaattctcaattctcctttattattagctagcgttaaaccacatagatttttagctagcaattctaatggactacgccacctagaatggaattagagacccttggctaccgattccaagagtgtagcaccattgtgcgcagtatcatgctcctcatgtggtagcatcgtagaaaaaaaaatgaagccaatagaaagacatgaagataacctgtatacagttagataattgtttagtattaaaaactttattattacaaaaacatcaaattgcctaacgtacagcactaactccaattagaataatttttttaatagacctaggtacccctctaagccaattaacaaaaatatttttcgcgttacggggtgaagggatattaaaagcaaaaaaaaccacacatctccaaataaactaagcaacatgacactcaaagaaaacatgttagattgtctcttacgcatagcagaaagaacagtgtttgccaccccccccccaaaaaaaattactatatagaacaggttgtctatattgatcatccacttccttggctttcccaaagcaaaatctcacttttatgaaagttaatttttagccctgagaattgttcgaacacacataggattaatgtatcatcgatatattgtaaaatggacaaaccatcctacactaaatgtggaatggctcctctaatttaaccatcgaatttagctcgctcaatgagaatcgctaacatatcaatcataatattgaaaagtatatgcgacatttgatctccttgttgtaagcctttgtgcgtttgaaaattattacccaagtcatcattgacttttatacggacacttccccctttaaccattttagaaatcagtgacaccacggctgagaaaaacccttcatgtataatgtttgtcggaggaattactatttaactttatcataagctttttcaaaattaattttaaaaataaccccatcatatgtttcttgtaaaactcatggtctcatgtatagtctcatgtaaaaccaccaccccttccattatatttcgacctggtaaaaaaattgtttgggttgggcgtacaggttcagaaatgaatcacaaaattcacaatctcgatgaagttaacagaaagccaacacttacctgaagtttgatttcttcggttcttcacacattgtcggcagcgggctcaggaataacctgaacctgacggtgtcgacaaaacagtgagttcatcaacctgcacacaatttcaggctcgctccaccaccagatacatcccagtataatgagcgtaatcaccataagaatcggcgcgaacacaagggcagataatcctgcagccatctgaatgaatgggatctctagcatcatgatagctagaataagggaaagtctcgctgcaactttcgccaggaaatgcagtttaggacggtctgacatggtggtggttgcaatcgagcctgctgctagaaggatcatcacgcagacagccaggggcggatccacaatgggggcggaggg

SEQ ID NO: 17473 - DNA, 2006 bp, Oryza sativa
ccgtgtgaaagttgaaatagcacaatgtcaaccgtagcagcaatgaaatatgaaaacataacttccactagaaacacatccagtaaaaaattaggcttcagaatttgcggtaccaaacaaccaagtcaacaatatataaaaagtttgagaatcctgcaacgcacgatctatcttcttagacaaaagcatcatccaacaaaactgcctatcaagaccgacatcattgaaacgctcataagataagcaaaatgcatatttgctgtgctgatgtacatggaatttatctcttcttggagacaccgacagtctttcccctcctgccagtagtcttggtgtgctgaccacggacacggagaccccagtagtgacggagaccacggtggttcctgaattacaaaaggtagttcaaatgaaatcaaagagcaatttgttcaactctgagaatgcaattaattagcccaaagaagttagcagtccaaagcctcgacacaaaaaagaatatgatttaaactgagttcactccactagattcatcataatacaaatgaattatttaaactgtgtgaataaccgaaggcatgaacagttcatatttaggtagaaatttcatcagaacacaaattaaccaacaatgaattattcccaaattcccatgaccagttgttgatgccataaacatctcattgaaacagaacaaatttagctaaaatttctatcaatccaacaaaagcatgaaaggtatatgtacagcacctcacacatgcaagttacaaagctacaaaaatgtggtaagcgagcagaaccaaacctgatcttcttcagcctctcaaggtcatccctgagcttcatgtccagggcgttagaaacaacctgggagaacctcccatccttgtagtccttcttcctgttcagaaaccagtcagggaccttgaactggcgagggtttgccaccacagtcatgaggcgctcaagctcctcaggagtgagttcaccagccctacagagaaacataattgttagctttctcactagtaaaataaaagtcctttggttttgcacaaaatcatcaccatcttatgttttggttacaaagtcatctcggattaactaagcataagcaaagtacagtatggcgtatcagattagccaaactgcatgaaacaactaataccaaataaaatatagctgtgataattataacacatttttatctaattaagcccttcaggttccaaatgagcataaaaaatagactgatcatcttggtagcccaaaattaatgacgtcccagaaaagatcaactaatcatatagactgctaagtagtgacgggcaactccagggtcctggcctagtaagccaaatagaacataaattcaactgaactgaaactagttgcaacacactgacacctcgtgacattacggcagaaataaagacagtattaggcaattaactggagccaaaagatcagccctgccatcaacatcatcgccaattgataaacacatcaaaattagcaggcgttcgaatcccgagtcaagttggaaaaaaaaatacatccataacttacaattacaaaggtcatgctattaaataaattctaaaagctccaagcaatcttaactcagtttgcagacagtcaataatcagctttgcagcatagtaacgcgcagaaaatttctcatattatcacttaatccaccacaaagaaattaaggcaccagtcagtaaaccctactcgtcctaatcactaccaaacaaaataactcagtacaagatccatccacctaacatcacagtagaactaacgaaacaaccacacaactttggattcaacgtgtacaactacaaaccgaaagatgctcaaattatctagttttccctgattgtaagaaattagcccgataacaccaataaccattcgttatacctacacatcattccagaacatcaccaacagcacaaacgaacacccagatcagaggaggggttgggggggggggg

SEQ ID NO: 17474 - DNA, 2401 bp, Oryza sativa
cgttttctcatgggggcggcagtgtcacaccggtgggtgtcaccggatgatgtatatgtggcggcaccactggtgacagaggaagcagaggacctggatgactcagcgaaggcggggtgaacgaaggcgtcttcgttgggtggaaacgtatttatgtaatcatagtgcgtgtgtgtgttcagtgcctgtcatgtgggcctggatgagagggtttaaattatgaggagtcgagttgtaaactgtcgattatctaagaacaaaaacagaggagacaaagtgacaaactatccccaattctctctcgcgttcacaccatccggcggctcgcggcggccgaatcctcgacgccggcgagcggggtgttacatactccctcccactccaacgaccaacatcagcaagcagcagcagctcgatcgatcgaccgccatgagcgtggtgatcctggacctggacgagtcgacggtgcgcggcttcgtggcggacgacgacgccttcggccgcagcgtcgacgcgcgcttcgaggcgctggacgccaacggtgacggggtgttgtccctcgcgggagagggatgggacgacgcggtcgaaccgcagtcatcgtgcgccccctcttcctccttgcacggagtataatgcaccaatatggcgatgccaaccactttaattattcagtcttctgccatgattcaagaacagattcagaaatgaattcacaatctgaattttaattaattcaatcttctgcatggtccaagactccaattacagagactctcggaagtttttttttttaagactggtcaccgggggagcttccccacctgaattttcattaaaatattggaacagtacagcagcttaagttacattagagtgaggggaggatgataaaatgagtttccaagactctacaacagccctgtcagcgtggctcaatctttctgcccacagggctgcatcttctttacattttgcgataaggttatcaattgaaggtgatgcacccctagaaactacatcataccgatggttctagagtccccaaagacaaaggaagaagaaaactttgaagtgttttgcaggcagaagacctgttgggcgcagagactctcggaagtgaatcacaatctcgatgaagataaacaaaaacccaacacttttacacctctaattacattttgatagggaacgtactaacaaacctgaagtttgatttcttcagtacttcacacattgtcctcagcgggctcaggattaacctgaacctgaccgcggctacggcagatccggcaaaaacaggcgcacacgatgtcaggctcgctccaccaccatatataccccaatataatgagcgtagctatcatgagtattggcgcgaacacaagagctgacaatcccgtagccatctgaataaatgggatctctagtatcatgatagctataattagggaaactctcgctgcaactttcgccaggaaatgcagtttaggacggtctgacatggtagtggttgcaaccgaacctgctgctaggaaaatcaccacacacacggtgaaaagggcgaagagagtcctggcgaccggtggccagccgttggtgatgactttggtgagtgccgcaagcacgaagaagatgccgcctgaagtggtgaacagaaacacttcccggctaaaagatccctgaattgatcaattgacatttccaatttgattagtgacacagtagagatgaatcatacacgtgtatgatgctatgaaaaaaaatagtaagccattttttccccaaaatcgccagcacaatgagcgaatgactgaacagagtccctttttttttcccagaatgaatcattctgttcaaaaggataagaagctggcgaacctctgttggcggctgtgttgcagcggctggagcagattgtggaagggacgctgtagcagatgaagcagatgaggcaacttccccggagggacctccatggcccaggtcgcactggaggcgtgcgatgtgcggactgcggaggtgaggaggagagcaccggaagtccggaaccgtcgggggttaaggtgcggagaacgacggtcggctcgccgacggacggagcgagtatataggaaaatgaaataggatctgggaggaacatacgggagcacggcatactcatataggctctgcatccatccccgattcgaatccattcatatagaatgcttgtacgtaagagcaggttccagggtggaactgctgcacctactgagaatctgagggagaatatagattccatacaaatggtatacattatccaaactttgcttttctgtggccatttgaacaatcaccaactcagcatgcgtggaagaagtgctaccgcttatctcttttttttctctcctatataatg

SEQ ID NO: 17475 - DNA, 1953 bp, Oryza sativa
tttgttaatgctgcatatcgaaattgcattttgatattggttctttgacaactgtggagtagaatgtcaagacaagggcagctcatctgttgaagtatcctaatgcgaagatgctatggatcggtgaccctacatagctcagcactgcgacatggcagaggtacattaatataacaaacgccagttgtgtagcttcagatcagtatatcaagaacagagctaaatttctaattgagaaaagaaattctgcattgcatggcacacaactcttatggttcaatgtaaatgattcagtcaggctttgcatcttcctatagttcatttttttaaaaaaacaatgttctttgatgggtctatttgtaaatgcacagagcagatgcgctttgttcaaataaacaagatagattaggtcattcctaattaagaagttttttgctaaaattttttgagtttagtttaaaccagatggcagtggaccggaataaaccatgtgcaaattatacataatgtgtgtggtatccatgaatcttaggaggtagagtttctcactactgtcattgggagctgaataacttattcaaaagaggaagtgacctgatgaaataattcttagtagtagcacacatggatggtaggaaccattgattttttggtcatgtcagcattagttacatagcgtactgttttatgacgtttagtttgatttcaataagcccaaaaggaaattaacataaagactttacttttcagatgacataattattgtgagaaatcattttagcatgtaagaagaataccttttagaagtgtataaatagacgaaaataatgcaaatgttgttattctggcagctatgcactttttattatcggtgcgatgttggttagagatatgcaagtagctttatgatgagcagcttttaatccatttgtcatagatgggctagcaggtagccagtctgtgcatatccacaaagtgagaacattgagattcttagctcaaatgcaaaggatctgagattgtcctcttatccacatgataaaagctagagctcaagtgtaccaattcaagtcaaaggtcacattgactgtgaagtgaaataatattcatgtttgtaactgggaaaaatagtattgactagaccaagtatagacatgaaatatttccctctgtctggaacttgtcttgctttgatccatgctctatatactttatcctgacacaccaaatataaccacgatttgtcaccttccctcctgttctcttggtcttaaaaagagcgaaagattagctttacactgcactgcagccatgtatgcatgtatgttactttagttcacagatagagtgttaccacatcaaccgaaaaagatatatttctttaactaacaacctcttataaaagaaaacactctagtatcagcaaagaacatggatcatgtgatctgatcgtctgagtaactgatacaattatcctgatgtagtatttgtcaaaaaaaaaacattaggtatgcacaatcaaaaagcataggggttgtgcatcgtctgactgttgccctccttttttaatagatttgctctttcattgtgaacgcaatggtatatcaagtcctatccttttactctctttctctcattttgttttatctgtgaacataacaatatatcaagttataactgtttactcaatttattttctaggaaaactttgtttatttactatgagcatcaagacataaagattgtgcatctacatgacgagctgtatcaggggtgctgcaaggaaatattttgaggggaatgttactacgaacgtagcatgtacactaaagtccttatcaatgcatacaattgctatattgatatgatgtgcactctattaggagtggattcattttgatcccaaaatggccaaaatggacgctaagaatgctgagatgaatccgatgaatg

SEQ ID NO: 17476 - DNA, 3887 bp, Oryza sativa
tgcattcatttttctttccctaagacgtactctcaatattcatcacgcataaaccaaaatgaaaaggggaggtgactatcagaaatatagaaagggagcgtgcaccaacaccatctctgacctgatactcagagaaagtgtcggtgtagaactgtgcaattccctcctgttcatacttcctgtaatatacagtataactttgcacaaagatgcattcagagcgcgtgaactagctagactctgatgcttctcatctgatacatcattgagtaattacaaatattgctgaccaaatgccataatgacacatagatcatgacaccttactactaaagttgaaaagatggttggccttgctctagagttccttggcagattctgcacaacttgaagaactatccccaaaaaactatgtatttgcacagtaacagtgcattattctgagacgtgctgattctaccagggaactctggaccagatgcatgtactcacttgattagaaaggaggcttgttcttcttggagccatgtttggccttgaccatctggttcagggcctgcacgcaccggcggatcactcccatcgacttctttcccccatcaggtcgctttatcaccatagccaacgtcgcgctggaggcagccggaggtggagggagtttacgatcagcaatggctttcttgccgtttccgagcttgctggtggccttggcttctccgatgaggagctgcttctcttgtatcagatcctgaagggagaaccggggcacatcgttggcacaaggcggcgtgatcagcttcgtcttcgcagttttgcattgccccggggccttccgctccgtgtcttggcattggtgttgtgccttgagtgacttgtgctcttcatcttgatacttctctaatgcattctcttcttcttcttcttcttcttctttgcattgtttagctattttctgctcctcatcttggtattgccctggagtattctcctcatctttgcattgatttggcaccttcttgtcctcatattggcattgctgcactgtcttctgatcctcatcaagatattgctttggtgttttcctctctccgtcttgatcctggaatggtttcttctcctgctcttcatctagataatggtgaggtttctcctcctgctcatcatggtatcgattcggtgtctcctgttcatcaccttcgctttgcagctcctgatcttcatatggatatggtggctgaagctccataccttggcgctggaacaatgtcttcagcttgtcatcttgacgtagctgctgcaccagggacggcgcatgttgatcttgataacaaacgatgagacttgttgatcttcgtgttcgcctcgacatgccaggatcgaagcggcgggatttgttcacaccacactctgtggccattgtcagtggtttggggagaaagatcaccggaatgagcaacttgcttcttctcaggggtggagttgttataggttgcctgatgtgatcagtagatgcatagtacatactgggaataggtgatctggtaaaatgtccttttcagaggtaaagtctggtttggtcatttggaagatcagtgcctgtcctagtagcctttaatccctacaagaagtgaaattaaagttagtattagcaaacaagtgatcaatattctgccacaagcccacagacatctataatatttgttctgaaataataaggttctagtacatcaaaattgtattttgcaagatgacagtatatatgaatcacgcagcataaggaatgctaggaagaaggggaaaagttctgaaataaagaaaattgctgtgtatttgaagctattcccaactacctaagagcggaggaccagcaatatttggtttcaagcaaaagatttgactgagtactgacacatcttcacttgctttgactggagtcgttaacctaaattatttgtttgaacaaattacactgacacctcgcgataggaggtaatgcccagttccaataaatagcatttaagaaacttactcataaattggaagaattggttctgaagaaatactgagggcagctttcataagtacaataccatcataataattgtctaatatagaatgcacaggctacatattatgtcacagctcaacctaaaaaaagtattggtcctttcccaacattttacatctcagggcacgccaaagatattcatttacagagtcagtgatcttgcttagatgcagatagaactgcctatcttgcaaaccccatcgtccactccacggctattttatcgtgcttatttctatcagtcaactataaacgtccaatgcttggcacaagaggaagttttcaagttgaaatgaagcaacaattatgtgtatattacaactagcttgaacaggactacatgttaagtaataaaagatagttcagaaacataactatcctgataatatgctgaaacttggaacatacatggatccgggtttgcgatgattgctttagtggcaagtagcacctttgaaatagtaaaagcaggactccagccttcccttaaaatgcccatactcaagttaccagtggagtcaacattgcagtagtaaatccttgtcttgaaagttacctacagtagtgatagaacagttataatcacaggttgaggtcctctaatgctaaaatatcaaataaaattacagcagggggatctcaattgttccatgcttctattatatatactgtattgaaattccaactcccttcaatattgagaagttaatacgttcaactagaagagtaaagtattttaaatattttttttaattattgaaacgtcaaatatgaagccacaattatcagcttacagtgtttttcttattataattgtgctatcaactgtctacaaaacatgagaaaattcacttgctattgccaaattatttggagggttatagtactatcagcatcaatatgtttgccatgttgaaaaaaatcagatagtttgcccccgcgtcgccccccgcgtcgggcgactcgggcggcggaaccctagccgccgccgccgcccttccccaccccttcctctgccttgccgccgcctgagcgagcggccggcaaagccggcggctcgcgaggacggcggcggcggggctcgcggcggccatctcccgagctcctggcgcgggtggacgcaaaggcggtggccgaccggagcggcgccggcgtcaaggctcatggcggcggatccggcatcgccaccaccagatctggcgcgctcgcagctggatccggtcgcggaggcgtgggcacggcgtcggcgaggcgtgggcgctggcggccgcgacaggcggtggcaggcgcaacggcggcgtcaggcgcgacggtggagcaggcgcgggcggccgcggcaggctcggaggcgcggctgctgtggccggcggctcgatgcttggcggcgacggcagcggtgcccccagatccgcgcctctcggccggatctggaggatgggagcagtcggcgacggcggcggtggcagttggtgacggcggtctcggccggatctggacgccggcggcagttggcgacgacggcgacggtgtggtgacggcggtggcggcggcactgggccagcggcagttggcgacggcggtggcggctgtggtggctgccgtgtcatctggcaacggcggcggaagacatggcgtcgggctactagctgtacggtggtggagggcgacggcgcaacagcgatttgcagaggcggtggttggcgtcggtggcagcggcgacggcggctgtgattctggaggcggtggcgacgtcggcggcggggaaggagtcgggggcgaggtggctgggtgttcgggagccaaggctgtggtggtggtg

SEQ ID NO: 17477 - DNA, 2671 bp, Oryza sativa
ccggtggccagcaggggagaagaacggcggcggtgctcggtgttgaagacgggctgaggtcggggagaccggaggccgccgcctccgccatgctccccctgtgctcccgccgccgccaccctccccttctcccgcgtcgccggctgccggacatcctctccagccatgccccggtgaccgtctccccacccgccggccggctgcccatggaggtgaaaagtgagagagaaagggggaagggagaggaggggaaagagagagagagaggggtgtgacgtggcagcctgacatgtggagcccacgtgggtcccacgctgactcagccgccacatcagacaaaatcgggatcaaaaccaccgaaggacctaaagtgaacggttttgtaagttgaaggatgtcaaatacccggttttgcggtttggagacgatttcgtaactcaatgacaagtcgagggaccttcggtgtacttttcccttcagagtatagtactcgacatactgcggacatctgctcctgcttccaatcgttcgctctatatgaaatcagtcgtagccaaaatttaattttaaagattttttattgaagtttatttttcagtattaactgttaaatcgctaagaacatgtatataaaagttttactcaaaaatattattttaaaatatgtcgtacagtttattatcagcatatcccaaccaacgggggccagcagggttgttgatggtgatagattgatttgttcttgtgagattgatcaaacggattccatcttatggatggagatgtttttgtgattgctcaccatattattttctctgaattgtaatgaggaaattaatggcattcatagaggactagctagtctgatttgagcatgcagtcaagagatagttggtgaccaaaccatctcaataaatctatatgtaattctaggttaagtgaactgtttatatttagttgagaggaggtacaagttcagttagcaagtgtgactaaaatatgacttttcatgtcccagaatcttagtgacgaaaggctctatactgacttgagttttttttagtcgaagcacaacagattatgccatttttttgtgcttatattctggttaattaggtaggtgagtagtatcttgcatatagttagattagtctggctggccaactccagccaaatgctacctgccaattcatagatttttaccagttggcttattaggttcatgcactatgttctatatatgcagcaggagaaaatgtaccagtgcaaggaaatagttttaattacttgcaagtgtttaattttatattcatacagacgtcatcagtgcaacggaattctaatagaaaaacagagtctctgttaataatgtgaaagtgagaaaaatttatggcctgactaattgtcgacagatttttttttttttacattttacaaggcaaaggaggtactgtttgtacataggtgtacccaacctttcacccccttcattttttacttaaaaaatgtaaattcataattaaaaaataatgggtgccaaaacactttgtagagtaaattatcaatgtatgtttcatgttcttattagaactatatgtttcatgttggtatgacacccaggatgaactgtgtgcattactgcacatagttaattagctatcactactatttgtgaatctagggaaacactcgaactgcttacgcgtatcagattatcaatcggattatccgtgctacgcttttaaaactactccctccgaggttaaaagatattttgattttgataatagtaatatttttaacccaatataaatttattataaaaatatatttaattattaatttattaaaactaatttggtaatataaatattgctatatttgtctataaatttagtcaaacttaactttgaccaaagtcaaaacatcttataacctgaaacggatggagtacaatttttatgaaaaaacattcattgtcagaaatgcatagacaacctttgtcaatcaatttctttcaactatttattttattatcccataaagcaatatatcatccatcaactattatccatttctttgtctaattcaaacgggccataggataagacacccataggtgaaacaaattgaactctcctcaatatgttctcataaataatatgacataatgaatacacaatcaagaccaattaagaaaaatacatcaagaaattcatggcacactcaacacacacacaatacaattaaaatagtgtaaaaaattcgcaacacaacaatgataaagccgattaaggacacgtggacacaaccaaatcgaacggcttaaattaacccatgcagaaattaatcaaacatggatcagtgcaaacgccactgaaacgacgacggtcgccatggacgccgccttgccgacgctcccgccggaagcactctgcccggtggtggtggtcgccgtcgtcggagtcgccttcgacccgccggttcccgccggagtctcgcttggcaccgccggtgccgccggtgtcgccggcgtcgccggagatggcatcgggacgccgacagctgcaagaacgacgacgacgtacggtcagtgatgatcacggctgcgattcgccggaagaatggaaggagatcgacttactgctgcactggctcgccgaaggggtct

SEQ ID NO: 17478 - DNA, 2760 bp, Oryza sativa
attcctgcaccccttatatagtgtggtgatggaatctagcttgtataagtctttgagagattggtgacctactctttcctactaacagctctgattagacatttattagactgatatttaactaactagctactaacttagtaatataatactgacattgcacaacttgatcagagcttgcatgaatatggtcaattaagatgtacacagatgatgatttttcctggtccagctgttcaattatgggaggattggtacttggtaggttagttgattgttttggcagataggcatgtacctgggatggcagataggcatcatatgtatgcttcccccttgtatatttctatatcaaatttgcatgtttcctctctgcaaataaaaaggggaactagtgatcggcctaaaagggaatatccttagaattcatagtttgaagataaaattttcggtatgaaagttgggagtattcatatggccaaatcaaagttcactgctattaggaagtgttgactagtccataatcgaagtttgaaattaatcagagctagagatcgttttcaggtgtaataatgtgtggattggtaggttttgttgattgttggcatccaccatgagatgtactaattttggctggccttctcccgtaagatgtactcttttttttctgaatagttgaatagttttatgataactactcgaggtacgaacaattatatataactattacaaagttaaaagaatatactccttccgtttcaaaatgtttgacaccgttgactttttagtacgtgtttgaccattcgtcttattcaaaatatttaagtaattatttattattttcatatcatttgattcattgttaaatatactatcacgtacacatatagctttacatatttcacaaattttttttaataagacgaacggtcaaacatgtgctaaaaagttaatggtgtcaaatattttgaaacggagggagtatttaacttggatggcaagatgtaatatatcaccttgccgccgtctacttgacggcatgatctatttctataaatattttcgctggtaatatatttctgtaaatattaaaaaattaaaagttaaaaatgaaaaaaaaaaagtcgacatcaagtatatgcggcaaccataaaacacggccaaaaaggagggatgcaaaatagacttataaaaaacacaatgggctgccacctttgggccagcccggcctgaccgttgagcgggccgtgttggcccgaccgatctcgggccatgccgggccgggcggcccatttagccatctataccctcacaccgctcggtcaacctacgggatcccccgcgctgccggtggtccctgcgcggctgcgccaccgagcggaccaagcttatgctctgcaaggtgatgccggagccaccggagatccgtgctaccaagggaggaggaagtcccatctccgcgccgccgcggcgacctccacacccgccgacctccgtgttgttgagcctgcgctgccgtcggagaaagggcgatatcgtgctgtgaactcacggcgccgtaggtggtaggaggtccgacgacgagcgatgttggagcagacccaatggccagccgtgttgtaagcttgaggattactagtgttttgtacaccaaagattttaattcaatgatgaatgatcgtgaaccaggactgcggaatgacggttccgtaaattgggagtttgtgttcactggttgttttgtaaatgcataatgaaatgcctgactgagtgtatgagtgatattgctgaatgttcagcattcagttcaatcatatgctgcgccggtcccttcttgcggctgctgcgccggctgccgcaatccgcgttgccggagccatcccaggctcccagccaatcggacactggagtcccaattgcctattggaggagtcttgtatcttggagatgactccttcggtatcactggcaggggaaacggcaagcacatcctcatctacgacgacgttggttaacacctcccaggcctcaccaaaggtattccgtattccccatcctggtggctcctcctccctcatccgttccacaatcgacaaggtcagatttggtgcctcagtagtggagagaagacaagggtgctggccttgatgatttgatctgaatttttcattgatttgtctagttttgcagttgctaggatgtaatgcagtgttcttgtctcaaatctcaacttttcatgcttcatgctggactgtcatgaaggcgcagaggttttcttttttactgatttggtctgaatttatcctgttttctagctccaatttgtgttttcatcagactattttgatcaatttgaaattttcggaccttgccaagcaggccctgatgattatttttgaaatataacaatttcgtgtatctcttggagaattataccgctaaagcgaaattccaacctgaattcccctgttccaaaatagtctgtcccaaaagagcatcactgaactgtaaagtacatcaatggcgatgctaacagctttactggtgattcagaaatgaattacaatctcattgaaatggaaataaataaagaaacacgaatattaggtaatgacgtaaaattaaataattagaaggggtgatgcgtcgaacccagatcgtctagcgcaccaccttgtgtagttaaccggaaaagtgggaataaatcaaaacacaagtttcacatatgtaatgtaacatcgtacacctgtagtttgaaat

SEQ ID NO: 17479 - DNA, 642 bp, Oryza sativa
aatttatacttactacacacaacacaatgataacctattgcccagtatatgtacaaggcggcctgagcctatatttgggctcagaaactttggttgaggcgttttcacccctgtattctctgaacctgaaactaaactaatctatctatttcatgcacctctttctggagttgcattaagcaaaccacttggtaaccacatctctttggttatttcagcctcaaaccagaggtgatcaagacatgtgcaggaagcaataaaatgcaacttcttgccaagcagtgctttggagctacgagaatctaatccatgtatcgtgtcttggggtgcgactagatcttacttacagtcttacacctcatctgagtaggtaccttgagcatcggcgacatccttgctcgcattggaggtcgcctttccttttagttcactgcacacaagttgtgtcaagaggagcccagcaaggagagctgctgccataagcatcgtgaacacagcgctccaactactcgacgagatgtagcctgtcagcaatggcccaatggcggcgccaacagacccggtcccgtcaatgatggctgtcacagtagccaatgcccgggaatttccattcaatgagctgtgagtgccaaggtcagctga

SEQ ID NO: 17480 - DNA, 8688 bp, Oryza sativa
atctccatcacctctgggctaaccggtaagaagacaaacaccaacaacccgacagcaaccatgattaagctggggatggcaaatgaccagccccacccaaacttcagcagaaatgcagccagcagtgaaccagatatgttgccgacagaagtgtgtgcattccaaatgcccataatcaatcccctcttgctttttccaaaccagtttccaacaatcgcgacaactgaaggccatccaattgcttggaataaaccggcaatcatctgaatgaccaggaaatagtagaaattgtggatatttagccaatatccagcaccaaaaagggcagtgaacacagcagttccaaacatgccaattgtcaggaagatccttaaatccatgcggtcaccaagatgtccagcaaagaacatcccaacagaataaaccgcaagaaacgccacatctatctcaccaagcaatgctgagccatcaatggtgttaaacggcaaccaaccgatgttaagagtgttttttgtgtgcagtcgtccccatggagaggaccccaactttgtctgtggatcaagcacgctcttaacaatactcggtatcttcctagtcatatgaaagcaagtatacgcgacaaatgtaagcaccaaaacaagtgtctggtacgtccgtagcaccgtaatgcctccgaataatcgaataccaggaggtttcctactcgtcatttcatgagaatgagccatgagaacaccaaggttgctagttactgacaaagcagagacagacttcttggtccaagaatgattaacacctgaaaccatcagaggaggatgtaagtaagacaatggactaattgagacattgagtgcattaatttgtgtttagatagacgatcttagctacacatttatgaaccactactgcatcaagaaagcgatcatgctgttcaaaagacaagaagctactaatccaaaattcagccttacacagtaccaccaatcaagttatccatcattataaatcactgtctaaaaagttatcatgtaaacatgggcaaatttgatgatctaagaacatctcaaatttagtatttcaggaaacaaccaaattggcccatctatttacttggcaatacaaccagtgggccagagtgggaaaaaaaaaggaaatattctgtactcttacttctctagagcaaaccaagatcatgcgtgctacctgagaccttgctgatgcacaaaccactacaagattgtcctcttttttttttctcaaaaagtaggtaaaagctgcctttccagcttccatcttggtgcaaatgcgtcacttagcaggcaaccgacttttccttgactctaacaccatctttttaactattaaccaggacaagtaaaaaggcgaattgacctcaatctcatgaccaattaattatttttttcacaagctccacaaacgcaaacctttaactcccaaacaattccagtttcaacccaatataatcgttactactgaatattgtcgttgaatccacctaataaacttcccaaatcaacgaacaaaacgcataataagaacatctcgtctctgaactctgaactctggactctcctgtctcaaaacattgaccaaatccataaactccccctaaagctaaacccatttagcacgacatacaaaaatccacccaaaaataaccaaactttccctaacaacgaacaccacaaagcaccagattacccccaaaatccgctccacacagtacaaagaacaattttcctttttttaaaaaaaaaatcaagaacagggattggcacctcctccgcgaaggggacgacgatccgcgccgggcgggagagggatcggcgaggcgactagccggaatgcgcaatgggaaggaggaggatgcgtgggttttcaatcaaggagtaggggagaagagaagagaggagaggagttcttgtgctgctcgtggtgagattttttctttttttgccttcttttttttgggtgtttgggtggttcgaaggcttcgagaggggggaaggagggcaatttatttagacgccatgttggcctttttcgtaggtatttacgaccctgcccttggaccatattgccccttctttgcttctctctctttgcaaaggtaaactacgaaattgaccttgacatcaacaaaggctttggatttttgtttactttggagtattcaggtatctgacaccacaaattagcatgtggataatggtatatttgtccctttgtaaaaaaaatgagaaatatattttttggtgaaataagtgggaaattgttttgaaaccaaagtttaacaaggattaacttatcatatatggtattattttctgatggaaaagtttgctttgtcgcatttttttttagaaaaatgccgccataattttttataaagtgatagtttttataagatagtagtataatattttttccgtcccataatataagaaatttcaggtggatgtgacacattctagaaaagtaaatctggacaatggtatatcaccataattactacacatgctttacattaattagttaaactaagacatagagacgctgagagataaatagggagagaacaacatgcattggcatattattgcataagttggtatttcaatttttcatgcgtcttttatttgcttccatggtatctttgaccttaaataaagtactactagtccatatacatagtacttatatttacattaaaaatgaattgactagtattaaagatacggaccatgtgatgcacacgctgaaaattacactgccaacttgtgtagcaggtgcaccgttggccgttgctttctagttgtactagagtttgttccctttcataccaaaattagcccacccaaattttagcaacaataaaatttagcaaagttcaataatgccaaaacttttttttaagaaacatgttagagacacagatgcgctgcactcgcctaagcacattcgaattgaaacattgatccggtatattttgagattgacgaagtcaccgtacgagcgtctcgctatcgatggttatatcatctatcactgagaaaataattagtcataaatgcaagcacccatttttaagtctacaacttgaatctggataggatggttccaaagaaaaaaaatctaaccaattaaactacattcacctagtagtgtagaagtaaatgggtgctgtttgttttgctaccatgccaaatattcttgtatagtgttgtgtagcaaattgttactcccttcataaaaaagcaacctaggttactttttggataaccctatgtccagaaaagagatcacatccccttgtagattattattattttttttttgagcgagggagtaagtcttaaggtatactgggtggagacagacaagtggcagggccgtaaatacgccagtcaagtcaggggcagaatcgggaagcgagagagtagcgtcctgtttgcggccaaaaatcaaatgaaaaccagtcggccaagaaggaaggaggagggtatcccaaggaatattcggttcccgccatgggaattatacctcgcgtgccgtgtgcacgttccttccttccttccttcccgccgcgtcacacgtgtccggctcccagtgggcccccggccccggccacaggagtggccacacggatatggatgcgctatctttaaaacgacgaggtggaatgacttggactttcctcttgatctgatttggatggaatggttttatctgtttatctgttttaaaatgttgctaggaagaatgggatttagattcattgttctaaaataaaaaaaaaatatttatattctagatagcaatattttgcgcataatgaataagattgtcatgcacatgacagagagagaaaaaatggttttgggattgttccgtctgttttcgtgtacaaggaaatttcttgaatataaagagaacaggcagtggtcttttaggattggttgagaactcctccctcctcacgtaaaacggagcaacagattaacatatggtaaattaagtattcactccgtcctaaaataagcgtaaccataagtttccacgtacaacgttgatcgtccgtcttatttaaatttttttatgattatgcgtgacttatgttttttatttttttttaaaaaaaaagttaaataagacggataattaaagttggacacggaaactcatgactacgcttattttgggacggagggagtattaagtttaaatcttgaaaaatagattgatatgattttttacaacaacttttccatagatttttttttctaaaatacaccgtttattagtttgggaaacgtgcgcatggtaaataagtgagtgaggttgggaatctaaagtaaggtcggataaaatacaatgttttaaactgtttgaaaaacatgctaatggaaatagaggaaaaatctttataaagtaagaatggccatagtatttcagaccaaacaacaattcaacccaacccaatttagcacaatcaaacccatgctgaagttaccgggtcgcaggagggaagaaaagcggttgtgaagacacggaagctagccattgtttacaaatgtcacgtctccggtttccttctggacttgtgtatggacacatatgcagcagccacatagtggagtatgtcggaaattgttgaacatgagcgatccaaccaaatactagtattatactatactctctccatattttaatgtgtgacactgttaatttttgaacaatatttgactattcgttatattcaattcattttacaaatataaaaatttatgtcatgcttagaaaatatttgatgataaatcaaatcaaaataaaataaataataattatataattctttttaataagataaatgatgaagcattgataaaaagtcaacgacctcgtacgttacaataagtagattgttcagctagtattttgttgcgtcaagacgtgtgtttcgttctcttggagtcaaattttctggtacgtcctgacatcctgtaaatctcgatcaagactttctttgttcagattgatacgatacattcggatttatttatttattttgttcttctagagctcacatgaagcccactatggttggccacagcgttcacaatctcaataccagatcaaattccgcttaccagtagtaccgaaacccaataaaaccctgttaattatttttttgtcgaaagtttaaaaagttttagtttcattttatttgacataagaaaagcgagtgacttgtgttttcgacttggctgtcgacgtcgttaacaaacgtcatcgacatgacatgatatgtcatggcatggaatccgtttttctattctactaactccgtttctaaataagtgcagttttacactgtttatgtccagcgtttgatcgctcgtcttatttgaattttttctatgattaatatttttgttgttagtagatgataaaatataaatagtattttatgtgtgactaacttttttaaatattttcataaaattttcaaataagtcggatggtcaaaccttcgacacggattctcacagctgcacttattttataagggagatagtattaaaaaaagaaaaaaattggaagcagcgaagaaagcagaagtgggcggcggcggcggcgaggatcagcggcgcgccgctctacggcccgcgttatctggtggggcccacttccagctccacggcggatattctgggaatcatcccctcggaagatgctgatgctcccgtctctccgacgtggacagtaatcacgaaaacaaatgtaccagttttcctccgtctttatttttcatctcctcctatctatttcaaaataaatttactttttttcaaataaacattgcattgaagttacttatttcgtcccaaaatataagtacatactccctccttaaaaaaaaatcaagctaggtggacatgaacttcgttgtcctctgtgtttatcgtcctacgtagtctcatcctcacttacattttctttactagtgaatctaggctatcataataatctaaatacttatattttaggactgatgagtagtaaatagatgattttcttttaataatcactacatgcattggagtttatcctaattaaccgttgcttagtttcccggtctacgtagtagaaattataaggcacaggtcgctcgacttattatcactcttcaggctttaagaattgatttattgaatttttcatcatgcatgtatgccttggatttgactagcaatggatatgtcttaccttaaaagtattgttattgcatcagtcatatatgcttcaacatataaatactctctctaccccaaagtatcatgaactccgtcataaaggccctgtttagttcacacgtaaaattttttcaccctatcacatcgaatgtttaacacatgtatagagtattaaatatagataaaaaaactaattacacaaattacgtgtaaattgcgagacgaatcttttaagcctaattgctacatgatttgataatgtggtgctgcagtaaaaatttactaatgatggattaattaggcttaataaattcgttttgcagtttataggagaaatctgtaatttgttttgttaatagtctacgtttaatacttcaaatgtgtatctgatgtgacacgccaaaaaatttcacccctggatctaaacacagccaaaatctttagccaatactgtgaataactataatgtcatcatcataaagcactttcaaatcgaaaataatctaataatatcatacatatgataattaaactttcatattattagtttattagtaaaagtttataaaaaagtattttaaaattaaaaatatattatattttaggatagatgggtacttttcaagccagcgctattgctagagataacactttgttgtcattgtgttgacagcagctgatgaatattaacatggcgtgtgtagtacgggtgctacaaaagaatcgatcaatcggtcgagtgaattctctggatggatggatacaacacattgcatgcatggtagttgcttcaaagaaatggactcgtcacattcgtcagatagctgccagtgtacagtgtgcatgaaggagatgtgaagatcgatggtggagtgcaagagtgtacactactgtatttttcagaagaacataaaataaagagtgcactccactggaatcgcgagcctgcaatgtagagtatgcgtgttacacattagagatgcttttccttgatggtctccgttttgtacattattagtctttttaatttttaaaagtcaaatttatgtaagtacatgtaatcgagtttatagaaaaacaaagtgccaatatttttaacacccttttaatctaattaaactcagacactcgcatctggctatcagtttaaacttaatctaaagtaaagcaaagcgagagagcagcatttttctccatttaatttagttctagctccatccagggtttaccttatcgtttgggtcggggttatcgccaccccgcggtagcgcgataaccgcgataatcgcacgataattgtctaaaatcgcacaaaaatcacacccaaaaatttgaattcaaaactcgacggtttcgcggtttcaccgcgataatcgcacggtttaccgtgataaccgcgatattcgcacggttatcgcgggctgtgtagctgaaataatgtaaatgtaaaataaatagggtaaaaaaatcaaaaatacggttgaatatgtgtagaaaactataaactgagaataattggaagaatatgcaggatacttaaggcccaatatcctcttcctttttcaatttgtaaactatttttggttttgccctcaaatttgaatttagcttactctatttaaaaaaattcttcaccattagcaattacaaatcaagaactacatccatgaattttttcagtttttttcgatttttttctggaattttgaatttggtcaaaattcatccaaatcatatcgccggtttccctaccgtatccccgtgataatcgcgcgattatcgtgcgataagtaaaaccctggctccatcctgatcatgatagtacaccacttgagtgttaccactagatcgctccttggaagctgaaaccaggatggttggaccacaagctagttgagttggatgaagaaaacagaggccgcatcctgaactcgccctgatctgctctgcttttgttactggattattgtcgcggccatcatatatagcacttggcaattagcaaagcggacacaaaagacaagctcacaacgtgaggccaccacccaaaaccgggggcacgcgagtaccattaagtagttgattagtaaatttcataaaaccacacttattatatggtctaagttacacagaaaaaaaacttatatagatgtaaagtatcatggttttaaagttttgtaaaatcacaccattaactattcggatatatacatatattgagattcaaaatagttgtgctttcatagatgtaacatttatatgattgataaaaacctataaattgaaactgtgatgatagaagttaaaaatacaatagatcaaagtcaaaatgataaataatattatggttacgagtcacgtgtcaaaacccgagtgattttgtgcaacttaggccccgtttggcacagct

SEQ ID NO: 17481 - DNA, 3296 bp, Oryza sativa
aacctcctcctcccgttctctctccttctccgtcttcctcccgagccctaacaaatgcaggcgggggcattggcatcggcgtcgggcagcggcgggcggcggcgacggcaggcgccacggcggcggtgcgcggcaagcacgcgggaggaagatgggcggcgcgcggcgacgacgcgcaaccgatgggggacggcgcgtgcggccgccgggaggtgcactaccgaggcgacgaagctcggcgggcggagggcggcgtgcggccggcggacggctggcggagggcggcgcgcggccggcggagggcagggggtggcgggcggccggcgaagagcggtgggaggtgggcggcgcgcggccggtggagggcagcgcgcgcaggggatgggggtggccggcggagagcggtgggaggtgggcggcgcgcgcaggggatgggggcggccggctgctgggatttttgtttttattttattttcttttttttttgcagatctagagctgaaatgtagccaaacacttttgatgagtgtccaactctaactggagctagctcccactagagtaggagtttggagttaggagttggagtttggagccctaccaaacgagaccttacataataagcttgcataactctttaccctaaactaaaaaacgagctattaaatatacactccgttatagggaacatgtttgacggaattactagaaagtatacaacactctatcctcaaaatttttgaatttgtcacttaaaaatttatgtaaagcataaaactaaaaatacgtttaatttgtgacccacgatgtgttgagatatcaactcctaatgataaccttctgaccaagcaaatgttttccaaaaaaaatacaaatagttactgtcgacgtttgatgtcgtgattccggtatttgcatggtatggggatcgttggtactagggtatacgcgagactgaggtaaaagaaatggagacagggatttttttatgcatgttcgggcccctgaattgtcaggtaataaccctacatcctgttggccgaagccggtattgctcttattcaccataatcacaccagtacaatatttgggatagcctatctaactgttgtcgacatggtggtctgaaggtctgactcgtagttgacaacagggtagtcttcctcctcgaatccgtgcccggcgagatcagagatagcgcaatgtctctcttgtcaatatccggagataccgtaggggactagccgtgcctatctctgaagtcaatatccggcgtcttgtcttggcgtatgttggcttgtgtgttgatcttgtgtgttgatctatggtgggtgtgtggattgtctgttgattgtcccccctctcctcctagggggtcttgtatttatacccataggtgtccccttgtcgaagtagaactagggaaaccaatatggatacaatccgagtagtccttgtcgtttccatatagaactctggttgtctttccttatccggaactcttcctatatccgcaggttgtttccgtataggacatggtatgtggtgggtcctgccgagatttagtcaactactattaggtatgtggtatccataaccctgacagtagcccccgacttcgatgcaaatgaatgaattcgtattctcaaccacgcgcagatcttggagtaactgttatcgagctcatgtgaccgttctcggtgagttcagagataacgttagacttcctttatcagcctcgtgcgggcacctaaagggtttgtctgagtcaatctccgacgtcaaccaagaaagttcagagcatacgactaagtctcccgtcttgctgtaatcgagaatttggattgaagtcaagaaattttatctcgccaggtacaccatctcttcattccgtattccttgacgatatccaccaactgttctcgagtaatcgagaaggcgcagagtctgcgacggagccttgtcaacatttgtcgcactcgccttagtcgatcttggtgtagaaccatagagacatggagtcttcgataatgtcgaatagaattttcctgaaatcaatactcagaaaagaatattagatagaaatagcccccgagtgaacgctcaaagggtgacatgttataatatgtatggaaaattgaaaatcaaatttacagaccaatgttttatatatgagcgtatactcttttaccgacttcgatcagtcagtttgttgagttatacactctccctagcccccagccttgtcgtcggagaatcgttctaggaggataaggctcttggacctttgacctgcctcggttgaacaagcactgatcctagcccccagccgtgaagttggaaaacccaatttccgattacacggcttggttaatacgcacggcaagaactcttacacgaccagatattacatggtcttttgtctctacaggatccgacaaggtcttatccgctctggacgtccccagccgaagttcccttaggttcctcagaggtcttgtcaagacggcataaaaggacattaggataggtttcaacgctaggtgtcttttgtggtaagggatctctgggtaaaacacttggcgatattgtgcacctgatatcacctttgttgaagtagaggtaatgggagaatcgctacacctctggtcaagaaccaggtagtagtcataactcaaccactagaagtaaatgtataagaaatcgctacaatttactggttgaggaccagtgagtaggtgtctctcgatcatttgaagtcgtggtgcgaggactgctgcgttattgctgtagtcgtacctcgaccaatggaagttgcagtgcgggagattgctacgtactggttcgagaaccagcgagcgagtagaatcatctctcgaacaccaatggaagttgcggtgcgggagattgctacgtactggttcgagaaccagcgagcgagtagaatcatctctcgaacaccaatggaagttgcggtgcgggagattgctacgcactggttcgaggaccagcgggcgtgtagaattatctctcggacaccaatggaggttgcggtgggagagattgctacacactggttcgaggaccagcgaacgtgtagaattatctctcggacaccaatggaggttgcggtgcgagagattgctacacactggttcaaggaccagcgaacgtgtagaattatctcccgaacaccaatggaggtgctagagttggtttatatgtgcgtctcatgtggccagcatgactcacacacccaacttgtagcatatccggatgtccattcgcgatcatgt

SEQ ID NO: 17482 - DNA, 3615 bp, Oryza sativa
cattggtacatatatttctctccatacacttgggaatgtctcttgggtgatatgtgggcctcactctcatcttggttcatgtagtagggctccttcactttgcaattactttcctgtataattattggtgtaatcagtgtttgactttttgtgagaaaggcaactaaggaagaaggtcaaaacaatgggcttagtggtaaaaataatgcaggtgggggcccagcacacgttgcacgggcacttgcaatgtggggccgggcttgggccggcagttgatgacggcaggtgctcaagtgtatgggctgggactctttcggttggcaattgccaaaatgaaattttcagcatatgcatggacaataacaatccagggcctaccaacttagtagtatataggagtacttactagccatgggatgcaccaaccatcaaccacggtggtatatgaaaaaaagaaagaagaagaaaagaaagaaagaaaggaggaggttgatgaagttggatcatactacgtgcattatattagaaatatgcccttttcgttttttaaagatgacgccgttaactttttgacacacttttgaccattcatcttattaaaaaaaattatgcaaatgtgtaacatattaaatcatgcttaaaatatttttagtgataaaacaactcacaataaaataaattataattatataatttttttaaataaaatgaatggccaaacatgtgttcataagttaagtcttctattaaaaacgaagatagtacgatagtttggaaggtatcgatatactccgtacacccaagattttatttttatttgagagataatctattctatgctcataagtttactcttgctcaacgatttgacaccaaatttatttctttttataatgtctttcaagtctttcaaaaacaatatctaaaatacacttcaaagcgtaccaggattgcaaacaataaaaatatagagcctaccaacacagtattaatagtactagctatgtggtgacatatgacacaactagtagaatatagtatcatcaaccagggtgtagtgtaacggtatctggaaagaaaggggggaaaaaatagaaaaaggttgatggcgttggatcatcatacgtgcactattgcgtgcgtatggttatcaagtcaaaacgttggtttatactcgtgactacgcttttatcctctcggtatctttataaaaattatgtgtatctcgtggcactgatttgggtgtgttcgcaccttctggttgggaactctccctctctggtacgaaaaacgaagcagtcgtgattaattaagtattagctatttttttaaaaaaaaataaatcaatatgatttttttaaaacaacttttgtatagaaaatttttctaaaaaatacaccatttagtagtttgaaaagcgtgcgcgtggataacgagagagaggagttgggaaaactgtgataagaacacagacacgtttggaatgctgacagcggctggctgatcagccatatcatttggtttataagtaacttaaaaatatatataaaaggtttacctatcatattcacattgcttataagtaacttaaaaaaataatttagagcctcatcggttgctcatattacctaataagtcaaaacggtttatttaggaataaaagaataaaatttaatttataggtaaaacttttatatatttgttcatagtggcttaaaagccaatgctaaaaataaattacttttaaaatcaactttagaatcaaatccagaaatataaattttggcttttattttagcttattaggtcaatcgatgggactcttaataattcaaaactaaatatttcaaaataaactacgaattaaaaagcgtaaataaatattacaaaattaactagcaatttaaaagcgagtataagcaagatgatggaatatttttttcttagtggtgccgaccgtctcatgtttgtggccatacacttgtcgatcgcattgttccccaggcagcgtctcacgtgtcatgtcctacctttttaatttcaccctcactttttttgacatataattgacatataagttaattatcacgaataggtcgacgaggctattccacaacaataaagtacatggaaaaaaaatcgccacgaaattacacggaagcaaccaaaaaaacacaggcagctgaccaccccacaagaactgtatgcaaaacatgttcatcaacatttgcgagcacaggcgaaattccacaagtataacatgccaaaagtccaagacagcaattcagagaagatttagctctaatggcagacaagagtcttacaactttagcataattccatcgagccatggcactcgatggatattggcattgagtcctatgataaaaagagcagcttcaaagcatgcgtaaaagttaaggtcctttctttggtggacaagtcatacatgagtacatgagaccctcgctgctattagcagcacaaggaaacttactattgagataattcatcaaccaaacaaaaactggaaaagtcggtgcagcgcgcagcggattcatccccagcaaatcaccacccatccttcttcagcggcttcattttgccttctccttgtccttgtcggcagcttggggagagaactgctggccggtggaggatggtgagtagcccggtgcagtgggggagtagcttccgctagggctgtacatagggtagataattgagatggtgagaactctaatgaagccttgggttcacaggaaggatagattatgctgaaaaataattttggcccctttgaatcgtaggattgaaaaaacagaggaataggaaaaacacaggattttggtaagaatgcaagtgtaaaacagaggattgcaaaacacataaaaaatataggaatagccgtttgattagaccgcaggaaaaatgcaggaatcagatgagagagatagacttaaggaaagttttccaagagattagagtgaatgttaactttcctacgtttttgctctagaattgtaggaataggaaagtttactacgtttttgctctagaattgtaggaataggaaagtttactcctacgaatcaaaggcatgaatagtgtaggatttcaattcctttgtttttcctccatttttcctccaattcaaagggggcctttacctgtaattcggagatgttgggctataatctgggctgggccctccagatgtggtgtatgggctgaaaacagaaaagagcagcacattagaagtcatctcatcgtctcatatgacaaggaacattaaaggattactgcaatagacttatatggaacttatctggagaataccatatgcctctgccatggcttacagtcataggttattatttatattagttaatcttggcttcatttgaaacaattaactgagaaaattgttgttatttagcatcagtgttttgtatctagaactaactctacatgcataactcgtttcagttttcactcatcagttaacagaagtcgaattgcaactttggtcttttggtctacatgtcaaattgtcaataatggaaaatctttctaacgacatttctaggacggattttggattttgaaccaagg

SEQ ID NO: 17483 - DNA, 713 bp, Oryza sativa
tatatgatggagaagtgggactgtagctgggtgaagcaggactatatgatggagaagttgggctgtatcctggccctggactgtataccggagaagatggactgtaaccaccccctgacgatggagtgtagcctggtgaaggtactggtgagaaagccattcctccaacatatggcgagaactgagcatctgtaatggggaagccctgatgtttggacttagcaggtagctcggtgacatcattccttcatgatatggtgtcccagagatgggcgagcgtgctggtgtcatgccaaagtccaggccttcaacatagcttgggagttgaagttcgatggcctgctgcagcatctgatcattgagatacaatgcacagcctcctgtaccgataggtgcaagctggccaagcataatgttctcagtgacacctctcaggtagtcagattcagcatatacagcagcatcaagcaagatatccaccgtctcttcaaaggaacatctcataagaggccctgtgtcattacggttgataccatgccttgtaatagccatcagatgccctctgtatgtcattgtatcacaaagaatggccagatgtctgtaattgacataagaaccatcgaaagatatgaccacccgcagctcatccaagagagctcgacgaacagcctcgattccaagaacctcaattacttcgatcaaatggttacttg

SEQ ID NO: 17484 - DNA, 13323 bp, Oryza sativa
ataattaattttttttatctatatttaatgcttcatacatgtgtttaaatattcgatgtgatgtttttataaaaagttttgggaactaaacatgtcctaggtggctaggtagatgggccctcgattgtaattaaggtggcgtgcagagttgaggccgcaaacacaaagttaaataattgtctcctgctgtggaaaccggataacgcgtaaacgggttgctgacgccgcttaattccaacataattttaagtctcacactccacgtagtcatgaagacatgatgataggctgccttaattagctggagaagaaggaactaggcttccacgcaatcactcctatacctgtacatatatgcatgtcaacaatttgcaaatttaataacttaattcattttgtgcaaatataaaaagtttaccacctgtttcaaattgattattatcatttcaaccttgctctaagttaaaacatttttatatttgatcactaatatttagaaattcgtgtatcctaacaacatgtgaattatatatatattatgaaaatgttcttatagtgaatccaaaaacataaaaaataaattttaatatgctaaacgatataatatttttagaaattaatgatcaaatctataaatgtttgacgaattagaacaaagctagaatcataagtaatttagaatggaggtagtgtggagtgcaactatggagtatctaactaagctagtcagggtcaattagacggacatcagcggtgatcgatgcacggttgaaagtgaaagtgtgaccatatatatgatagatatcgtgtggcccatccagaagctacgcccacgcaagtatatataatacctccgatctttaatagacgacaccgttaaattttttgccacatgtttaaccatttatcatatttagaaaaatacgtaattataatttatttttgtcgttgcgagttgttttatcacttcaagtattttaagcatgaattacatattatatatttatataaaattttgaaataagataaatgattaaatatgtgttcaaaaggcgatgacgtacataatttattaagaaaacgtataatcctcatcatcatgtcgtgtataattactttccaagcaggcctaactagctacatgtagacttagtagctgattaaaatgaagcaagctggagctaaaatagtcgtgtgacgttgttgtcaccagcgatattatatcccatcgtaactttcacattggagttttctaaccatataatcgtgtactgtggtttgttaagaaggtataggtgactaatggtctgtttggtaggttaaaattctgagaagtagttggttggtagacattttctaagaatctagaaaagttaggtttctcagcttctgacttctagtgtattttttgaaatctacaattgcagtttcttaaactctgaaccaaaaactggattatttggaaaagcttctgattctgagagaatctgcagcagttagaatctcctctaaacaggccatactaattgcccactggactggacacacaatcatgacagtaatttgattaagggtgataagacacgcactcatgcattactggccagagatgatcgagtactcgaaaatgaggtgtgatgcaaactgcaaactggaaaattaaaaagaaagaaaagctgaatgaacgaactgggttggattggaaaaaaataaaatgaataaaatcggtagtgcgtgtaacaagctaggccactaaataaaccattcgtacgtgcatggtactctattaattaaagaaggaacattttatagagcgaaaagaaaggagtggtgaatcattcaggcatagtgctcgatcgctgcttgatagtgagaagcttacgggcggctgtgttcggtggtgggtatttacacggaaaacagagtaatccattagcgcatgattaattaatattagttaattttgttttaaaaatagatcaatatgattttttaagcaactttcgtatagaaatattttgtaaaaaatacaccgtttagcagtttggaaaacgtgagtactgaacacagccgtattaatgtatcaaaatatagaaaaatatcgctgtaacctcaaaacttagttgtctgtttagattcgtacttcatgatatgtccaattcaatcctaacttatttatatcttgaaacaaatgagcatatttttttttctaaaatctccagctgtaactgtctaaattgttaaaatttgtaaatataaaattaaaaaataaagtaaacattagacgctgagaaacttagatttcctatattcttgctagctatagctggtaaatttagtggcctagcttctcaaactgggccactaaattaccagagattcgtggtcgatcgatcgatatcgtgacttccatgacagcaaaaagcaagcagaatcacaaaaaggagctaaaattcgagtttgttggcctgcagctgccggatcgtcgcatccaagttatctaggaatcaaatcaaaagcaggcaggcagcagagagattccagctgccaggagaccatgaacccatgacattgatcacatatcgccgccggcgaccattgccgtcgcggtctgttgagctgtgatctaaattcatttgcatttaataaaggctagcttctgtcgtagtggagtggaggcccgtcgccggaggctttggccggagcgtagcggggatgcaggggcggagcctccgcgaaacggatcgtcatcccttttagggttccaccatatatatatctcttgtaagccgccgtgcggcgatgtaacctcaccccagatatagtgaagatattttgctggctggcgctcgtggttttttctctcccgttttaggagggttttccacattaaaatcttgtgtcttctatgattgatctattgttttttatcgtttgttcgcctgtcatttcctaacaccgtcgacgacgacgatcggccggcggtcactgttggatcgatcggtgcaaattaaattaaagcagaggctgagcatgtacgcagcctactcaccacaagccatgcaaagcaacctcactcgcgatcatgcttgcacacacctgtaatccaagctactactactgtcgacacaaatgcttggccaattcttcttctgtttctctttttccccatcgttttctgcttcgcttttttgcagcatctagttcatctttctttctttccttttctttcggagcatggatacagagaagcagaacacctaccataatgtattcgattgttatgccgtgatgggggaagagccatgagaattgtggaaaggagatagctaagtaggcaaccactccctttgtttctgtttttttttctaaagtagatgacgatgttgattactggacacatgacgttaaaccagtcgtcttgttgaaagtttttatatcaatacataagatataaattatgattaaagtatttttttaataataaaacgacttacaataaaataaataataattacataattttttaattacatgaatgatcaaatacgtatttaaaagttaacgacatcatgtattaaaaaataaaggtaatacataatactctcttttttttcaaaatataaaagattctaggccacataaaatatcttatattttgtaacggagaaaacaacaagctatagctcgccgccgatgaacgaaccatctgcaacggccggccggtaacggatcgccagcatatgcaagtatggcacacaacgaaattaccaaactgatcaaccgaaagaaaaaaagctaggaaaagcagatatgattatgaatatatgatatgatgatgccaatatcgatctaagctgcaaattgtttcgtttctgatatatgcatgcgtccctgcttacgttgtggcccatattcagagtatccaacgtcgacttcttgttgggtttcatgacgaaattaacccatcaaatatataaaatcttcttctcatcttccaatgtatgtatctctacctcactacctgcaattgttgtctgtacatgccgcccagatacatgccacaaacagcaaccatatctgactttttctaacgatctccggcttttttttttcctttttttgttgaaaatgacatgtccaaaatctctgtacagattgccgaacttattatatattagctgtgaaattcagaaaggaattaaccgccgtatataagttgggagctcgggagcttgggcttctccggagcctcacctgctacaattttacgagccgctcctcaaaatttcaaactctcctacatattatatatatattttttaattttagagaagagtgtttttcactttttcttaacatgtctctatatccaacccgacatatatgcaactttttaaattgagaacttagcccccaaacaactcaatccgaaaatcgttcatttggagatttgaattcagaatcttgaggtgctacttaagtcactgcaaccatgtcctttcacaaactctcctacatatagttcattccccttttgtttgtgcatttatttttctcttctgttttctatatgctttgcaagcctagccagataggtcctctgcatattactgcgttgtttgggtttgtgtcatggatccaacataatgggccacatgctagcttctgataatggactgggtccactaaacggggacaactgttaattgaaggccctttgaaaggaataagttcactttagactctcgaatatagatccaatataatacgtatccctcaactaaaactaggcaattccccgcgctttgctgccgaaattattgagtaattttaatatatatatatatatacacgttacaatcaagctatgggtaaaaagaaaacaaataaaatatcaggacttatcactatttattatgaaacaaacaaatgaaacccgcgctataatattgaacatattgatatgtttatgttaaatattataaaaatgctagatatgtttgtaaaaatattgtagaaatgatgtgagggtgatgattgaatagattgtagatgatgttacatgcttgcatgaggttgaatatgtaattattgctagtgaataatgatatggcatggttgcatgttacgcttcagagttagtaggttgtaactttatagaaagtatagataccagatatctttaaacccataactattaaaactgatgtaaaatgacccctcattggttttaaaggtggtttttgttgacgtatagtagctcgtcgacctggtccaaccgagtaaatcaacatgtggggctcatatgtcagggactccttccttccccaaatttcctctcggcggtagcgtgtgatagcgtaaagactacaatgaccgctgccatgaggctgaggctgtgtttagttggatccaaagtttggattttggttgaaattaaagatgatgtgactgaaaagttgtgtgtgtatgacaggttgatgtgatggaaaaggactgaagtttggatctaaacacagcctgaagaagacgagcttctctgacctgcccatcgcgccgtcggtctttgcagcagctgcggtgatggtcgtggagctggatgttgggcgtcagcttcaggccaagaatgtgcctatggtctagagcttattgagggcgtgccttacgcaccactgggtacgatgatcactgggagttccgataaaatcttgttttaatctgaaaacataatagtgttgtatgcgcatggtaaacttaatgttttagcagagaaagggaatttgagttcaatacattgttcgatccctttcgctctcattctcaggccttataaagagttcggcctactacacggcccattcaccgcctacgtatcgtggattgggccgtatgcctctcgtgggccgatttggaggaaccggcccactatcctttgaagttgcaaggcggcgtcgcgccttagtgtgacaaaaactgaatgaattaattaacttaaattggttggaaagaggataaaatgaaatagaatgagtgtttgatattaagtgcgtgtagcaagcttggccactaaataaataaataaaccattcgtatgtataatactactagtaaaagaaggaacactaatttttcagggcgaaaaaaaaaaatgagtggtgaatcacgcaatcacttccctgcaatataatgcatggtgctcgccgtcgctgcttgatagcgagtgcttctcgattcgatttgcatgtgtacgcactcagctgtagttctatgttagactgtgataaatatatatattcgatcataccactggtggagaaaaccatctttgatcggtcggccgaaatatataatagtcccggttccactaaaaaccaggttcaaaaggttatagctaccttttgatctttagtcccggttgataacacatcaatcggaactaaagatcatttttagtcccggtttaaaagatggtaggtggtgtcagacccctcctttatctttagtcacggttggtgactaaagatctatttttagtcccggttagtgttaccaaccgagaaaaaaagatcgacatgcacggtgcgagatcgagaggaccgaggcgcacaggaggatcagttaataagttctgaccttttatctcctcctctcctcactcaccccatctcttcctcttcctcctcccatctcttcctcttcctcctctggatccacctcctcccctctcctcctcacttctcaacctcctctagatcggcccctcccgtctcctccccacttctcaggcggcggcggccgggtggctgcggaggcggtctcgcgcggccgggaagcgcggaggcgccctcacgcggcgactgggtggcgacggaggtggcctcgcgcaccattgcgcggcggccgggcggcgaggcacagcgtgcggcgggcggtggggcagcgcgcgacgcgggcggcggggccgcacacggagcggcagcgcgccggctcttcttttttttatatataatttgtgattgagagatgtataatttctttttaaaatttgtgatttattgcatggatctgagatgtataatcgatctgtgatgcaattgatttgtgtgtaatttttttaagatttgtgatgtatttgatttgtgtgtaagtaacttaggatttgtatttgtgatgttactttgaatttggggatttgaggtttgatttaggtatatacatgacactcgatttggggatttgttgtttgatctggtatatacatcccacttgatttaggagaaaataaaaagaaaatggaccaaccgggactacccctatcctttctttagtcccggttgatccctctctttagtcaaagatcgatctttacacccgttatttcacccgggactaaagatagcgatctttagtcccggattcgtagtcccggttggaaaaccgggactacagggggttataaaccgggagtaaagatggtttctcctccagcgtactctccctccatcacacaaaaccaatcttaatacaagatatgatacatcataatactacgaatctgaatagagtttgcttagattcgtagtcctagctaaactgtgacacatcccgtactagattagttttttttttttatatctatcgaatccatcacaaaaggagtttgggtttgttggtagctgcagctggagtactgtctccgtcgcatccaagctactctagccatgaatcagaaagcagacagattcctgccaggagaccacgaaccatgacattcatatcgccgcgcgcctccggccggccatcgccgtcgtcgtcgtcgaccatcgatcggccggccggccggtcgccgtcggtctgtccggcggccgtcactgttcgatcggtcgatcagagcaaaggagaggctgagtgtcgaaacatgaattcggcaataataaaacggggtagcgcacgagacctaaaagtggatggatgtggagacaaaggatttagacaggttcatgccctctcaatgagaggtaataccctactcctgtttggggaattgaatccgccgggtgtattatagatctgacgatctagttgtctcatgccccctagagggcctcctgcccaccttatataggatggggggcaggattacaagatagaaaccttaaccaatacggtatcggtttcctaaatctactttacaatattatcaaaccaggactttaggctgttccgtaatatataaggaaacgtaatacccaagtcatgatctgttacatattccatatatataagttatcccctataactagtcggataaccatgccgtgtgggtatggggtacccataatctccacagtagcccctgagaccttcacagtcgaaaagataatcttctctcgaaccagattactccaaagccgagtacttcaatcatctttgccatggtctcccgagtacttttaccaaatctgaagactgtggagggctggaaaataaagtcaggtgcaccgactagatgcacctaataggtgtagcccccgacaatgtggttaattgaacaaaccaagcatatagtcaaggaataaataattcaaccaaccgagtggttttgataatcgtaatcaaccaagtgacttgatatcaatatatagcatatgcggtgtgaatcctccaaataacatgatccgagtgatataccaactgctttgtaaaatatgatgagtgatatagaaaaatagctataaagaagcttgtatattgtgaataaagaaatttccaaagtattgggcatacgccatgcgcacactgctttaacagatgtgcttaagtccctagaagacacatggtttcaccacacctggaaatatatggcatatgtggtgtaaaatccgagtaaataaactcataaaggatttaccaaccgcctagaaaatgaccacaatatataatcagcctaagccataatattggtcaataaaaatgcacacttacatggcgaaaagcaatgatattgtatccaatcaattgcttaaaaacccaaacagcaccttgacttatatataaaaaagtcagcgggacagctatataaagctttactgtttgacaccttttaagatgcattgtaccaactcctaaaaagttaagtaactgcggtataaaaggattttaaggtattaggcacttgatcacgcgcactttggcctaagcaaaaagtgcctaagtccctaaaagaacgtgacaggccacacctgaaaatatgggttgcagacatattaggcctaggccaaaaaatatgccttcgacaccctttaaaggatgacgcatgtaacatgctcccgagtaataaatcttctgggtaatatagaccaagtgtagctcatatgaatagcttctgatctgaatgattatcccttatgggatactccaaaataaatataataattgaatcccgactggcgcaagtattcggttgatagcccttacggggaataataattggtccagtctttgagcatagaaaatagactcatgactatgaatccatgtggaatgtatccggaacaagtccaaattggagatataatcctcacgcttgagttgatgagcccctgagcatatagcttgtccttctgtcatagtcaaaattgtctattggcaatagctgacgcagtcggcatggagatgaaatgaccaacatgaagacgaaattgctcatcagaagtaacggaagatgtcagtggtagtaaaaacagtgacaccaatcaaaggtaatgaagttgcataaccatggaggcgaagaaaccagtcggcaacagtcaggtcagctagcagtgaagatgtaggcgcccaacaacaacgaaagaacagtcggtgatgacaaaagcaaaccgacgatgaagacgtagacgcgcatcaacagtgatggcgaaatccaccaatcatgaagatgaagaaaataatcggcggcgacaaacgcatccaacggtaatgatgattaacggcaacagagatagccgactatgatgacgaagtttcccatcaacggcagcagagttggctatgttgatgaggcttgacaagatgttgatgaagatgacgatgtcggtgatccagtcaatagcgatgtagcagccgatgataacgatgagatcctctatcggcagttgcgtagtaggccaaccgtgaagacaaataattggaggagagttgatgttgttgcccaactcgtctaaaccgaaatatttgaagttgttgaagtagaatgtctgttccgaagcaaagatgatttcttcagcttgacataaaatttgtcaaattttgagccttatatttgtgtagcccccgactctttggttagttgagaaacaactgaacatagagtcgagaattatagcttcttgtcgtcgagtagtcattgcttgattgaagatatgtgttgaaggtgtccaagtagaaatcctgaatattggagagtcacttgttgtagtaaaatatcatggcattgcatgccgagatgtcgaggttcacaaagacgtcgtggttggtgaagtagtaaaacttgcgaagtagcagcaatagagtttgccggtgccgatcgctccaccatgatgacaaatttgtattgccgtaatgaagtgaacacaagtcggcggcaacagaagcaaaccggtagtgaagacgcgtagttgtgaagataaaagcaccaatcggcggcagcataatcagtcggcgacggaagatgatgatgtccatcagtagtggtagctgtataaaccagacgtagaggtaagggcactagtcagcagcagacgagacgaccgacgatgaagatgtagatgcccaacaacagcggcataataggccaatcaacactggcagaatcatgcagccatggaagtgaagaaaccagtcggcagccatggcaaacgtaggcagcttgtgttgaagatactgatgcctattagtagtgacagcgatgtagccagccgtgaagaagatagcatcagttggcgttataacaggccagccgtgctagcggtgacatcagtcagtggcggatgcggcggccggccggtgaagacgtagacgcccaacaacggcagcataataggccagccgtgcaggcggaaacaccagtcggcggcggtcgaggtggccggtcggtgacgacgtagacgcccaacaacggcggcataaaggccagccgtgcaggcggaaacaccagtcggcggcggcgaaggcaagccggtcggtgaagacgtagacgcccaacaacggcggcataaaggccagccgtgcaggcggaagcaccagtcggcggcggacgaggcggcccgtcggtgaagacgtagacgcccaacaacggcggcataaaggccagccgtgcaggcggaaacaccagtcggcggcggcgaaggcaagccggtcggtgaagacgtagacgcccaacaatggcggcataaaggccagccgtgcaggcggaaacaccagtcggcagcggcgaaggcaagccagtcggtgatgttctgactgatccattcctggagcgtaagagataagcctaaagccatgaatcccttttatgcatatctggatctggatcctgcagaacaaacatataggatgagtagtatctgatataaatataatactcgagaaaaaatcaagtattttaaaatatttataaacatgtatttctcctcttgtcaattttgatttccccgagcagatgactcattacgtttaaacgctctgcccaactagtcatagccaccaagcactgggagtcggcctaagcacttcccaaacatgcatatgagtgacatgagttcgtcattaatggaacaaagtttcacggatcggagtttactactcgggtacttttgcaattattaagagtagaaaataaatttatctcatctctatgcttttgatttattccgaataatacttagcaccttgcgttactcggtccatccaacgagcccccgggtgctaggaatcggcccaaaggcaaccatccattggcaaaccaaacggaaagcataggaagatagaactccataactcgataggtacttttgtactcagattatgtcgcaagcaatcaagataaatattataaaaaatatgatataacatctgtagcccccgactcactactcaatggaagaccaattggtgtagtgaggcagaggaaaaggaaaaatatcatataaagaataaaataaatgatgacttagctttgtaatattccccttggtgatggcagaagtggccaatgtgggaacaaagtcgtccatcaataacaatgaagacaccagtcggcggcgacgaaggcggtcgacggtgaaagcgaagatgcccactaatggcggcataataggtcagccgtgtaagcggaaacaccagtcgacggcagcgaaggtgagccaacggtgaggatgtagacatccaacaacggcggcataataggccagccgtgtaggcggaggcaccactcggcggcgacggaggcaagccggcggtgaagtcgtagacgcccaacagcggcggcataataggccagccgtgtaggcggaggcaccaatcggcgacgacggaggcaggccggcggtgaagtcgtagacgcccaacagcggcggcataataggccagccgtgtaggcggaggcaccactcggcggcgacggaggcaggccggcggtgaagtcgtagacgcccaacagcggcggcataataggccagccgtgtaggcggaggcaccactcggcggcgacggaggcaggccggcggtgaagtcgtagacgcccaacagcggcggcataataggccagccgtgtaggcggaggcaccactcggcggcgacggaggcaggccggcggtgaagtcgtagacgcccaacagcggcggcataataggccagctgtgtaggcggaggcaccactcggcggcgacggaggcaggccggcggtgtagatgacgatgcccatcaacggtggtgtgaccaaccgaccgtataggcggggacaccagtcggcggcgacggaggcaggccggcggtgtagatgacgatgcccatcaacggtggtgtgaccaaccgaccgtataggcggggacaccagtcggcggcgacggaggcaggccggcgatgtagatgacgatgcccatcaacggtggtgtgaccaaccgaccgtataggcgaggacaccagtcggcggcgacggaggcaggccggtggtgaagtcgtagacgcccaacagcgacggcataataggccagccgtgcaggcggaaacaccagtcggcggcggcgaagtccagccggt

SEQ ID NO: 17485 - DNA, 2936 bp, Oryza sativa
ccctactcctgtttggggaattgaatccgccgggtgtattatagatctgacgatctagttgtctcatgccccctagagggcctcctgcccaccttatataggatggggggcaggattacaagatagaaaccttaaccaatacggtatcggtttcctaaatctactttacaatattatcaaaccaggactttaggctgttccgtaatatataaggaaacgtaatacccaagtcatgatctgttacatattccatatatataagttatcccctataactagtcggataaccatgccgtgtgggtatggggtacccataatctccacactgagcatgttggtagtgtagccaccacaagccatgcaatacagcacactcgcgatcaaacatgcatgtccaaccgtgtagccactccactacatgtccacaaatgcatggccaattcttcttctgcttttctctctctctctctctctctctctctctctcttctccttcttcctcccatcgttttctacagcatttcttcagttgttatttttgggcagcatgcgtgatgcatgggagccatgagagcataagttgagaagctaactagctaggcatctaatatattgatgtgtaatctttttacgcgtccgcgaaaaaaactcgctaggcatcaactacctatccaaggctctgttcgaacttgagtaagatatgcacgcaacacgtacaagaaaagcagaaaagcagtagtatattaattgagttttttttataaaataggctaaaattcggcctttatatccataatggatatacacagcctatgattaattgaattttaattattacaaacattaataaaaaaattgtcatattatataatattttaatcagtgttcacctagtcgctaaacgctagtcggacggccaccgattgactagcgactaggctgattaggcggcgactagacggattaggcgaattagacattttttctatttctttcacacaaaaatactgattctatacattcggtactcggtaaatattggcatttaggcaaatagcataaatcatagttaaattcagaaatcatcaagtccatacaacgcgctaacactgcacacgaagcattgggtttagtacaaatctatagggatagcgaacacatcagtatagccactgtacatgcacatcataattcataaatcataactttataaatctgaggggctggagctaggagagaggaagaaaaatttatctagaactggaagaacagaggaggtgaggtggtggaggggagcctgatcccctgatggcctgatctagggttggcgtaagctgcttgagtggttccgtacttgactgcttcaatcggtgtgtttgccaccttccattgacggcaaggatgaaggatgagatggagagcaggagaagcagaggagggagaagaacgtggagaagcagaggaggagagggaaggacgtggagaagcggtggaagatcgatgggcgcggcgacggagccgtcgctcgtggcggtgtgaaaaaaggggtaggcagggattacgctctctctccaggctctcaaataagggaacctaaatccccttctataccgagtcggtcccgcgtggcgcttctaaattttatcacgcctaaattttgatttctatcgcctagtcgacgcctaaacgcactgtcccgttgtctaattgcgcccaggcaccatcctgtccaggccgtccaggccgcctaggaccgactaggaccgtctaggcggtaaatcgactaattcactgcctagggtgtaaactggacaaattgtcgccgactagcgattaatcaccgtctagacgggctaggcggccgtttaggcgaacattgattttaatgcaacttttacataaatttttttaatgaaacataccgtttagccatttaaaaaacatgctaacggaaaggaaaaacctatatccaccaactcactcgccgccgatgaccgaccgtagatcggaattcaccggccgaaactggtaccggctcgccgccgccgccgccgcctctgcaacggccggacggcaacgaattgccagcatatgcatggatggctagctggcacacaacgaaattacgaacaaactgaactgaaagagaaaggaaaaggtgatacatgataatgatatgatgatgcaaattgcaagcgatgcctagctttaatttgatttaatttaattctggataacgtatgtgatgtctgcttgcaaatattgttcgtttctgatgcatgagtccgtgcttacgttttggcccatatccaaagtatgtatgctatccaacgtcgacttcttgttgggttttcatgacgaaacccatcaaattcatcttcttctcatcctgtatatcaagggcgggcccagtatgtattcaagggtattcagatgtatacctaagttttttggacaaaaaataggtatatataccctacagtgtgtatatgtattaaaaaaaattaaaaaagaaaccttatactgcttatattgggccttattttaccatttcttctctattggtcctaaattttccgctttcctccccctttcctctcagcccgcaccctaattgggccgcatctcagcccatttcgacattttccccaattcccctccccatctaaccctaaccaccacgggagccgagcaagaggactgaggaggcgtgcgggtgcaggtccgccgtcccgcgtcgaggcagccggcggctgcggcgccctgctcgccgagcttatggtgcgggcgcgtttcttagtttgttcgtgccggcctctccgcgccggcgtcgagctacacgtatgcacgccgtgtggttttgggcttttggctgtctggcagacagtgtggagcttggctttggttgcagcaactgtggggagagatcgggaaga

SEQ ID NO: 17486 - DNA, 4437 bp, Oryza sativa
atgaaacctcttcatcatcgattttgctatatatttgtcgacaaatttttccctaaaaatttgacagatgtaattacagtacaatcgtagtgtaattacactgtaacttgcatgtaattacactgtaactatagtgtaacttgtatgtaactttcaaaaatctctccgtaacatgttatttcggtaaaatgaaggtcgtgggacaaattctttcacatgtgtttgctatgatttgctttcttcctcacgaaaacaaatcttgtaatagatctaacaatttaaaattatgtgaaacttacatataagttacactgtagttacatgcaagttacagtgtaattacatataagttacagtgtaattacactacgattgtactataattacatctgtcgaatttttggggaaaaatttgtcgacaaatgtataggtagtcccattgcgaaatagcccctctgcatactagagcacttatagatggccatatggcccaaggcccacggcccgattagggtcgtgcccgtgtcgggccatgcttgggctgcaccctcggcatggcccgatcaaataaaaaaaatacagggatgcaaaatatacttaataaccgtataaggcaaggcccaaatagaagaggaatacaaaatagacttattttccagccatttgaacacaacccacagagttgagggacgaaaaataaacttttctgtgaggaagcacgatagactcgagtagtattaggccgtgcctgggccgtgtatgccgcccgtgggttggcacggtccggtgaacacgctgggccgtgccggcctaactaacctcggcccaggcacggccgggcttaggccgtgccgtgccgggcggccgagttggccatctataagagcactgtttggtgagcttctgatattggcttggcccagtaaaagaaaggcaaactgtccaattaggcccatttacaaattcacaaatattgtaaaaaatcttcacggcccaactagtcactcgggccgattcaactacgagatcggtgcattgcaattgttaaggccctctagttcagatgctcgccactttgccatttgagcatttttcttcctttattttgttaataatataatacatttgttctttattattattcggtaaattaaaacttaatcccccgtctcatcaaaatatagcaacctagaaatagatgggatatattttagtaccacgaatttggacagtctcacgttgttatattttgagacgaatatagcagttagtttgtacatacatacgctaaacaatttaacttatacactagttgctcgtttttgtagagcatatatactccttgcagcttggatggggtaggagccagcatcagtaggaatgcaagtggaccaacccacgaacctgtttataagcaaaactatgcggattatccactaattcacttgcatctatagatgtgacaagccgagccacgacccgaaaatccacgggttatttatttgacctataagtgggttcggttcatcgtaggtcgacctgcttgcatctctagctatcagtaacttagttactcttcatcgtcgtcgatctccacggccttgttcatcctcttcttgctcccgccgccggcgccggcgccggaggagggcttcttgcggtaggcctcctcgtattgcttggcggcgtcgacgccgcggtcggcgagtccccggaggttggggaccttgtaattctgcgccgcgtacacgccgacggccgtgccaaccaggaacgggaacagccgatgcagcaagcaaaacatcgtcgccttcgctcgatcgccggcgatgatgaagaacacactaattaatgtgtgtatgttaataattagtgtctgaactagagatgagtaatggtgtttgatgataacaacatgcctgtctatgctgctatttatacttgtgtcatagttagcattagtgtttcagctgaaattctgaatattgttgtttcttggacaagggttcaagaatggatgttggaggaagatgattaaggagaaaagcaaagaggaaccaaagatgcagatataaagatcgatttatatgcttggtgatagtgatgtatatgatggccatgttctgtgtaggagttgaataattgatactccagctactgctgccactgtagttgagagatgagttgacgcttcagtaagtcatggttggccactccactagatcaggtgctcgatcacacggttttggtttggataaaggactctgattgacgatcaacttcttctccaaggctgagacttgagaaagactagtactagctactccatctgtttctcttcatattataaagtaatatgacgtttccaattaaacttttaaatctgattaagtttgtaaaaaaaaattagcatctacaaaaacaaattagatttattgaatgtagcattgaatatattttaataatatatttgtcttatactgaaaatgttgctatatttttctataaacttgacctcaaacttaaaaaagtttgcttagaaaaataatcatagcgtcttatgatatgaatttgaaggagtgaaaggttgcaaatgcccaacggcaagcgattgtttcttcatcatcttcttcaaacttgtagcaacatataggcggttggttgattaattgtttcaccttgtgttggggaagatgtaatggatgattttaattttttttcttttacttttagtaaataaaatgattcatgtaggaagttctcaccccgaatatgaccagtctagaaagatatatacggtttgttgattattccctggctgataggtttcatgttgcttggggaaggatgagtcaaagagagattaagcaagaggtgactaatatatcattcgttaatacggatataaaacgagaagggggagaaaacaagaaggaaggagtatactagtccgaaccaccgcccttcctacatttgactaacttgacacacccgacaccaggagagaggagtgagggagagaagaggatagaagccgccaacgccttctctacctctggttgtatttaccttgccactgcagccatcccgcatctctactagcgctggaaagcgagggggaggaggggagagaagggggagaagtgaggaagaagataggatggggaatttacatgtggatcccacttttatctttttttccgctagctatagtgccgcatcagatgaagactaagtcaaccgtgctacgtagacaacacattagttaaaaccatccttaaaacagccaagaaagtaatttttgcacgtgtgtacttaaagaagacgatatgcacatttttgtggttaagatcactaccggagaaaccgtttgtactcccggttggtaacccctgtagtcccggtttttcaaccggggtacgaatctttccttttttttcttttctcacgtccaatatctccaaatcattagaaaataacaaataacaaatcacacagatagttcacatatcacatatctcccaatattattcacatatcacaaatcacagatcgcatcacaaatcacaatcatacacatcacattaagaaggaaaaaagaaaaaaaatttccatgctgccgcgctcgccgggccaccggtcaccgcttgccgccgctgggaagacagtggagaggagaaggggaggagaaggagtgaagagagaagaggagaatgagtggaggggaagaaggataagaccgagggagaagggacagacagaagcgcgaagagataaagatcgaccgagatatgtgtgcggcttggggtgaattttggacacggttgttagttctatttgtagtcccggttgtttataccaaccgggactaaaagataattggggcctgactcgatctaacaacttcttcaaccgggactaaaaatgatctttagtcccggttggtaacaccgtctggaactaaagatcaaaaagtacccttgagcttttaaaccgggactaaagatacttttcagtcccggtttttattggaaccgggactattgtggaaattggcttatcgaccaaaaatggtttctgtcagggttatggataccacatacctaatagtagttgactaaatcttggcaggacccaccacataccatgtcttatacggaaacaaccttcggatataggaggagttccgcataaggaaggatgattagagttctacatggaaacgacaaggactactcggattgtatccatattggtttccctagttctacttggacaatgggacacctatgggtataaatatagggaaatttggaaccatgccattataattttgcaaaatttgagatatgccatcctgacccacatgtcattgactcatgtgggtcctgcatgtcattgagataccgatggcatatctcaagggctgcaggaatt

SEQ ID NO: 17487 - DNA, 4684 bp, Oryza sativa
cacggaacaatagatcaagacataagatcaacatacaagccaacatacgccaagacaagacgccggatatcgatttcagagataggcatggctagtcccctacggtgcctacggatactgtcaggagagatatagcgttgtctctgatctcgccggatgcggattcgaggaggaaggctaccctgttgtcgactacgagtcagtactacagaccgccaagtcgacaacagttagataggctaacctaaatattgtactggtgtgattatggtgaataaagagcaacgaccgaccggccaacaggagtagggttattacctgacgattcaggggcccgaacctgtataaaaatccttgtctccgtctcttttacctaagtctcacatatatcctagtaccaacgattcccatactatacaaataccggaatcgcgacatcaaacatcgacagtttctccagtagtagattacgaatctgattctatgggagtcaaaatggtcgattcacctacacgttcggctgattgcaatagtgaaagtggccacaacttcgccatttgatcaatttttcgtcctttatttttattaatatatccgttctttttaattttttaatttagaaacagtacaaataaggtttacgtataagttttacgtgtacacataagaacattccaataatttacatatcatacacactagctgctcgttttcatagaaaatgtaataactagtgagctagcactagcagtatcaactaatttactcctcgtcgtcgtcgatctcgacggtcttgttcatcttcttcctgctcccgccgccgccgccgccggcggagggcttcttgcggtaggcctcctcgtagtgcttggcggcgtcgacgccgcggtcggcgaggccccggaggttggggaccttgtaattctgcgccgcgtacacgcccaccgccgtgccgaccaggaacgggaacagccgccgcagcaggcaacccatcgtggatcgatctctccctgtcgtcgccggcgatcgatgatcaacaacaacacatacgctagctaatgtataaactatacaggtagctaaccacctatatatatctgtatttatatgtaagtatatatgtttgtgtcagtgtgtgtgtgtctgaacttcagatgagaagtggtgttaatggatgagaataatctgtgtatctgtgctgctatttatatgtgtcaggtgtgtgtaattaattagctggattgaagaagctagcatcagtgtgtccatcaatcggatgaatatgtgtttcttggacaagggttcaagaaaggaattgaagggagcaaagctaaggaaatgtaaagatctaggaatgatagtgcagaatatacaacagattaataaataattgatggtcatgttctatgtaatcaagttgaataattgatagtactagctactagtagtataatagttgaaatgatctgacgttgcaaggggtggccactatcacacggttttggtggataaaagattcatgatcaacttcttctccaagagtcagactacaacagctgaacttcaggaatttttatatactttttgcaatatccccaaccacccaccgagcaaggcttgtccttgtccggtcgattaaattgtgcccttctatttttcttgtgcctttcttgctagcaatagagtgattaatctgttaatctaggagactttctcagttaattaattgtgttgaaatatagtgaggtgggcttattgctcagttaattagtttggtttttttaacctgtctactaccattcgatgagtttgatcacaattggctgccaattcatacacccaacaatccaacacacaattagccaattgtgtcatttttttcaatattatctctatcttttgtactgtttgttcatctttatcggtttgcattataagcagtctatcctgaccgtaaaagtgtaattcgtttgtagatttatctagaaattttccattccgatcacaaaacaggagtttaccctgaattggtctaaatttgttccgctagctagttttaatctcaattattatatatcttagttataagtttctcaagatcgagatggctgacgactctagctcacaacgcaaagctctaggtaaaaaataaaaaaaccgtcaaacaaaggtacttattttttaacaacagagatgtatatatattatcttattttgtcaatacacacaacaggataacgagtacagagctaaacaaacacaattaaccggcacagcaacggaatcaagcagctaattacaataatagctgaactcaaactgaacttaattaataatcaactcaaattaatcctattcatcatcgtcatcctcctcctccctagcaacactagcagctgccttctccttggtgctgcccttcttggccttgggattcgtcgtcgtcgtcgccctcttgctctccttgtatcgctcttcccctgcagcctcgccgtcgccgtcgaccagctggtcgtcgtcgtcgtggcggcggcgacagcggcggtggcggcggcgcatggggcagcagctgtcgccgtcgcggcggaggctggtgagcgcggcgccgaagccggtgccggccaagaaggcgaagccgtacttgtagaacgccatggatgatctgatcttgatcgcacacggctagctctacggcagctagctagttgttaattagtgaaatttgtctgatgaaatcagcttgatgatttgcactgtaagtgatggagttcttgtgaattgttgatgatgaatcgatcggttagatcgagctggatcaggatgggtgtgtgtgtgtatatatagccatgttattggtttggtctcctcctagtaccatttgatttgttgttttgtgtgtgtgattaatgcagtgagctagctagcgtgtcaatggcgtcgtctctttcttggtcccttgtccaaggcaaagcttaattaattactcgctccgttttctaatagttacggttgttacttttgaacgatcattcgtcttatttaaattttttatataaatatataaggtataaatcatgctcaaaatacttttagacataaaataatttaaaagataaattataattagataactttttaataaaataaatcgttaaacgtgtgataaaagttaacggtgttaccttttataaaacggacgagggagtaacacatttttgcacaaccaaagccggacgagaacgagtgttgttgctaccagctgacgtcatgagaacgacaaattaaaattcgattaccgtgtgctagggccctgtgtgctagcacacatgttcaatcctaagggccggatacaacgactgttttggatatgctcgtacgcattcatgaaatatgctgctccctctttacatttagggctttttttcatgggactaatccactagtccttccatatattctagtttttttagtctctaagaatctaatctaaatataggtgactaaaagggactaaaagtgtatattgggactaaaatccattaatccctctttacttataagatctaaagcggcagcctttctcttctctctccctcagtccacatgactttagtctttttagtccctggattcaaatggggactacagtttttagtccaaggactaaagtatacagggactaaataatccaaacgggaccttaatttatgtatgatgatgtttagttcatttaaagagagtatatatgctctttggtcatagatatttaatgttaggataaagttttattaaacttgtgaaagattgatctctaattttatattagaataaattttgaaattccaataaatttatgatataacttcccgagccaaatctcaacatgtccataaaaagaatttaagcatctaatgcatcaaagtttaaaaggttgacagaatctttctctatgcgtcaaatatttataactaaaaagagtattagcgctttctaaccagactttgcttaatggttaaaccttttccagttggttaatttgaatttatatatacggatctatatttcaaagtgatttcaaataaaggattggctactattaaaaaaaagaggagactttggagggataagacatccctccaaagtccaaacattttttaagaagaaattgtgagcgtccacccttgaccctaccttgaaccctaaaccttaaattgttgagtcgctgtcggttgccttagttcattagaggcactgaagctagaggagaacgagctctcgcacgaattgtgaagcattccctaatgtaagaaaactacaagattatagctagcctccacctttttttttttgttaaatgtgatgtagcaattccgtctaaatgatgttggtggctgttaagttgcaactaagaatacaaatcacaagaaatcaacggtcaggattaatagtgatttttttaaaagaaaaaaaaacgtcctacagaagaatttaaggacggtcaacctaaagctttgacctttcttgttttgagaggagggttaaatttgggcttgtaacaggcctttcctaactagtcaggttaccaaattgggcttgggcctggccacgcactggtgatttacattagggcccgttcaataggtctttacctggcccattaaaggcccatgacagacgtgtcttc

SEQ ID NO: 17488 - DNA, 11838 bp, Oryza sativa
ggtcacgaagatgatggccttcactgtgaagtattcccttaagtactcgtcccacactttcaatccctctttccataaatcagccatatcttccaacaatggttcaagaaatacgtctatatcaataccaggttgatggggtccctgtatgacgatacagagtagtacgtattttcgtttttgacaaagctaggtaggaagattatacatggtgagaagcactggccaagtactatgtgaactgctcatgtctccaaaaggattaactccatcagtactcagggcaaatctaatgttccgtgggtttttagcaaactctctatactgagcattaaagtttatctactgatgagcatctgccggatgtcgaatcatcccatccttcttgcgcccttcttcatgttagcgcattagttccacatctcgcgggtttgagtatatccgtttaatgcggtctttgacaggaaggtaccacatcacaagctgcgggatttttctctgtcgtcccttagttgcttctgagggttctaggccagtattgctattcgacttgtaccggcttgcaccgcatgttggatattcatctaaagaagcgtactctttcctgtatagtatgcagtgatttacgcacgcatgaatcttttccacaccaagtgaaagggggcatatgagtttctttgcttgatatgtgctggatggtagtgagttaggcctcggtagcattttctgcagaagttctaacagactgtcgaaactggtatcagaccatccatgtctcgcctttaacctcataagttcaagaactgactggagtgttgtgaactcactgtcacagcccttcgactcatcgtacaaaacttcctttgctgccttctgtaaagcttcaaagtaatttaaccctctagctgaccccatcagcacctcaggttctgcatgacgtaacatttcctctaggtcgattttgtcctcaacagaaccatcgtcatgcaccatgtcttcaacttgtgtcggaactacattttcatgcccgtccacttgttcttcaccatgacgtgtccatatttcgtgcttgtccataaatccacgagttactaagtgctccttcactttaaaagcatcgtcaaagtcccaggatatttcattcttacagtcagcacatgaacaaattatcttcctcatattgttcttctcagcgtgtgccttggcaataccaataaatttagccacttcgtttctatatggagacaaaaacctcggccaatgatacatccattcccgactttccatatctctaaaaaaaatatacgtcaaatatttgcacaattaataccaaatttgtagggtttattgaaaaaacttatcgctattcaaaactaattaactaaaggttaagtgtaaagtaataaaaaatcaaagtttatttcaattttttttacacagacatgccaaattagtacattaggaaaatctaaaaaaatcatatcatcggcatattcaaaatactataactattttttgattgcaccgaataaatagacatttaaaattttattctctctctatatatgacaagatctagatctagatctagaactaggtggtggatgtgatatcaaaaataaaaaaaagagaatttatgttaccatattaaaccactacaacaagaggcatcaagtattacacatacatctaacatcaacatatgaaaagaaataaaattaaaaaacatggagctcttccttcacaattttggatgcataaatccatcacaaattaaggtctaaaagcttaaaaaattgcatacctagtgtggaaatgagtagatctaagtaccgtagaaaattcccccgaagatttgaagttcaaaacctcccccctatatttaagtcactttaggagagagaaacgtcggggagaatgaacagggctcggggaggaaaaagactatataggggtatctttgcaggcgggccatataagcgtcgcctgcgaagatcgatcttcgcaggcgcctgcaaagatcaatcttcacaggcggaccgccccctccaccccaggtactttttttgccggcggggttttggctccaaattacatgcccgcctgcgaaaatcaatcccctacgatgccgaaaatgagttttctagtagtgttctctagccaaattataatacttggtcaaaactaatgaacatctttttttcatctaggccataacagttgtactagtttgtgtacttgtgagattgcaaatataggagtatatatgaatatatagtcttggttgtctttgaataaacaaagctttcgcgtaaaaaaaaaacacaaagcttgattaactagacacctggcataaattgattggttatgtatgacaatacgagtccctgagcgactacaaatacctatgcgaaatctccaaaccgcgtcacattccaaccccaaccacgcctcggatcaaaataagaccagaacaaaaaaaaaccctcaaaaatccttgtagaaaaaagagtcgaggactcagaaagggagtagagaaaaagaagccgagagatcatgcgctgctcttgcatggtctgtctcctcctcttcttcctcctccacctctccgtctgccacgccaccagccgcaaccaccgccgcctcttcgccgccgctccggccgcttcgccgtcgacggcggcgctgtacggcgacgacgacattaccgccgccatggtaagcatgagtggagaagtgttcttggttaataaattaattagttggattcttgattttgattatcttcgtgtgcgtgtgcatgcagcacgtgtggaggtctccccggaggtacatgcgggcggcggcggaggagcagcggggatcgccggcgccggcgccgctgccggacggcgccctggggctgcagcccggcggcgtcgagggcgcggcggcggaggcgaggacgacggaggaagaggccgccggagccggagccgcgatggcgccgttcccggcggcggcggacgtcggcgggaaagatgatgacgattccggcggcggcgatggcgcggcggacgacgccggcgtcgactacgcgccgcccaagacgcatcctccgtctcacaattaaaacttagtcgatcgatcgtctcttgatacgaagaagaagctagacgtacgacgacgaattcgaagatcgatgcatgaggacgataagttccatgcatgtcgtaaagtatatattcgatcgtgtctcaattaattagctagctttatattttgcaagagttgtcgtaaacaatctctctctctctctctctctctgtgtgtgtgtgtgtttaatttgttgatcgtacgtgttgtgttcttcattgtgtggagtcctatactccatgagaaataatgaattttggcaaaccttaggaagaatgaaagcaaaaaggaaaaaaaatatatagatttttctcctacataatcattctatcccaaaacaaattaacttatgactgtttgtgtgccgataggttaacttattttgggacggagaagtaactaaggccgtgtttagttccaaagttttttttcaaacttccaacttttctacacacgcaaacttccaatttttccgtcacatcgttccaatttcaaccaaacttccaattttggtgtgaactaaacacagtcgaagtagtaattgggaaattggaaaaagtgtttttctaaatacaactaggatggggatgatactaatcttgcaggtctcatggatggatatgaagttgatgaattgactgaagttgatgatgattggccatgaaaggggctagctagctggagtagtaggatccaggagctaagccaagctaagctagggttttgaaaactagaagccttgggaatgttggagaagacaagcatagctaacctaagctagttttacccccttcgttgcgacatgcgtgtttgaatgagctatataaccctctggttagagcaggtacaatagcaggctataagccagttgcaaatatattttaaggagataaatcaggagagagaagaacagcgggctacagatttgtagccagctgtagcacggactccaagacgcagtgtgtctatgacaggtgggactagatattaatagtgtaggttgtaactattgtatgaatgagctattagattggctatatataaattggagccagtagttggctatactattaaacttgctcttagtggttacaatgcattcagagatgcatggcaagttaaagaagttgcagacttccatggactagctagctatagctagtatagtagcttcattccaattttccaattcaccattaagtatattcgtagttatctccactggtaatttttttcactaattactgtgaaatagagaggtgtaagctaatgtgaaagaaaacaagcaatgttgtggctttatataacactggtggagagatggtttgtagtcccggttggcaacccctttgtagtcccggatttccaaccgggactacgaatcccggttggtgttaccaaccgggactaaagatagcagcacagtcccggttggtcaccattttttttcttttttttattttcattgtttctttccaaatagttgctgcttcccaaatctccccaaatatcccaaaatcaaagtatcatccccaaatcaatgaatcattcacatcacaaattctcaaaaaactacaactcaaattcttaaagaaatacatcacagatccaaacatcaaatacatcacacatcatatacatcacagatccaaacatcacagatccaatgaatcacaagtttttagatccaaatgtatcaaaaatttgggaaaaaaaaaagaaaattgtgcttccgcagaggagagggcgccgccggccgccagctcccgccatcgccgcgctacctgccgctgcggcccgcggccgcgctccctgccgcccacggcccgccgccagcgccgccgccgcccgggcacgctctggtagaggaggaggaggagaggggaaggagaaaggggagaagagaagactctgtggcataatgccagatctgatctgaggttgttgtttatgagagctagggagtagagagagagaggggaaggggatggaacgataagatcgagactctgtgccgcgcacgggtggttttattttttgtcccggttggtataaacaaccgggactaaagataattagggcctgaattcgacccggtgactttttgaaccgggactaaagataccaaccgggactaaagatcaacatttttttaaccaggacttaaaaatcgtttttagtcccggtttttaatggaaccgggactattgtggaatttggtggaccgaccaaagatggtttctccaccagtgtaagcaattccaattaaaactcttgtttgtgaaggcatttttctgaagaatgtggtgtttactttattttttttccctaaactaacttacatactatcaatatatatattcagctttctttaatttccttggaaacgaaaagaaaaattaaggtgagttgcagagttagcaatgcatgctctgatgagaaaatctcaggcgctttgatgtgcagcaaacctgagaggtttagccaagctgataactttcctttagtcatgactcatgactgaggtagctaggagtgcttgtaatcttcaacggttttcttgcacatgtaagagcttcgatcagcttcagactgcagttcccccccctgtccctgcacttttacttgtacttgatcatagaagaaaaaaagcagagtggttattttgtactatgtcgttatatcaggacatagtaattagctctcggtgagagtaattatttcgagttcttttttggttaactgtgtttaggcgttgatagtacgtaggaaataaattgcaatgtggtttctcaattagaaggttctattagccagaagggttaagaagctttcctctccagctttccttgtcgtgtttaaggaaaacaaggaaaactcaggaaacttacatttgcggatacacggcaaactgattttatcacagttatatagattttatcacagttatatactatctccgtcgaaaaaaaaaagaacaatttcagctatcatctaaacatgataattcttgctatgcacatagacatgcataccactttcttttacaaaggtaatatatataacacatcctatctagaagactaaaacaatatataaggcatgctgtgaaccatgcaaaaacctctcacgggctgcatattagtaaaacggttataatcatacagttgagacgattttagacatgtagtttgcattacatgtttagtagtttatctccttcttcctcacatctcatgtgcacggtgacctctcgcatctctctcaatcacaacccattgccacccctcaaccatggcatcatcctttccctattagcattggcttcatctctttcacgccgatcttaccacccaccttcccttgtcatctattgcctcaatgaccttagtctcttgtctatagatgaccctctcttagggatatggtgccatggtggataggtttctgatggccttaaccagctcaatcttattgtcactacatctccatcaattttatccctcttaatccatccaatccacgatcctgctagacccaacgtttctataaactttggcccactagatccatacgagttgcagttaacgacacaatgatgaggtttacgtaaaacttgaactcatcaaccttgcacatatacaacctatacatagtcaccacaaacaactctagccaccggaactagatgagtcatggttgaggacgtgagcaccatggtaatattgtattggtgttatctctacagccatagatcgaactaatgttcagtccgtgtcatgctgcctcacctttgttagtaaggttaacaaatatgtttgtcttggactttcttatccctcaatttcgtttgaatcgataaaataaaaactgtattgctgtccaatatttgtatagggtaacattaattataccctcatgggtaatgccactatataaagtatatgctgtagagcacctattttttaagataataaaatcggattatatctctggcctctgcctcattgccaacaagtttcagaataaaaaaagggaaaaaaatgcaaatgtacaacatctctcttttttttaaacacctctttgtttccttcgttgaaagaaaaaaaaagatgtgtcctgttggaagaaaaatgcaaatgttaagacacagcactgcacaaaaagacaaaacggtccttccgcattgaccgtaccagacccacacaagctcctcgtgatctctgatctccaccgtccactccccatccaacggccgaaacccaaactcaccccaccgtagtcggtttccccaccttccgtgcaccgagttcaccaacaccctactccccaactccccgtacaccgcgcccacgggtccacgcgccccgcgcaccggctcacgatagcgcacccggcgcacgatacgtctataaatacgcccctaccccccttccccttccggaaccggatcctctaacgtaattcattctacgtcagagggacgttcaaccacggatcgtcgttccttgcgcatccgacggcaaccaccgtttcagtccgtccccgcctcagaccccacaagcgcgatgtctctgcttgctctccggcccattcgttgatagcggcagcggcgccgcgccggccagccacccggaagctcaggcagccgtgcgctgccgccggcggggaggtcggactggaacgcagtgctaccgccgtccgccggcgaggtcgagggcgaggactccgcaccgcctcggtgtctgctgttggtcccatcgcccagcaactgctgtttctcggaaccatcgccggcgaggttggattggaatcgatctgtagtctatcgaacttgcatcatcaggttgccttttctcatggaagaggcagctggttgaaattcttgctaaggcattcgtgctgtcattagcttgtcccagaaactaccaagtaacctgaagaaataaaatcagagctgaaaccagaactttgccaacagattcatatagaatgcggcatagcaagtctgcaattgcaataaaaaattaccaaaaaagatggtttttctccttgaagaagagatcaatcgagtgcagatgttaaccaaggaaagaaatctcatggctcgaactgaagagaagatgagtaatttttctgttcttttgttccccgtgtagctcaccgaggacggttccgagaaacaccgacagcaaacaccgaggcgggcggagtcctcgccctcgacctcgccggcggacggcggtagcactgcgttccagtccgtcctccccgccggcggcagcacacggctgcctgagctttcgggtggccgaccggcgcggcgccgctgcccctatcagcgaatgggccggagagcaagcagagacatcgcgcttgtggggtctaaaggcggggacggcctgaaacggtggttgccgtcagatgcgcaaggaacgacgatccgtggttgaacgttcctctgacgtagaatgaattacgtcagaggatccggttcctccccttcccctttcctcagacgaacccttcttcctctccgcgatttcccctcacctcgcggaggcggcgaggcgatctgcgcgcgatcccattcgattcgccccgaattagccgccaaaaacactcgctgctgctctgctcactgggggggtggagcccacgcgggtgggcgaggcccggtggtgctcgcggcgggtggggggagggggcggcggcggcgccgcgatctgaaaccctaggtggtgggctgcggcggcgggagagatggatgcgaggttcccgtactcgccggccgaggtggccaaggtgcagctggtgcagttcggcatcctcagccccgacgagatcgtaataccccccgctccctcctcctccccctccccctcccccgccgccgccgccactgtttggtttctctctctgtgtgttcgcggagtctggaattcgagcgggttgggtcaggtcggggggggggggggggggggggctgagtttgggtggatgggtgaacttgctagcttaagattgctgttgggcgagtttggcatcacaagttccaattgaacgtttaccaggagctcgaaatgtttcaaattgggaccattgtttggtttgagtcgctacttcgatgtttcagggggaatgaatttatcatttgtagcgtatgaacaaccatgtgtaacttcaaattttgtgcactacaattacaaggaaacggtgttctgtttttgttgtaacttgtaatataaggtgtgtagtgaagcaattaggattgaacctgctagcagtgtacttataatgcaagcaatcggtggaacatgtactgttgtcataagttgtgaggcatcgaatcgaatttgtactttgcagagtcattgttgtgcggttccgtgtacctgttgagttgggaagctctgatctttacaatgaagtttaaatttttcagtacgcccgaggtttagttattgtgttgataataacatggactagatggatttgatagtattgagtcatcaggtttaatggttctgcttcagcaatgtgataagtgctcaattacaagattaccgttgcatgtggagtgtgtaaaaaaacataatttttaggatggtatttgatgtggtttctgtgttgctttgcatctttgtagaggcaaatgtcagtggtgcagatagagcatgcagaaaccatggaaagggggaagcccaagcctggtggcttgagtgaccctcggttggggactattgaccagaagatcaaatgtgagacatgcatggctgggatggcggagtgcccaggccactttggccaccttgagcttgctaagccaatgttccatatcggcttcatcaagactgtactctccataatgcgttgcgtctgcttcaattgttccaagatccttgcggatgaggtacatggaccccacttctcgggtttggctgttttgcaggactttgttatatgaaaaatatcttaacaaaggaggcaccattgattttatgctacacatgctaaactggaactgaaccctatttattctgattcctgactattcatggaaacacagctatacttgtaatttgccatttttaactctgttatgttttgcatgttttgtgtttgcaaactaaatctggtaatatccttttatgttacactcgtttaacatgtgaaaatacaatttttttttgcgacttacttttccccttctgttgtcctcttttttactgttaaggcaaaaaccggaagatgcctttgttttcaatgctggacatgctaaactggaatcatattgatataaaatgtttattcggactatacatgcaaacgtaaatcttattttatctttgtaccggatctagctcttacgttttccatcttttctcaactctgagtttatttatcaatgggtgaatgcttttgttgcaggatgataccaagttcaagcaggctcttaaaataaggaacccaaaaaatagactgaaaagaatatatgatgcttgcaagagcaaaaaagtttgcgcggggggtgatgacctcgatgttcaggagcagcaagatactgatgagccagtaaagaaaaggggtggctgtggtgctcagcagccaaatatcactgttgatggtatgaagatggttgcagagtttaaagcaccaaagaagaaaaacgatgatcaagagcaactccctgaaccagtggagcgaaagcaaatcctctcagctgagagggtatgcacacaatctttactcaggttcaatacattatttttaagaatatccatttaactatgtggttcctgtttattttgtacttaggtgctcaatgttcttaaacgtataagtgatgaggactgtcttctattgggtctgaaccctaaatttgcccgccctgactggatgattttgcaagtccttccaattcccccaccccctgtgaggccatctgtcatgatggatacctcttccagaagtgaggtgagttatatgccacacttttttttaaccttcctactggatgattttaagaatgatgcaccttcatgaactctctgctattctttacaggatgatttgactcatcaattagctatgataattcgacataatgagaacttgaggaggcaagagagaaatggggccccagctcacataataacagagtttgctcaattgttgcaatttcacattgcaacatactttgacaatgaacttcctggccagccaagggtgagcagattacagtcgttttgccattttacttgatgcaaataagttatcctgattatctttttgttggaattttcaggccacacagcgttctggaaggcctattaaatcaatttgcagcaggctgaaagcaaaggaaggccgcattagaggaaacttgatgggaaagcgtgttgatttctcagctcgtactgtcatcacaccagatccgaatattaacattgatgaattgggagtgccatggagtattgctttgaacttgacatacccagaaactgtcattccatataacatcgagaggtaaaaaaaaaaacatctttactgttattgaggcatgatcacagttctttaatgatcacttacacctaaattcaatgatctcagattgaaagcgcttcttgaatatgggcctcaccctccccctggcaagacaggtgcaaagtatattatcagggaagacggtcgggctgcagg

SEQ ID NO: 17489 - DNA, 919 bp, Oryza sativa
tgagtttgggtggatgggtgaacttgctagcttaagattgctgttgggcgagtttggtatcacaagttccaattgaacattacaaggagctcgaaatgtttgaaattcggatcagtctttggttgagtcggtacttggatgtttcaaggggaatgaggttatcacttgtagcgtatgaacaaccacgtgtaacttaaaattttgtgcactacaattacaaggaaacggtgttctgtttttgttgtaacttgtaatataaggtgtatagtgacgcaattaggatggaacttgctagcagtgtacttataatgcaagcaatcggtggaacatgtactgttgtcataagttgtgaggcatcgaattgaatttgtactttgcagagtcattgttgtgcggtgccgtgtacctgttgagttgggaagctctgatctttacaatgaagtttaaatttttcagtacgcctgaggtttagttattgtgttgatagtaacatggactagatggatttgatagtattgagtcatcaggtttaatggttctgcttcggcaatgtgataagtgctcaattacaagattaccgttgcatgtggagtgtgtaaaaaaacataatttttaggatggtatttgatgtggtttctgtgttgctttgcatctttgtagaggcaaatgtcagtggtgcagatagagcatgcagaaaccatggaaagggggaagcccaagcctggtggcttgagtgaccctcggttggggactattgaccagaagatcaaatgtgagacatgcatggctgggatggcggagtgcccaggccactttggccgccttgagcttgctaagccaatgttccatatcggcttcatcaagactgtactctccataatgcgttgcgtctgcttcaattgttccaagatccttgcgg

SEQ ID NO: 17490 - DNA, 983 bp, Oryza sativa
gaattcctgcagcccatcaaaggggacaaatcggaagaagcccgagaagaatacgaagggaggggatagtaagaagcaagatgacagttcgaagccagatgataaactccctcccccattcaagaagcattccatattttttaagtacctcccgtactggaaagatctggaggttcggcataccatagacgtcatgcatctagagaagaatgtgtttgacaacatagttggaacattgttggacatgccgaagaagactaaagatggtctgcaatcaaggatggacctagtcgagatgggaatcaaggaagagttacaccctcaagaaggagaaaagaatggcaaagtatatcttccaccagcctgtttcacactgacagcctgtttcaattttgcaggatatgtgaatttgtcaaggattttaaataacatgttggagggtatgttaacattttttttaaaaaaagtggaggatatgtttgccttttccattttttttagtcaacatgtcgatgaaataaggaagtcaattagtgcactacttgataataacaaatcaaattttgtacaaatttgtttgtagtaattaatttagcataatagtaagtagctattagtttcgctatttaaatttgtttgtactaattaatttagcataacagtaagtactagttaaatttggaaatctcagagaatttaaatttgttcatacgacatattgttaatatacaatttatttttgtactaattagtttgtactaatttgagtaatttaaaatgtggacgataacacttttttttacattagaggtttgaaacgatggccaatagtactcctaagaggatatgtgaatttgtcaaggattttaaataacatgttggagggtatgttaacatttttttttaaaaaaaagtggaggatatgtttgccttctccattttttttagtcaacatgttgatgaaataggaagtcaattagtgc

SEQ ID NO: 17491 - DNA, 15303 bp, Oryza sativa
agtttcgctatttaaatttgtttgtactaattaatttagcataacagtaagtactagttaaatttggaaatctcagagaatttaaatttgttcatacgacatattgttaatatacaatttatttttgtactaattagtttgtactaatttgagtaatttaaaatgtggacgataacacttttttttacattagaggtttgaaacgatggccaatagtactcctaagaggaaggtgactgataaggcggatgatccagagatgcaaaaggaaaatccagtgccggaagtgccaccggagattgcattgccggaggcagccatggagatttcaccgccggagacagccatggagattccagtgccggatgtgcccatggagattacagtggcagaaccagaggtgcaatttgtagcatcagtcgggtcagacaaagaagaagtaccaggattggaatgggatggtacaaagccagaaatatttgaagacccttctcctatgaaagaccccgatgtgccacgagtgcttaggagccatgactccaagtccaaagatgagaacaaggagaagttcatagtaaccgtcttcagagggggtaaggaacgtgccaagctcagagatgacaacccccagaaggctgctgaactagccgggccaacatacttcgcaaccgatgattgcccggaaaagtacgaacatgggaaagcactcttgccggaatgggcactgaaagaagcactatgggagatgagaaggttacataacttctacatggaggccagcaagaaaggcttgggcaatataacagcttgatcacctgcagattgtttcggcgaagaaggttacgtatggctagatttctcagatctccacgccatatatcgtcgggataagatggacgtcaattacgtcggtgtttggtgcatgtgagtatgagttttaattaattagatgaaaaaaaatgtacaatacaaatccatgtgattgttactaacaaacttcttctataggatgcaatacatggatgctaagaagaaaaaagaacccatcagcttcttgtatccaactcggatctgccaaacacagcataccgtgatgctagcaccagggtcaaaccagctgaagggcaagaatccaaaagagatagcagaatacaagaagggcttgcacaaggagaaattgattactgtcgcatagtacattagatgagccttcttgcactttcaaaataagagagtcgttatagccgcttataattttaagtaagtccggtacatttatcttgtacacatatgtcttattttagctggtactaaataactataatgttgttaatatgtagcgatcattatatctgtttactcatccaccctaaagacggaaccatggtagtcttggatcctctcgattacagtcacaagcaatacaaagaatttctaacaatcttacagtagtaagttattatgactcttgcatttgtatatgaatgtattacaaataaatatcctccttactctgaaacggtacgacatccatatacatccatatagtgcataccaatactataagttcaagggtggagaacagacccgaacacgggagaagctgctagtacgtacctattggccggtaatactccactcactttatgtattccaattgtttcactaattgcaaattttaactacttttttctatgatatgtcctgaagtgtcacaagcaaccgcgaggaacggtcctttgcaggtattatgcgtgcgaattccttagggttaatggacggtacaggactaacgcggaggatgtaagtctctatactatgtactagacagcacttgatatttatgatactaatatattgattaatttcaatgcatgcagttgccaagattagaatgtcgaacaagctttgacgatacaggtatcacaaatgtccagcgtgatctgtgccacttcatccaccatgagtgctgtcatgtcaaaggagatttctttgacccagagggtgccctagcggcaagtgacgaattcaaggatcttcgggagtggaacactgctatgccataatgtaactagatgacgttatttgaagtgacaatgtaaaaaaatattgtaatatatatattttgtcaacatttttgagttatgcaatatatgtaaatttctcagtaccaaatgcttgataatcttccaatatatgtacataaaaatctacatgcaagaatttctattaaataatttaaaagtaatttacggccaaattataattaaatttcaatattttctacctatcttcgcaggcggaagtttttttttttttgcaagcggacgattcctattttcgcaggcggaccggactagccaacgtccgtctgcgaaaataatcttcgcaggcggacggccgccccgcctgcgaagacccttttcgaccgcttgcgataatgcttttcctagtagtggaacacattattcggatacaccaaaaaataatttgagtatatatatatatatatatatatacgggtttatgattattgaggcataggtggaattgtatgttgtgttttctttctgaaactttaattttatacattatgatggagagcgagaatggctatagattctgttgaagcaaatgtcggggtttatccattatctaaagagaaaatgaagagatcgaggggatgccatgttaatattcacatggatattttcattattgacatggatatcttaaatatattttttatctaagtattagaacgttgagtgataagcaataacttttggactaagcgacaatcttcttcagactgtctatccatttgtcaggtgatttctaaccaaaaatcacccaaattttttctactcctagatttacatccaacggactacaaaagaatataacaaatacatatttacttaacatttttttatcaaaattacggtgcacttacatgtcttatcaactgaatttacaaatgtaattttagttatataggactgtaattttatattttaaagaaaattacaaatatatatttacttacacattattttttttcaaaattacagggcacttacatgtcatatcaactgatttacaaatataattttaattttagttatataggactgtaattttatattttaaagaaaataacaatatatatttacttacacattatttttatcaaaattacagtgcacttacatgccatatcaactgaatttacaaatgtaattttagttatatatgactgtaattttatattttaaagaaaacaacaaatatatatttacttacacattatttttatcaaaattacaaggcatttacatgatatatcaactgaatttacaaatgtaattttagttatataggattgtaactttgtatttcacggtgacgacgacgacgagagtggccgtactgccggcggccagctcaatcagaggccaccttggcaccgtgcttctccatcatcacgcgcgcacgcggtagctaggtaacacaggccgacgtgcctgccggccggcgagctgcatggaacgtcgaccttgcaaattgccgctcgcatcgcaagctgcatggaggccaaaaaaaagtgtcaaatgccagcaaaaaaatcacacgggagatggatagcaaaatcaaaaaaacaatcttcttttcagataggaagacacgtctgtcatgggcatttaatgggccaggtaaagacctattgaacgggccctgatgtaaatcaccactgcgtggccaggcccaaccccaatttggaaacctgactagttatgggataagttcatctgaggtcccttaactttacaccgaatccgattttcgtccctcgatcagaaaaccagacacagcgggtccctcaattattaaaaccggtgcagattaggtccctcggctgttttgagagcggttttggctgacgtgacacctatgtggctaatttgactcggtctttgtccgacgtggcgcttacgtggcaattcgacccgtgggacccacatgtcagtctcacatagaaaataataaaaaatcgtgggacccacgtgggtcccacatgtcagtccaactcacccctcttcttcctcctctctccccatctccctctcttcatctccctatctctgctctctccaggcgccacggaagacaacggcgcgtggcggcgcgcggccggcggcaggagaggagggagcaacgcgcaaagaccggcgaggtgggcagggagggaggacgcaaggaggccggcgatggccaagcgccgtgggcgggggcttgatggcgacggacagagggagaggtgcgcagccgacggcggccagcgggagagggagcggcgaccgccctccgccgcaacctacctccaccaccaagctcgtcagcgactgcccaccggagtgagcaggacgacagccggcgacgggtgaagaggatgaaggcggcggtatggagcagaggtcggaggagggcccccagccgctaggatggcgctcgatccgtcgcgtttcaccaccaccgagctcgtcagctgcagcccaccggagcgaggagcgaggagcttccgcttccccttcctcccattgacgccgcagccgcagcaactgaggcgccgctccccatgccgccgcttctgtggctgttaacagtaaaatttggtaagcccggagtagtcattggcttagagtcaatatcggtttggaagtcctgagattagccgatgagagttgtcaagtcgtcagttgtcggattcttgctatattcggttaaggaaattgatctactaaaggaagcttattcagaagagaccaagttcaaagagaatgcggcatagcaagttatctattaattaggaatagtttgttagtttccttttatctctaggaaagtgtgtttagtgtcctataaggactttatcattttcttttatctttaggaaagtttctttcttgtccgacaaggacttgtatcaacccatgggtataaatatgtacacccggggtctatgtaatctatctccacgatcaatacaattcggtgcatcgccaccttttaccttttctactttattttatcatccggcgggacttggcacttgacgcggggctgcatcggtgttcgatctccggctaaggggtaagtccaatgttccgccggcccagggaattgtatcgtttacgtcggcgtcgttcaaggctgcatcagtacattcgacctcttggattgctctggtttggatgatatatttgcctacctatttatcatatgtatctgttaatctagtcttagcatatcaatttagctctatcggctacttctcgttttagggtttctgccggtatcggctaaatcgtgttgctagattagattagcttagacatctaccaccctgaaaactcagtcaatggcttgattgtctagatattatgtttcttttcatacttagtgctgcatcagttaagtttgtctactaagtcgtgcttagaaccataatctctagcctgcttcttgattgccaataagggtatcatcggggtttcagccagtgagttatctggacgttgcatcggctcataaggattgcatatacatataagttggatttagccgatgacaataaaggtttcactatttaatctaatcttgtggatttcatgacatcggacctccagccaatgtgtgctttaaacctcggatcgatgcttatttatcatatcattgctagccgattggtttctaccggattatattgcaatattatactatcatcagccgattgcttttatatcatcatctacattggacatatagccgatttatcaaaatcctatcgctatcggctggtattggcatcggctattatcgatatcggctgagattgctccatcggcttgtcagccaatcgactgttttgatctactatttgcatatcttgtcagtttcaggatcaaactgactggcacgcccgcatctcatcaatctttggacctgcacaggagctaagcagatctcccaggccagtatgttcgattttttcgtcaacagtggcgcacgccggatgcggacggggacgccatggccgtggccgcggacgacgtcgacgtcgacctcggcatcctcggcaactcccaggggccccgcgccgccaccactaccgggaggaatagcgcacggcggacgtcctcctcctccggctgccaccgccacgcctccccgcatggctgcatctcctcctcctccttcggcggccatcgctgcacgccgccccttctccccgccggccaccgcccttctcccggccgccactgccggatctcgattgccggcgctgctctggggggagctgtgttaacaaccaaatttggtaatatcagcatcggaaaggaagatcagatcgaagcggaatcgaagatgaggattatcgctgaaacagagtaagaattggctggagtccagatcggctatgattggatcggctgagcccgagtcagacttggttaagtgatgtagccgattccgacaatatgacctaatgtacaacgtcgggttgaattgatatgcttcaagatgattgccacgcatggatagagtcctgataaggcaattgtatctattaattaggatattttgtgtaatttccatagagatatgtttggacaaaagtctgccgcaaagatttatggtatcttagagtttgttagagataagagtcgtgtctgatatggacatagtttgtaattttcgggtataaatagaccccgaaccccatgtaatcaattaacacacacgttcaatacactttcggtgcatcgccaccctttttgctttagtttatttcgacgagttcttactttcgggttgagctgcatcggtttcgatcttcaacaagaggtaaaacttgttatgacggcttgcgttctcgggattggtgcttccatctttatgatactctaatattgtttatgtaattcgtcgagttatcatatattttacataatctctggcaatatcgcaatttaacctattatcggctaaacatctgtcggtagaaggcagccgattaggttaaatatcgatgttgactttgattatataggatatctaccactctatgaaacctccagtgacttgattgtctagatattgttcttcttttcatacttaatgctgcatcagttgagtttgatctattaagtcgtgcttagaatatcaatctctagcctgccttctggttgccgattagggtagtatcggggttgcagtcgatcttatcttatttaactatatttactctatatgcttcattgatatgttaaatctgccctttatattaagatcttgttgcatttaagtatattagacttttgtttgatatatcctacttgtcttaatatcttagtataaaatggtatcggagtattagccgatacatgctaaatctgtttgatcggctatgctatgaacatatataatcctattattaatatatatttcgatctaagtgatttatactgtctcggcatagcgaccgatctatctcaatcacttgatttaagtatatatcgatataaggattatatattgttaatatctacaaccgatcgaatagatttagttccttcatatttaataatgactgccgatcgatgtatatatgacatcggctcaaagataaatgatatgtcatcggcacttagccgatcggctatcgtttatggatttaaccacggtttctttgtttttgtttcttgttgattgcaggatcaaatcaactggcacgctagcataacccgcagcgagttttggacctgcactggagttaagcagatctcccaggcctcgtgttttacatcaacaacctgccgccgcccgggtcgatctgttccgcccaccgccatcgccgattcccttttatcgccccagcttcctcctccagctcggtgctctcgctggtgggcgtcggtctcgccgccccctctagctcgccgctctcgccggaagaggagaggagaggggagagtgatgaagagagggagatggggagagaggatgaagaagaggaagggtgagtttgactgacatgtggggcccacgatttttttattattttctatgtgagactaacatgtgggtcccatggattttattatttttccggatcgaattgccacataagcgccacgtcaatgccacgtcggacgaagaccgagtcaaattagccatgtaggcgtcatgtcagccaaaaccgccatcaaaaccgccgagagacctaatctgcactggttttgatagttgagggacccgttgtgtcttattttccgattgagggatgaaaatcggatttggtgtaaagttaagggacctcagatgaacttattccactagttattagtgtactttttcctattaggaaaggcctgttacaagcctaaatttaaccctcctctcaaaacaagaaaggtcaaagctttaggttgatcgtccttaaattcttctgtaggacgtttttttttctttttaaaaaaatcagtattaattctgaccgttgatttcttgtgagttgtattcttagtttcaacttaacagccaccaacatcatttagacggaattgctacatcacatttaacaaaaaaaagtggaggccggctagctataatcttgtagttttcttacattagggaatgcttcacgattcgtgcgagagctcattctcctctagcttcagtgcatccaatgaactacagcaaccgacagcgactcaacaattaaggttcagtgttcaaggtagggtcaagggtggacgctcacaatttcttctttaaaaaaatatttggactttggagggatgtcttttcctccaaatctctttttttttaatattagtcaatcccttatttgaaatcactttgaaatatagatccgtatatataaattcaaattaaccaactggaaaaggttcaaccattaagcaaagtctggttagaacgcgctaatactctctttagttataaatatttgacgcatagggaaagattttgtcaaccttttaaactttgatgcgagcatctccaacagattatccaaatcggactctccaaacacccatatagccaactctccatctaatttggctagtcaaactagttacttactccaacagactctccattatgtatctatgacagcgggacccatatgtcagcctcaaataccccttcttcttcctcctcttttctccccttttccccgagccctccctcaccgacccctctaccacgtcgtctccaatctcactagtgtcgccgctccattcatgctgccgccgctcatcccttcttctctctctccggtgctcgagagcagacggcgagtgggaggccttcgcggcggtcgaaatcggcactaggcgctggcggcagcgagcgggaggctgcagcgatgctcgccgtcatgctacctgctgccgcggccgcgggcggatcttgtgctaattgtctcgccaccgcccaagtctccaccactgcgcagccgactaggcgggaaggcgagaagcgaggcgagatgggtggagcagatgacggggaggaggaaagggtggggcgacggaggcctggggcggagatgttgacggcaatggcgaggctgggtgacgactgtgctgccgcgtcggatggggagatggcggcggtggctgctcgaggcgaggggatttgcgcgacgcttgacgcttctactcgcgggcgatgtgatggtggcgacgccgtgacgatggggagaggtggatgggaggtggtggtggcggcgaggtagctgctcggaactcaggaggcgttgtcactggcatttctcagggcagtgttgcttgatgatgtctttggccagccaaaccagctggctagatttggctagcccacctgatcatttggccagcgagatggcttagccatccaaatggagagtttgttgcacctcattttcttgctatgtttgctattttttaacttggagagtgggatggctgaccggttggagatgctcttagatgcctaaaatctttttaaagaaatgttgagatttggcttggaaagttatataataaatttattggaatttacaaatttattctaatataaaattaaagatcaatgtttcacaagtttaataaaactttatcctaaacattaaatatctatgaccaaagagcatatatactccctttaaatgaactaaacaacatcatacacaaattaaatgtaaagagggagcagtatttttcatggatgcatatgagcatatccaaaacggtcgttgtatatatccggcccttatttaggatagaacatgtgtgctaggtagcacacggtaatcgaattttaatttgtcgttctcataacgtcagctggtagcagcaatactcgttcgtccgttcttggttgtacaaaactaattgcgctactccctccgttttgtaataggtaacaacgttaatgttttatcatatatttaacgatcgtcttattaaaaacattatctaattataatttattttttaagttattttgtccttaaaagtattatgagcatgattgatatcttatacattcacataaaaattttaaataagacgaatgataaaatatatgtttaaaagtcaacaacgttatctattaaaaaatgaagggagtaaactttgccttgtacaagggaccaagaaagagacgacgccgttgacacgctagctagctcactgcattaatcacacacacaaaacaacaaatcaaatgggactaggaggagaccaaaccaatcagtaacatggctatatatatagagagagagagagacacacacacacccatcctgatccagctcgatctaaccgatcgattcatcatcaacaattcacaagaactccatcacttacagtgcaaatcaagctgatttcatcagacaaatttcactaataactagcttagctgccgtagagccgtgtgcgatcaagatcgtatcatccatggcgttctacaagtacggcttcgccttcttggccggcaccggcttcggcgccgcgctcaccagcctccgccgcgacggcgacagctgctgccccatgcgccgccgccgccgccgctgtcgccgccaccaccacgacgacgacgaccagctggtcgacggcgacggcgacggcgaggctgcaggggaagagcgagacatgaaggagagcaagagggcgacgacgacgacgaatccgaaggccaagaaaggcagcaacaaggagaagaaggcagctgctagtgttgctagggaggaggaggatgacgatgatgaataggattaatttgagttgattattaattaagttcagtttgagttcagctattatatatttttaggtgcttgattccgttgctgtgccagtttaattgtgcttgtttagctctgtactcgttatcctgttgtgtgtattgacaaaaataagagaatatacatatatacctctctgttgttaaaaaataagtacctttgtttgacggtttttattttttgcgttgtgaacgggagtcgtcagccatctcgatcttgaggaactcacaactaagataataataaaactagctagtagaataaatttaggctaactcgggataaactcccattttgtgaccggaatggaaaattttctggataaatctacaaacgaattacgcttagcaaaacgataaagattgaacaaactaaggcaagatagagatatataatatgaaaagatgacacaattagctaattgtgtgttggattgttggttgttgtcaataaaacctaccatatttgttataaagatatcggtcttataatatgagagtttctccatgtctgttatagagatcaattaatacttgataaatctcaacacaagcaacaaaatatgagaaatatctcaactaggctcggaatcagagtttactggtcaaactggccatcatggcctggttggactgctagatttcagttagaccggcccatataatggttagatcggcctcttctatataggtattgggctttttaaatataatttggtcttgctataactgcccaactacaaaatttggttgtcaacatacaattccttttcttctttttttttttacaaatcaggaattaaaaagcacctacacatcggtattaagggcaataaaccattatcaaccataaaaaaacccttgtgagcatctcaaaaaaccggatatcttactgtagaaaaataattaaccgtaaataagaagactcggatcgtactaaacaggtaaaaaaactaattaactgagctaagcccacctcactatatttcaacacaattaattaactgcgcaagtctcctagattgctagcgagagaggcacaagaaaaataaaaaggccacaatttaatcgaccagacaaggacaagccttgctcggtgggtggttgggggtattacaaaaggtataaattcctgaagttcagctgttgtagtctgacccttggagaagaagttgatcatgaatcttttatccaccaaaaccgtgtgatagtggccaccccttgcaacgtcagatcatttcaactattatactactagtagttagcaatatcaattactacctccgtttcaacgttggacctattcgtgttatttgaaaaattagtgtaaatatgaaaaagaataagtcatgcttaaagcacttttgataataaagcaattcacaaacaaaataaataataattttatattttttaaaaaataagacgaatgattaaaagttaccaatctatacctaattaaaaaataagtaaggcttccggttaatctttttgtccgtcattaagagtgggcccacacgataattcgtcgctaatccacgatccgaaagcgtggccacgatctcttacgcctgcaaataaaggagaaaagaaaaataaaaagagaaaaccttgtttgtggagcagcccatccaaagcagcctggattggattagtgacgaggcagcccatccaaagcagctgcagaccggcccagatagcagccgcagcccaccagcgagcccacagagcggaggagaagcagcccaccagcccagcacagtactgcgcaacactgtagcaaccgaacacgaataaagtttggactcacgccaagcaggaaaaagaagagatcttattacttaaaacatgtagtcaccaataaaatgaattatttaccgacaaaataaattcttttttaaaaataaaaataatcacatgtgtctttctttttttttagaaagagtaatcaccaacaaattgaatcatgtttacatttggatttttttcgctcatcaattgcttattcgccacaggacacctaatcacatcactttttttttcattcattgtataatttcttctattatttagagtgaaagttattctgcgatataccacatttttttctttccttctgattatttaagtgagtggttatgcaattggagtgcagtgaggttgatctgatagctagcaaaaaatatttcttatattatggctactctttacaatatgaaaaaaaagtgcttatcaatatcgagtaccaaaaaaaaaacaaagtactgcaattgactcataataatacatgacaaaaaagtaaatattttttgtggtttcaaagtttagtatccatgtcagtggatttagagcaacaaataattatatcatgttagcgtcttatttgcactacaaagattcgattcgactataaagacctcaatgaacctggtggttttatgctcccacacactaattactattttttcttcccccaatgcaacgcatgggcattttgctagtaaagactcaaagcgataagtattttaagatggaggtagtattcaactcttgcatagaacatggccatcaataggttattaatctgttgtatactctgcactattattcctagatctttacatttccttagctttgctcccttcaattcctttcttgaacccttgtccaagaaacacatattcatccgattgatggacacactgatgctagcttcttcaatccagctaattaattacacacacataacacatataaatagcagcacagatacacgaattgttctcatccattaacaccacttctcatctgcagttcagacacacacacacacactgacacaaacatatatacttacatataaatacagatatatatatataggtggttagctacctgtatagtttatacattagctagtgtatgtgttgttgttgatcatcgatcgccggcgacgacagggagagatcgatccacgatgggttgcctgctgcggcggctgttcccgttcctggtcggcacggcggtgggcgtgtacgcggcgcagaattacaaggtccccaacctccggggcctcgccgaccgcggcgtcgacgccgccaagcactacgaggaggcctaccgcaagaagccctccgccggcggcggcggcggcgggagcaggaagaagatgaacaagaccgtcgagatcgacgacgacgaggagtaaattagttgatactgctagtgctagctcactagttattacattttctatgaaaacgagcagctagtgtgtatgatatgtaaattattggaatgttcttatgtgtacacgtaaaacttatacgtaaaccttatttgtactgtttctaaattaaaaaattaaaaagaccggatatattaataaaaataaaggacgaaaaattgatcaaatggcgaagtagtggccactttcactattgcaatcagccgaacgtgtaggtgaatcgaccattttgactcccatagaatcagattcgtaatctactactggagaaactatcgacgtttgatgtcgcgattccggtatttgtatagtatggggatcgttggtactaggatatatgtgagacttaggtaaaagagacggagaacacaccagcctatctaactgttgtcgacttggcggtctgtagtactgactcgtagtcgacaacagggtagccttcctcctcgaatccgcatccggcgagatcagagacagcgctatatctctcctgacagtatccgtaggcaccgtaggggactagccatgcctatctctgaaatcgatatccgacgtcttgtcttggcgtatgttggcttgtatgttgatcttgtgtcttgatctattgttccgtgtatgttgattgtgtcctctctcctcctaaggggcctaatatttatgggtaatttggaacc

SEQ ID NO: 17492 - DNA, 1245 bp, Oryza sativa
ggttccaaatttccctatatttatacccataggtgttcccttgtccaagtagaactagggaaaccaatatggatacaatccgagtagtccttgtcgtttccatgtagaactctaatcatccttccttatgcggaactcctcctatatccgaaggttgtttcggatacaatgcacagcctcctgtaccgataggagcaagccggccaagcataatgttctcagtgacacctctcaggtagtcagattcagcatatacagcagcatcaagcaagatatccaccgtctcttcaaaggaacatctcataagaggccctgtgtcattacggttgataccatgccttgtaatagccatcagatgccctctgtatgtcattgtatcacaaagaatggccagatgtctgtaattgacataagaaccatcgaaagatatgaccacccgcagctcatccaagagagctcgacgaacagcctcgattccaagaacctcaattacttcgatcaaatggttacttgttgtcctagtagcatcaacatcttcatggcacatgacagccaagagattaacaccttctgtatcaagcatccactcattatctgctttgaagccaacattgtcctcaaatttattgaccttcccatatttgataaaaactttgttaatatctggaattccacgaagtgccatctctgtctctgtcaacatgttactttcaatcttcttgaggaagacatcatcctcagcagactcatcctgtatttctccctttggagcttcatcatttgtgatgcggacacgaaggatcagtttatccgcattatcatcattaaatatgcatgacaagtcatcatcaaattcatgattgatcttctctgcaatatcagccatgctcaacttcttatcaaccatcatctcacgattcagctcgatacgcagcagccacggtgaaattttatctgggtcaatatcctcatcaggcatttcataataggaccggacaaattcaacatcttcttcaataatggttcccagtggatcaggatcataccatatctctgtagcatgtgtcacactgcgcagagtagtgtactctaaggcacattggacattcttagccagttctttcttcttgttcacctcaggctttaggtaaactgacaatgatggagtttttatcttcttagcaacattaatgatctctctcagcctgggaactccaagagtgacattcttggcactgacaccag

SEQ ID NO: 17493 - DNA, 2274 bp, Oryza sativa
tagtacgagttttatttttaaaatggtgtatgtactcaacgttacctgttggttgatccaattgactagcatcttttgtagcatgtgtggagtagtttgtgggtgtgtggtatcccatggcagttgtgtctccccatggatggagaggcccttgtatatcctcaatggtatcaataactttcgttactgctgcccttatcgctatcttaactgccgctgtaatattagtcttgaaagctctcttgaataggttagatgtgtgaatagcagtttgcatggtgcttatgtcgacgaaatctgatatggtaggcaaaatctcatcgatgcggtcgaatccatcctgaatgtaagatttcaactcctcgtatgcctgttttatgttatcatatataccacatgttagtttaaaatcccttgatcatgtgaaaattacaacttaatgaagaaacaatcaagtaacatagcatacggatggttgacatacctgtgacccgacagttccacgtacgtctaatgaagagaagtgtgattccaggaattttattaaatttttaccgccatcaatggctctagatgggatcttcgaaccggagcataagtttaggggagatagctctggcacatgggggttgttttctcttggttccttcatcaactgaacagcatgtatatcggaaattagctaaattttgcagccagaaataggcatattacagccagggtatcgtacatacctggagtttcccataacgagggaaggggaatcctgggttatgtttactaactacatcttgttgaatcatcctagcaatttgatcatcctcaaactgagaaatgtgacatgttttaacacatgtgatcccaaccttccggaactggagatttctcaaatattttacctgcaaaaatgattcacaatgacaatatgtgtgttgattgtatgctgcattaacaagtcagttttaaatgctaaccattagaaagatgatacacccgttaatggatagttgagccttattcggaaagcaggtgggcattgattctgctgctttcttcacctcatctacaacgaattgggaccagttgtactgttttatattgtcaacatcagaaacagccataatatacctaggagatatgaagtttgcgcaggattgcggtgccaaaagcttcgttgtgacaaagcacaaaagccgccatgaaaaccctcttttcatctattgtcatgggataaccatactgcttctttaggattctctctaagagtgatattttcaggtgtgaaaagtttggtatctcaaatatttcgcacaatatttgtttcttcccatccaattcatcttgagagcaagggataataggttgacctgagcatggcaagccaaaaactgcattcacatcattaggaccgaatggcaactcctggttgacatctttaaacaatagcgcatgatttcggatcaactttgctcagtagccatgcaccaaactgcctgtttaccttagtaagcttgatatccaaaagtccatcaaacccaacttcaccaatcaactccttcttcctatcatcgaatctttaatgatattcactacgcatttgggctgacacctgcagttgataccaaaggtagtgttgtctttcttctgtctatttaaaactctgctttgccgatacctggataccacccgtgcagcagtcttatttaggctgccccttgtgccagaaaccttcaaagcctgcagataattagtttttcatttcataaatagacaatactacatggaccagtgtatttaaaaattcaacatatacttctatttttttaaaaaaaacagcatacactcatatatgtatggaaagatgaagtacaaaatactgcgtagcaaattctacctatgtgtaccctcttaattaaaaaaaatcatgtgcactgaaagaaaagtcagtatatgcaaagtttagagaatattactgtatgtaaaaaatcagcatatacctctctatgtaaaagtgcagtatatacttcttcgtaacaaggtccagtatgtaaaccactatggaaaagcctctgtatatatgtggaaaaatgcagtatatgctatcttctagaaaagttcagtatgtaccacatacaaaattcagtacatactatatgctgtcgtataacaaagctcagtacaaagcctcccatagaaaaattcagtatatctgtgaaaaattcagtaaatactggtgcgtatcaaagttcagtctatgaatcactgtggaaagat

SEQ ID NO: 17494 - DNA, 3623 bp, Oryza sativa
attcctgcagcccctttatccgtatgtcacttattaaacttgttatgtataattgagtatcatagtcatctttaatgttaacgactgaaagataattatatcatataaactatatagacactataactgctagatccattatgcgctcggtaacccccgccggctggcagcctccgatgctcatcgacctacacaaaatgaattcatcgtcttgatttagggattgaaagtaatattttcataataaacacttagtagaggtagattttattgacgtgcaattcttttgcacgttcgcgaaaaaaaaggtagatttgcgtaggatctataatttttcagatccaccactagctgccatgtgtaccagtggttggctcattaatttgaactatgcattgtggttttacacaataaggagctaagaatgtgatgaagatctaaataggtgctataaatcatgtattacataaaaatgaatgtcatttttatcgagtttttatctttttttaaacttatttttctaagtaaatttcataaaaatacaaatactttgaccaaactatcgtaaaactgcgtattcatggtgttgtaccacaaaactatatatttaatattaagtttatcacaaaactacagatttaaaatatatgatcgcaaaactatagattaagtagcaaatttattacaaaactataggtttactgtcaatttaatcacaaaactacaacgtttatagttcaatcataatggtagtgctaaggatttcacctctaaattatgtggttttgtaataacttcgatattaaacatgcagggtgatacttggtcttaaatctatagttttctgataaatttaatgctaaatttgtagttttgtgatacaatgtattaaatatatagttttgtgattgtttgcttaacatatatgtagttttgtgaaatttactctactttttttattcatgagttttggtctccactctccagttaatattatttcccatgcattgctatcagtgtatagtacatgcacgtactactttatattgtccatctagctggtgcaatatatatttactggccagagatcgagaggatcgtcggcacagtggatttaattttgtttacaaagtctgcatggtcctaatcacacgcataactagggcctaatttagcagggggccaggtactggtgcgagataattagttgtagggttgtagtcatggtcgtacggtgtatctttgatttcctgccctcctgtcgccccacttagatatatcattacatggtccatgcatccacacacatctctgcatcatgcattcgcagtacgtactcgcctccaaatatttctccattgaattaaccataaatgatagcaaagtacgtactcgattaaactcgaattcgaatgcgcgtgcatatgtatatatatccacgtacgtaccttagtttgcgctgaaatggaaactaaacttgttgacatatgtattggattatttagaactcttaatatcatgtgggggtacatatatgtccaaatcaatggaaatatgatgtgggactcaaattaaatcttcgtctatgaactccaaatttaagtaattcagaaaaggtccaaattcagctaaaataaaaacacaggatacaacagcacgtccaagagagagctgcaattataatgcatgcgtggcccatcaagaaaagaaccgatcgacgatcgatctgctgcttaatgtcaaatatcaaattaataaagcatccatgcattaaacaacacgcattagcctttcaaagtacagaaacatgaagctctcactagactagctagcagtacactctactgtcctcttataattaaaagcactgatcgatcatgtctccagacatgcatgaatcgatcgatctgcaacttcgcaaacctctcgccatccaaacttaatttggatttactactaaccaaaccagtcatcacgatgcaaattatatcaacttacaagaaggcacagatatatcgcttcctagtagtagtactagtttgctagctagttatatatcacttaattgttctctgaaaatataaaatactccagttctgttcagcaggaggggctagtagttgagccgcaggcatgctcgatctaacggccagccacggatgcgccgagctatcggtagatgcatggtcggtggcgatcggtcacatgaggaggctcctgatgacggccgcctggtcgctggtgacgtcgggggaggcgagcagctgagcgagcgtctcgctgaggttgtccacctcctggtgcaggctcctgatgtagctgcacgtctcctgcaaaaccctcgccgccgagccctgcattcatacgcacacgcggctgtgagctcactagctacttcactcatgggggctctctctctggttgtgttcgacatggaaaggatgctatgcttaccctatgggcgccattgcgagcctgagactccgggagcagggcctgaagcttggagagaagctcggcgatctggtcctccgagatcgacgtcctcgacgacgacgacgacgacggcaccgagctcccggctcgccgtgagcgcgacctccggctgctcgacatggttgcaaattacaaccacttgcagtgcagctatctagctagcttatatagtactaatagcttagttgagctagaagagcaagctaggtgtgcgtagcttatagctagatttgatgcctgagattggcagttgcaggcgagctgagctatatataatggccgggcgccgctagcgagagcttgcttagctaggccgccgcaagaggccgggaggtggaagcggagctgggagagtaagaggagagagaggcgaggctgaggccagcagcagggagggagaaagcgagagttgtaattgtgcgacagcgagagagacgttgtgatgacttgcgagcataaatcgactaatagtcttgagcatgtgttgcggtgcgaggacgactgaggagaagctactagctgcagcctgtgtgtgcgtgtgtgtgcgtgcttctttttatttggttcgtacttgcattttggccgctggatttgtctgtactctgtactatatgtgtgtggttttctggccggccctgtgctgttctctgaatctgcactccctcccctggatctgcagatcgatgccgttcatgctagctgctgggcatcactaaatagattagtcatcgatcagtagcatcttaattattgtagcatttcctctcaaagaataaagcatccttgtagtattaatccattatctaaaaatcttgtagtactgagtaaaaaaacagttttaattttcagaacctaaaaaaacagtattgcaatttcactggcattacctagctaataatatttcgacacaatttaaatttttaacgaggctaattaagtattccatatgtacatcgcttctggttgaatttttgcaatagcgactgataagaaaatagagggatggtatggggcaagtcacagtaactgagaacgacaacagaagaatgcttagcatcgtgatgttctttttgtttccaaaatctgagagttgttttcagtacggggagagcaagtcactccgtatg

SEQ ID NO: 17495 - DNA, 6376 bp, Oryza sativa
cccccccccccccccccgttgtccatcgggatcgaaccaagcaaaatagccaaggagtccaaattcatgtttggttagaataaaggggaaaaatcgtcttttcacgtgtctaatcatggctaaccaatcgtttattagacggaaaatatgacggaggggcaataaatcgaagaaaaactagtggcatgtgcttgtggtttaaagcggagaaattttatgatattttttggaaccaatgttttttctatgctatgaatcaaattttctcttaaaaaatgggttttactctattcctatgttccgaacaccttatcgcatcccccctctactttatacatgcatcactattttattcttgtggtttgtattcatatatgttccagatgagctcttaacttcggtttccgtcgatataattatattttgcatacagtaaatttttaaaatacaattagatctgatatacacctctattttcatggatacaattaaactttgtgtacaaacatttggtgatctacacttttataatatggacctatcatgattgaacggtgcattcgctccgtcccaaaataaataaacttttgtatataaatatagaaagttgttttattctaggatagagagtaaatctttattatttattcctactaacataaaaagtttctaagttgaccgatctctcgtgtatggatacaagacagtagacatatatttgcccacgtcacaccgacgtcaacttggtactacgaagtaaattaaggacagataccagtatcactataggcggtgcggcatatgcatgtggagttcgccatctcgcgaaaagggaaacaggtgatcgatcgagctaaagagagcaggtcgagaattgtccggccggcttccaggccatgagacaacaacggcaggcatggctcctctcctgccatcggtctctcgccactgtccatctacacgtacgcaccccatctcgtaccgtacttgtgccgctctataaaccgcgtgcgtgagctatctaagctatcgtgctcgatccgcatccatcagaccctgacgaatatacacatgcctgtacacaactgaagctgaacagctccaggagtccagctgcattcgtgcgtgcgttcttgtcgctttgtcgtcagccaccatcgtcctcgtggcaataactcgaccagctcgatcaccatttgggcggtgtggtacgtgcgggcgcctagctggattgcatggagcgaaagctgcgaaaaccccaacgacactgttaacgaaagcgcagtcgtaggttgaaccagcaggtagtgaataattgtattggcaggtgtttgtgcattgcacgcctgcacatcccatcgtcgtcgttagctcccccgcacgtacgggggagccctgttcaccattgaaacgaggtatacaacgtcggtttctgcggtctgtgcagcgcgtgtatctgcgtactgtcaggtgtttgtatcctcttggtttatctgccgattgataccgttgttattgtgtgtatacttcaggccactgttcgttcccgatggttgccataccaaccttgtcgtttgtcgattccatcccgaacgtcgtcattgcgatttgcctattggactgaaacattcttgtactaatcgataccggtgtggcggtgtattaacaattataagtttgttaatatatgttgaattgttaaatatgttatctgaattttgggcatacgataaattcggattagttttctaatagagagagactacagaacgggattccgttagaacgggatattttaagtgactcctccccgcttccacgtgcgctctctcctgatacctggtaccttggatactagttggtacctgatacctagtatctttggtatcggttgggtactggctgataccggtacttagatattttaagtgattccttgctgatacctggtaccagggtactagttgatacttggtacctagtaccacttggtacctggtaccacacctggtacctggtaccttggtattgagctggtaccaaggtctgatacctaggtaccaggcgtgataaccaaaagagagagcgaacgaaggcatctcagcttcgcttgaggcggagagacgttgcgcgccgccggccgccgcggctgctgctcgcacggggcaagaccacagcgacacagcacgtggcggcgcgacgcctggacaacaccttcgagaagctcgcgtcggcgcacctccagcttgtggtggcggcgccattggtggacgcgctgcgcgggtcgcccaccgagccgctcgcgctccccgaccacgcccaccacctcccgctccggctccaccggcgaggcgcgttcccgctctccctcatgctcatcacgcccgccgccgagctcctcgccgtcactacctcccccgcggcggcggctgccggctctagcgaggcggtggggcgacggcaacagggagagctgcacctcgagtgccatctgatttgggggaggggagtgaagtaggaggaggggatccgaatgatttgggggagaagagtgaggtaggaggaggggatcgatcgatttgggggaggagagtgaggtaggaggagggatcgatctggattagaatcccgtctccacgggataccggtgtgtagattttctctttctaatagaactcgactattaagattagtttcctagtatgactcttaagtttttccctaataggactcttatatttctcctatatatatatccctcgtaaactgcacgggaggatgcaacagcccaatgtatcctctgcgtttgtattcaactcctctatagtgattattgccggtcggagcccgtggttttttcctgcaagggtattccacgtaaaattcatgtctccgttgtgcatctattttcataacattaaattgtttatatataatattgtaatgaaactaagttcaagatttctttcaaaatttaaaagcatgttaaaatgtgcggttattcggttgtatacgtggaaccaattcaaccaagtgctaactcaattttatttgtaagtgagcataagctttgagcatcattcgtatcaaaattgatcggatgaaaatttcacaacttcacttgccgcagcaaatggatcgaccaaatgatgagggaaaatattaaccaaagaagatatttcataataacatgggttgattggatctatgtcattacaaatatatcattttagataaatgtcattaatattcgtctattcgcatcgatatcatccgaatacatacaaaatggaaactataccaccgccatcgcattttagattttcgaccccaatttcttcttgttctcctctctttggccagccacaacagcggcgccgacaccatcaccgccgcacacaccggcgatggtgaggcgtggcacggggaggagcaacgccggtcatagttggcactggccgttgccttccctatttcctccctcactatcgaaccctctattattcccttactggccgttgccttccctattacctcccatcgtcgtcgttgcattagagatgtcgcactgcaccgccatcgatgtcaccctattgtcaatccccaacacagccagatatctccttgctctcactccccaactatccacctttccaccaatcatgggtcgctgatgaccagatccacgtgaaatgcttgggcagacttcgccggcgtttgatgacgctctctctcgtggctcgatctcctggtgagggggataactctcgctttgatcgagtgcgacgtttgcgacgtggctaccaaccagaacaagtccaggacgccatgcaatcgctacaccacaaacgatgtcgtaccaaccgtgacgcgtggttgatgatccctgtaatgcaaacgagagaacactgcaagaacaagataagatgcaatctaaatattgctaataggtaactaagcacaaaggaatagttgcgattgaagtggtagatctaatcgacccggcaaatcaacacaccaactattaggggctctgaatcaatagtcgccgactaatcgagcgaggactaaagacaagatgaatggcacttggcaaaattcaactaaacaaaaaccccattattttttaggatgtacaaagctatttgtagaggaaaataaagctaggtttaagtgctaattcgtggaggtggagggagacacttccgagatgggcctagtctattacaaggcccaaggcccaagtttggtttcagcaacagcactgccttattttggcgattcccgttgactcaagatgaatttggacatgagaccagatgcgtttgaaggtagcgagataagctttccacgaagtccaagatcatccaaatcggagttggtatgaagacgataggtccgtttgaaatcagtgctgtctccggaggccgaatttgattgtaaaactcattggactttaatatcttgtagatcctccattcatccaatgtattctttggcaatgttttatatttctcatgcttggttgtatgcatatacttgatggtcacatcagcgttggtgccgaccgcaccaactcttgagctccatcaacctcggcgtcttccccaagctctcctccaagaccaagctccttctcggcaataaggccatggctacctctcagtgttcgagacaatactggcttccatggtcggtggtccctccctagtggccggtgacgtgttcgcgcctagaacaatggtagctagcagaggaggagggaaagaaggagtagccgccgtccctgccgtcattgtcagccccctcccatgcacactggaactggcctctcgaagctcactgacggggagaagaagaaaagaggaggaaataaaagggtttgtgacggaaaatgtttccaatattgtgtgtattcgatgacgtggatacgaatagacaaatagtaatatcatttacccaaattgcatatttgtaatggcatagatccaattaatccaataacataatctagctactctcagcaacgtgccattgcctcgcttcttttgctatctaggtgtctattcccacacaactcgtaccactaacatctggggctacaatttatactattcttcacatttcaacaaatcttccctctttcactatttgcttccccaaattttaaaatcacttacttgttcaacaaaagaaattatagtattacttagactaaataaatatttattatttgataagctagaaagtcaatttgttttccgttgcaacgcatggactttaggctagtagtggtataaacaactatggtcggatctgcttcttgatcatccatgccaaggaggctaactacatcgttgtttacttcattaccacttttaactctattaaattaattttgatgctatcaaattttagtagaataacaaactaaacatattcatactatctctaccatacttaaagaaaatgaaagttctataagtttcctctcataaaaatactatcaaattttgaaaagatttcaaaataaatatatccaatgctactaaaattagacaatatcaaaatataccatatgtttgtaatgttgattttataaataagtcctcagagcagccactaaacctgcaacgcttcaaagcaacaaacgaggatgtggtcgacatttgaatggcttgcctgattagcatgactagtgttgatctggagtgacctgtatttgacctgtgtcatggctggaacagtacgccacttgacatttactggttttgagtagtgaattgaaattccacgcgccggctattccggctagtactgaaacggtatcgataacctcgcactaaactttacactgtagcgagttatagtgaaaagaaaatacactgtaaatcaagggaagatgcagtcgcgcttgcctcgtttacgaacgtgagatgggaaaaaaaacagcaaggaaaatgagagtaccgagtacgtacgtactccctccatcccaaagaaaaaaaaatttagatttctatgtctaactttgactgtccgtcttatataaaatttttttataattcgtatttttattgttgttagatgataaaacatgattaacattttatacgtgacttgtctttttaattttttttataattttttcaaataagtcgcacagaaaccagggtgggtttgtcttttttttttttttttgacggagggagcaggagtaggtcgtaaaggacaaggcacgcggctgtatcgagacggcaacccgggagagagccccactttggcaatcgcgagtaggcgcggcggccgcgtcgccgacctgggcgcggaacagtgcggcggattcggggcaaatcggccgcaacagtccgccccg

SEQ ID NO: 17496 - DNA, 3369 bp, Oryza sativa
agactaattagactcaaaaattcgtcccgtggtttctaggcgagttatgaaattagtattttcattcgtgtctggaaactccttccgacctccggttaaacattcgatgacaaaaaaaattatcgtttcacgaactaaacacacccttaattgcgcgctttggctgagttacgttgccctgtgcttctgtcagcgcaggcgagcgatgcacagtaataatgcgtaaaaccgtgcagatgttccaagagtacagtatgccatgcaaacggttcatattctgaggcgcttgttgagaaaacatttcggaagcttggtttgtcacttcgtgccttgatcgtttgggccgagatttaagccgattttctttggatgggccagcttcccagaacttcggtgcgaaaaagtggcccatagataaattccgtcgcagaaatgcaatgcacggttgacgattgatagagatcgcagaaagtagcacgcacgaacagatagtggtcaggcagaggagttgcatctcaattttgaaagtagcacgaacagataggggacagacagaggaattgcatctcaattttgcatcatacgtttcaggaggaagacacatcttacaccgttccagtttaaacttaggtagatagcacaacgaccatagaagtttgccctagttatctacatcaacttaaccaccaagccacaagaagaagaagaagaagaagaagaagtgaaacaagtaaccattccaatcacaagagcaaaagacttatgtcatactaatcatcgtcaggcgtggtgttgcagctgcagcaaccgcgagtacgccccctccggcctggacacgagatcagagtggctgccgtgctcgacgatccggccatcctgcacgacggcgatgcggtccacgcctcggatcgtcgacaggcggtgcgccaccagcacggtggtccgccccttcatcagccgctccagcgcctcctgcagcacgcactccgactcggcgtccagcgcgctcgtcgcctcgtccagcagcaggatggccgggtccttgagcaccgccctggcaatggcgatccgctgcttctggccaccggacaactgcacgcctcgctcgccgaccgccgtcttgtagccgttgggtagctgactgacgaagccgtgcacatttgctgtttttgccgcctggatcacctcctcctccgttgcaccgtccttgccataggcaatgttctcaagaatgctggctgcgaaaagaacaggctcctgctgcactaggcctatcttcagccgcaaggccttcaagttcagcctcctaatgtccttgccgtcaatggtgaccttgcccccggtcggatcatagaaccgctcaatgagagcaatcacagtgctcttaccagacccactggctcccaccagagcttgactgcgcccagcttggatttttaggttgaagtccttgaagatttggatgtcagggcgagccgggtaggcgaagtcgacatgccgaagctcaatgtccccacggacattggtgacacgctctgactctggatcatcaggctcgattcttgtcgccctgttgaggatgccaaagatggagcggatggattcacctccacggacgatctctggggcaaggctgactgtctcggcaacggagttggcagtcacaacaaggacaacaaagaccttgatgaccttggagaaggtggatccatgagaccggaccagatgagaaccataccacagaatgagtgcttctgatgagtacaggcagagctgtgagaggccaaacagaaggcctgatgtctggctgcggcggaggatctgctgttcaggtatgcgcaattcataactgaacagagaaaggatcttgttctgagcattgaatgctgccactgtgcggatgttgctcactccttcaccggcaaccatgctgctcttggcatgcgcctttgctgtgtcaccagcgaagcccttcatcgaaagttgctggaagaatcataagaaacatgtcagtattaccctactgttgacgagtaataccgaattacctaaataccattaacatttacaattttccttggggatgaacatggaattataaggtaagattcagaatagatcactggaaaaggaaggccaagaaattacctgggcaaagttagcaagcacaagaagagggaaggtggccaggataagcagtgctactctccactcaataataaaaccaacgatgaacgatgtcataagggaggtcatgttctgcagaatcactgatatcctctcagctattgcagacttcacatcagctgcatcaactgctagacgagcagccacaagacttgagttgttctcttcttcatcgaaccaaccaacttcattcgtaagtattgctgcagaaagtgacggagttttacaaaaattcaagatgacacaacaaatagagcattagatttagcatagccagaaatgcataccggaaagcatcatcctcctaaccctggttgtaagattttctcccatgatgctgaagaagtaatgctgcacgagataagctacaacagcatataggccagtgccaatatagatgaacacatacaattttgttttcttttccatttcattggggtccctgtagtagaacacatcaagcatttctcccataacaatggcgaatgttggaccaatgaatccagagaggacagaaccaacagcgcccaacactgcataaggccattcaggagcattcaatttcaggagcttgaagaagtaacctcgtggtgctgggtatttacggtcattatctgcatttgaaatcatctcaatgcgaccatttgccccagtactgtactgatagctcaggttccttaaacttccagacctgaggctgagagattttgtggaaagtgaactggtcaggtgcatcgagcgtgacctgcgggtagatgcaccaccaaggtctctgttttgtgccatttcttgaaaacgaatcagggaggcatacgctccagagctcccttttgctagaagttcatcatgtgtgccagtctcaacaacttggccctgctggatgactgcgatcatgttaacatttcttatagtggagagacggtgggcaacaactaccgttgttcttccagtcatcagccggtctagagcttcttggacaatgttttctgagcctgcatctagagcacttgtagcttcatcaaggagcagtatcttagggttcttcagcatagcacgagctattgcaatacgctgtttctgaccaccagacagctgtattcctcgttcccctacctgtcaaaaatagaaataatcagtgttgagtgaattagacttgactacacatacatcccaaaaaaaggt

SEQ ID NO: 17497 - DNA, 3201 bp, Oryza sativa
ctgaattgcttcagagtaggaattgagtgctttgctctctccagcaaatgagtaaactgttctaacttgagcaattgcctgaaatgtttaaacccaattacagtcagcatgcaagtaaaaagtagcaggcaattatgtaaataaatattctttactcatttactggaagaggcaaatagagcacagtaaggaaatatgaaattgcacatcttttaaagcagctggaaattttatttccatatgacagttcaatttaataaacatagtagaatatctgtggatttatttggaaatgtgcaaaagtgatcacggatatttttgttgttgacagttgactgtccccatcctacgcctataaatggtcatggctaaccacccactacgcataattttgatactacaaaactctatccactttcagcaaaatttagtagtactgctctgtttgttaggtgtttcgcgcatgtcaatttagcagtactgctctgtttgttaggtagactatgccaacctggatgctcaagagaagtttagaaaagccttaattaattttattcattgagaaagatctctagtaaaaatcggtcactcctgatacaaatccacatgtgggatcaaatgggccactacaccaaaagttgagcacacaagtcagcttcaaagcagaaacaccataacaattcatgcagaatgttctgccccacctagttatggaatagctcataggattcccatggaataaaaatgttgaaaagcaccaaaccgcatgttggctagtcgccattcgccataagaaaacaagatttgggctcctaatcagcagacaacaccaaaaattactacctacccaccacccctaattcaagtgcaagtccaaagcacccaccacggaatgcatagattaatgcaatacagatcctaacccgaatccacttcgcactaagctgcagtggacagtacactgactagtacagggggtacagtaatagtgtaattacagtagcagtaaagttgctcacgggaatagccgtagccattattgttacctgctctgccacgacgccggcattggcataggactcccggctcttggaggtgagcccggtgagcgtgtaggcgtacaggccgccggcgaaggcgatggccgggatgacggccacgctgagcagcgcgagccgccacgccgcgacgaacccgaccaccagcccggcgaggaaggtggcgatgtagtggatgaagttgccgaccttctcgccgatggcgtcctgcacgagcagcgtgtcggtggagaccccgaacacgatgtcccccgtgcgcgcgtccgtgtcgaagaaccccacgtcctggcgcagcacggcgtccaggtacgccttcctcagcgcgatcacctgccgctccccggtgtacatccagcacgcgatctctgaaaccacgaagagataaccgcggattagatcacgaattctcagcgcccaagaaagaacgcaactcccgttgcgcgatgttactacgactttggtgcgcactgatgcggcctccacgccgccgccgccgccatgaactccggcaagcgacctcgccgccggattcggcgacacgagaaaaggacaaacatgattattgttaaatctctcctccccgtttggcctgatggcgatgggacttgtgtttgtgagtggggtggtcttcgagatgccccacaccggccatgaccggatcatgttttgcaataaagcccccgtatttcttcacaacgccccaaaagagccttggtgcgtgggagaaaacagtaacagagggtgcttgaagaaatttacggaaatacaggggtatgagaagaaacggaagctcacctgcgtatgaggaggcgcacaccaccagtccgaggtagacgaagtagagggcatactgcgagaaagagcaagaaacaggtgatgaacaccagcgatcttggacaaagaaacctcatcgaagcaacactaaaaatgattcgagagatcgcggagataagtttgataagtgggggtagtgaaactgtgaagagcacggaccttggagacctcgtcggtcatggtgcggaggtcggtctggttcttgccgaagccgttgatgaggtcaccgaacaggaggaagaagagcggcatggcggcgccgtgggcgagcgcgccaaggctccccgccgccatgagcaccaggtcccacttgtcggcgaacgtgaacagctcgtggaacgccaccgcctggtccgccctcttcttcccctcccccgccgcatcgcacccgttcacgccgccgttcgccgccttctccaccttcccgtcccccgccgccgccgccgccgactccgccattgcaatgcgtcccctcccaaccctcctgacccttcttgcagagccgagagccaacaacgcgcgcgcgcggctcacacccgcctcagcttctcacgccgccgccgcgccgccctgcggcattggagaatcacacacacacacgcacacactctccccactctccgggctccgcttcgctttcttggtggggttacagagaggaggaggaggaggaggaggggctttggttcgcctcgggcttcgtgacgtgcagggagagggtggtggtggtggtgcttttgtgttccgcgctgcggaggtcaggtcagacttcagaggaagtagggcgcggcgtcggggcgagagataaagaggaggagagagatgctggcagtgcgcggcgcggtgccagtgaaaactactcactccgtaaaaaaagagagagagagacaaacctggtttccgtgtttaatgtttgactatccgtcttatttaaaaaaattatataaaaaattaaaaaaacaagtcacgtataaagtattaatcatgttttatcatctaacaacaataaaattatgaattataaaaaaaatttatataagacagacagtcaaagttagacacggaaatctaaggtttgtcttttttttttggaacggagagactagcttgtggtgagctttacaatctcctcactgcaaatcctggattttatttacagctcaaatagcggcaggcaagcagcaagtgcagcagatcagctcttttacatgtgaccttagcagtgaccactttgtattaacaaaagaaaaaatcgagcttgagcaaaggagatgctacaactctaccatccgtaaaatatgagcagttt

SEQ ID NO: 17498 - DNA, 12232 bp, Oryza sativa
cgctgctgcgctccatgtggtgtggtctcgcctcgcctttccccttcgcctatgggcaactcggctactgaaatcagctcaactgcactgctgcacatctcgagctctcgcctttgaccgcctgtccgatgcaaagggatgggggggcgtccggccgtgacggcatccacctgcgatctgcctacggtacaagcaaggaccgcacgtttcagttttcacgatctcggcgagcttttcgggacggaggaggacggactcgctttgcttccggctacgtacatatgcgaccccgatgtcccgatggagcgtcggaccgacacgacgacgatacagtacttgacggcacgcgaccccctgaggatttcaccacacgtacgtaccggtacgggccaaaaaacttgcagctcgcacatggcgttatccagtatccacgcgaccagcatgtatggacctatgccagcaacagtaccgcctacgtgccaacagttaatattttttgcaattttacggatatattcgtagttgtagcaatgaagccattttttatcttttgttggagcaacgagcaatcagtgatgtgccgatgtgaggtagacaggtagtactagtaactttgtttggggacttaataatgtcattagcaacgcaaaagcaaggatgtgaggatttctaccctcctagcgaactagagatgatcatggaggatgggaaaagctgtgctccactagtatgcatgcgagctagaataatggtggcatcacgtgggcttaagtgttctttggacagactaatccacacattccaaaaacaaatgtgaacataacctttgatagaatgatacactctgaaaggtactcgtataatagttagcgaaactttctcagtacagaattcaccacatgtgtgttaatatatacgctagcttggattaattactacgtttgttactagtcatattgaccataaatcctttaggtagctgagcagaataattaagcagccgttttcgtaacaaatgggcatctttgaaactgacgaaagctttttttttttgacaactgacacaacattaggcctacggattgacgagctttttgaccgcccacgtacttctgatcgatcgacatccatggagttgctcatcggatttgccttgtcgatgaagatgttgacgtgttcagtgtttaacttcctccgtcccatattacttgtctttttaagtttttgtttgtcaatatttgatcattcgtcttatttaaaaattttagaattattatttattttgtttgtcatttactttattattaaaagtactttacatatgacttatctttttttatatttacactaattttttaaataaaacgaatggtcaaacgttgcaaataaaaagtcaaaaacgtcatctattataatacggagtgagtaggtagtagtgtaggagtagctactaatacacgtagtatactgtctctgttcctttctaaatgcttgttcatgttgctttccaaatgcttactgatagcatttgaaaactactccactcagtgcttcgccgcagtaaaaaataagggctacgcaaactcgggctgaaagcctgaaactcgctagcctgtaactcctaaactggattcagaatacacatcttcaaggaaaaaagattcagaacatgcacattcagggtgtgtttagttggggaaaagaaaatttttagatgtcatatcggacgtttgaccggatatcggaagaggttttcggacacggatggaaaaactaatttcagaactcgcctggaaaccgcgagacgaatcttttgagactaattaagccgtcattagcacatgtgggttactgtagcacttatggctaatcacggactaattaggcttaaaaattcatctcgcgatttcccccataactgtgcaattagtttttctttttatttatatttaatgcttcatgcatgtgtctaaagatttgatgtgatatttttaggaaaaaaaattggggaactaaacggaccctcggaaaaagggttcagaaaatttgaacaatccactgttcctgccttcctgatttgtagcatgagtagtatcaagctatcagtatcaaacatgtactaaaattcagtagactagtatttctggttgcagcaccactactgtcaaatcggaggcaaaacctcaagaaaggcagcgagtgagtgagcaaaacaacagggcctcagtgctgtgttggtgctttgaggattgctttggcagcatggccagattgcagaaatgattggagcagccgcatccatcaactggtgttttcacaaaaactccagatcacaaaaaaggagtattatactcgtacggatcggattatatattgtgtttgtcactcgaatcgccagtgcctcgcatgtttacgaggactagctcatcgtcggcacgctttacagggagaaacaggtgcctgctaaagctggtgtgttttttgatctctacctttttcttttcatttcgttcctttctttcagctcatcagaggatggagatggagtaaaaagaaaaggctgtggcagttcgtgtgcgtcctggacgacacacgccaccctgtctgctgctagcctgctactgtctgaattctgaaactatatgtgatgcgatggctgtcgtcgttgctgttacatgctgcatttcgataattcagagtttcagacattatcctgaaagttcccgtgccacaatattcaggacggtttctgttcatgctccagaacggcatcaccaggtgcagataatgaacagattacaattccttcatgatctgtttttgtttggaactttggatagctgcggaaaaaggagatgcgtttcggaacctgcagcgaaatgcgccgagatgttgggcacatgcttgaattaaagcttggtaatttttgcgcaagttggaagaatatcaggacagttttcagtgatgtatacagctatgtattctttcgtgtataatgcaagaggacagtctgcttttaagctaatcaggtccatgattagggtttgtgggaggcatgatccatcactggacctcaaaatgcatgcttagaatatattcatagctggtccctgcagattcatgtagaagattaagcttaggcaagaaagggattgtactagactgaataagaaattgcccccacgcacgctagtaccatgtacgtatcctgcctagcaatgcaaacactccaactactacctcgcatctgcttaacgagcagaaaaggttagggaaaagcaaacaaagctccgagctgtgacaccgctactaatcgcgcttttccctacccactagctaataacagtagcattgccattaactaatcaactgtattcaactgcactatctgagttagtcacacatgcagtgaagagtccagaacatgaacccaggatcagggggcaaaagttcagaaatgtcgagacaatcagtaacacaatatctctgtaatttaccctggtagtccctagctacaactgtactgtcccactattaacagtgccataatactcctagctctgtaaaattaaggaagagtgaagtgtttatttcactgtgctcgagatcactatgcatatgaggcaagtgcgtgcgtccaacttgcttggggggtccgccgtttcgtgctcgcgaggaggagctaggcgtgcctccatagttgtacttctgcttttccgatggtgcagctgagaagattgagagaggagaggagaagaaggatcagtgccctgcatgattgatggccctgtttgacgcaacatgtcaccttgtttgtcgagactcaccgtcctcggattcatgatcagttcctgtttggctcctgctgttcaggcagaaatgtactactgccactcggatctttggagcgctgtgctgtgagtgacctgtgtgagacagtgagggggtagcgagcgatgcagattctattacaatgatcatcaggatgtgatcatgcgagatgagctgctagatgcaagtgctactgatcgagtagcctgctggtactagcttactgttagtcacactactcatgtcggtgaaacggggcaaatgtgcagcagatgtaatagcggatggtagcagtcgtttttgatgtctttatcttcatgtgccttttagactgatcttgctgcagtattagttactacaggtgatgccaaatcaactgtttgatataccatgcatgcatgtacctgtgattcaataggagataccactatcctactggaaaagttcgcacgttatatcgatataaagtactgaatgcccatgtgaaattcttcagcattgcctttctgaattctctaaactgtcgaaggtagactggaggagaacgagactgataagtatgctaggatgcaaaatactaataactgaaacaacaatctgcatgatccattatcaactcatcgttagcaggtagactcactaataatgagagcatagtttcagtctttcagagacagctacaccaaagagaaaaacagaagaaacacacccatttggacatctctgaattcgtctgttcatctttaccaacttaccaaaacataatcaacgcatatatatctctctttgcatctgtactcatcgaatcttaaagatcagccaaacatatcgagtttcagtaaccaaagcagaaggaaacaacagctacaggacagtttctccaaacgaaccctattaatgcaacagcttcctgtttcagtctgtactctgtagcagatgtaaaaccgatgtaaccactcgaccgtacaaggcccagatacggtccacccccggcagttcaagtgggccccaaaatcctgactctctctctctcccagcccggcccaccagcacactaaatgcaagcccaggcagcacggccactggtccccaattaatgcgcacgcgcagatggtgggcccgcgtcatagtcaatgaccccaccggtcagcccgtggcgactcactgtacaccgcccacaggaacgggacccacctgtcggcgtgaaaggactcgtcgaaacggtgcagacggggagagccgagccagtaaaggcggctgggtcccaccgcgccatttcgaatttgcgagtagggtcacctcccaccgggtattgctccgccgtttacgctccgaaacgtttcgaatttccgaggtcgcgacgcggaaggtggatccgcggtgagagtcacgtgggtggtgaccggaatcggggtggtaaaaatccaaaagcgaacgcagcgcaacgcctagctcgtctttcgtctctgtgtgcgcgtgttgtttttttggcttctttttcgcttgccattcgcgtggaggcgtttcgaaaagtttgctcggctctccccgatcgagagagagagagagagagagagagagagagagagagagagcagcggaggagatggcggcggcggcggcggcggcgaccatagggatgatggacagcgcgtacttcgtcgggaggggggagatcctcagctggatcaatgccaccctccagctctccctcgccaaggtcgaggaggtaagggcccccccatttctttccttcccccgcattcgatttggttcctcggatgaaaccatgaaggcgtaggggtctgatccttttgcaatttaggagtgggtgtgtgtggaacttgtggttgggctgggactcggactgttgtgtgctgatttttctgggattttggtcgtgttcccctgcaggcggcgtcaggggcggtgcagtgccagttgatggatatggttcaccctggggtggtgccaatgcacaaggtcaatgcttcttcattcctgttgttttggatttgatcgatctgctttatgtaatgctgtataggtgccttaggcggttctgatgctttattgtcatggggtttgcaggtgaattttgatgctaagaccgagtatgacatgatccagaactacaagattcttcaagatgtgttcaacaagctgcggttgagcaaggtattggttctggcctcacaaatgagtgcttggcgtctttgatacatgtaggttttcatgatcacgcccttgcggctttgatggtttcttgagattctaaatttatggtatcaggagattttccattgaagcatgcctgttagtgacgttagcatagtgagatgacaaaaatattcatcatggactaaatttgttatgcaatattctgcggtactgaaatcagattgatgttgtgcttaacgacaagtggaaatgaaaactggttaagctcttttttgtgtagagctgtagtgtgtatactgcaaagattgattttgtgaggcatggatacaaaatgtctcatgattcatgatactggttatatcttagtattgtgcagcaaaaggcagcaatgtattctgtaaccgtactatcattaggatatggcaatgtgattaggttgtgttattatgtagaatgatggtggactggtgattgctttcatggtttcttatctcaaaattagtgcacgttgaagatgtactgttgttgtgtttgtcctattttcactctatgtaacaaggtcattagattagacttgtgccacaggatggcatctgattgtgaggcctttgttctaatgcttcatctgtgtccctctgcaactatttttagatcatatgccccatacaagctgtttgttctaatcaacagtggatgttccgtgcagaatattgaggtcaacaagcttgtcaagggacgtccattggataacctggagtttctgcaatggttgaaaagatattgtgattctgtaaatggtggaatcatgaatgagtatgtgccttggttatgctgaatatgtaagataattgcattctgttgctaattatggagttgagatttgagaaggcttgtgttcaattttcagaaactacaatcctgtagagaggaggtctaagggttgcaaagaacgcagtctcaaaggttccaacaagtcgtccaaatcactacaagctaatagattgtctagtgcaaattcagctgatggaggtacattgaatttgtttgatactatgtgcatcactaaagtattaataagtgagacttcaagtgtgcctttatggttcataggagtactttgctctcatactgtaatgattaaatcaattcaaggccttaagagaagctggatggtgccaccagtctctcatctacttaggagtgttttaaaatcaatgctcctttttatttggtaccatagaagcatgattcacttgtatttgatctcatttagtaatagctctatttttgcccaattaaacaggtccatgcgttggtaaagtcaatgttatctctgaagagcattacatagaacagattcagcaattatctgagaaggtatggaccatataatccaagtagctgattcatcttaataatgcgacctgcatcttttaaagtttcttctaatgtcaaaagcccaatgactattctgtttgactgttgtagctatccacttctttgaagttcagtgttctgtagactgtagttgtttacattgatattgctacctttaatccacattctaatcatcctcgctatgtagcgtgttagggtcatgttttgcatcttcaatgctaagtaaattgcaaacttatgagttttgataatgcgaatatctctattgagttgcagattgcaggcctgaaaatttctatggatagcgcggagaaagaaagagacttctacttttctaagctgcgcgacattgagatactgtgtcaaagaccagagttggagcatcttccggtaagtaattagctagggatcttccagtattgtgcctgtttgcgggcgcagattaaggctaataatttctgaggtcctatactcctattcattgaccaaatagtttcttttctttttggtttactactaacctgatgaatattgtcttgacagatgaccaaggctgtacagaagatactttatgcggctgatgcaagagattcgccattgcctgaggctaatgaaataatcacccggtcaccaagcatgttcccagatgaagcctagggagaaatggcatcaatacactcttaagctatatttagataattttgtggctatcctattttgtcgaatcgttgtaaatgagtaaataacgcttgacattagctacttgtggcaagtccaccgaagatatcttcggttctgacttgaatgtcaacttcctagaactagttgtgaactgaatatgcattagcaatgctcttctctcgtttctgatctccttggagatattttatggcattcgacagctcgtaacttgctttttttctggaatggttatgttggattatttatcttgatgctccacgtttgattttcattttctctaaaatgtggacccattatctatggtctattaacaggtgcaaattttacaaatccatgtaactatgaaacaacagaagtgaatactagtaacagctatacgaggaaggatgagtatctgtcacagctatacaggaatagcgaaaaaacaaaggtgagtatctgtaacagctatgcctatatccccatacgaggaagaaatgagtatcaacaaaggtgagtatctgtaacagctatgcctatacgaacatctggaagaaatatgagtatctcggagatcgaacatactgttgtcgctcacttgctctacatactgttgcggttcacttgctctacgtttgctgcccaattgctcctgtagtgcatcatgttaattgctgcattgcccaattgctcctgtagtgcatcatgttagttgctgcattgccggtgcctagctctagaaaacagaaaggaaacatttataattaagtaaacaggagttaataataattcatcaggagttagcaataattcaccatgagttaacaataacaaacaaaatagatataaattaaggctaataccttgtcttgagtcttcacctccttagcctgcgacttcgcctcggcctcacgaggctccggaagcttctcagattgcgtcttcacatcatgggactctagaagcttctcgaatttcttgatgagatgcgagatgatgccatctaactcttcgctagctttgaccgctttgtacagcaatgttgctacagccgcacagaacgtgaaaatggtgaggatacagggaggaatgcgcatggatcccttgatcctcctttctacagcttccttgaagtaagcagtctgccaaccaccgatcagaagaaccaataagcttgagagtaaactaggatctcctgagaatctctcctggactaatttgagaatccagcccaagagggagagccgggtgttggggaaggcgctctgggtgttggggaagccggggacgcagctacgaggactggcagtggaggcggtgcagggaagcgcggaggcggcgccgtcgatctccgggagtgccgagacatcgtcttccccgtcagtcctgcgcgcgcgcaggcgcaacacgtcgaagtgggtgaccgagttgatcggggtaaggcggatggccgcggaaggagtcgaaatctgcttccccaaaacgaaatcgcgtgacgaactcggcagaaatgagatgatggtggtggcggaagaggattggggggtttaccgaacattccaggcccggatagcggagcgataccaacgccatggccaccgtcgcggggaggcgagagggcgcggtcgccatggggacgcggtggggcatggccgcaggcaccgaggtcgcgccgcccgcggggaagcggagcgtcatcgccattgctgtcggccagcgaccacggggagttccgaaactagggcttggccagtaggtctctctccggcgcggacgcggcgaaatggcggcgcgattccgaggtagaggacgacacccacttttataggtggtgattattgattaaccagttggttattggcgaggcagcatagattacgtatcctccaagtagctgatgattaagccggtctaagttaactcttgttggttattagcgaggcagccgtgccctgaatttgcactgcggcaaatttggctatatgtactgaagtgatcagaagtttcagtgtacatgctacctcatgtagattcagtgcttcagaaatacgcaaaacaaaacaaactattatcatataactaattgagtatcaatcattttaaatttgaaaatgaactaatacgattattttaaagtaactttaccatataattttttttaaaaaaaattatactatcatttagtagttcaggaagcatgcttaaaaaacgagaggagttttcatcctaacttgtcctctcgaactcaaccttataaagaatgttatttcattcagactggagtatttaccagtgtgatgagaatgaatcagataagggttccacttgctagaaatccttaaaccagcttataacatcaaatccagacatccagattgcccaataacacattaaaattttttaagatactttcgtgattcatcaacacaggcatcatcctttttattattattattttgagcaaagagtacagccatcaaaatttgtgaaaagacaatcagttactcctgcaaaacatatatagcatgctatcttcattaaatggtcatattagatattcagatatccaaccttacatttgggtcattgagtctaccagaatactagttaccatctaaaatagaaaatagattacaatgagtgattccagtgaatctgtgaatagtgccaccagcaaaccaaaccaaacgactataacttaattatgttgttctagttttcttttttccatttgcatccatacataatgagaccctttgccacttttataagaccacctttgctttgcaatattctgtaaaccccaagccagaagagtcggatatagttggtgccaaccatctcatagtagacggttcggaagtatagttggacattaaggaacctgagataagcagataattgttagtacacaaagcaatgaagacatttttctctagggaacatcaaccacagtaaacaaggatctgtaatcagaaattggttcaatagacagggatcagcaaccctttacccatcccaaacccaattcacttatttaaagtttaaaatgaatatgtataatcctgaatagtcacaatttgcaatataaccctcaatcacaattacactaagaattagtataaaactctacaattcagaggttcatgccttctttgtcaatgaaatatacagaacaggaaaagtattccggtgatatgaatgtggtaacagaaaaaaaaagcttgattacttatatacgaggcatgcttatcgatgataatcaaggttaatatactaaaacactgaccagatcaatcctgcaaggacgccgtacgtgccctgtcataagaacaaaaaggcaaaaacgttaactagtgaggcttgaagcatatttgaatgggatttgcatgtgcctgtttgctgacgagaagtgggtattttatacctgataaccacggctatccttgaaagacaaaacaaataacagaactgcaatggaaagaaaaggatcatgcgctatcagcataggtgcaaacaaaccatacaaattaagtacgaaaaggatatacagtcgaacgttaaaagaaagtattttataaagcttaaattattgagcatatatgagtagaatgcataatcacgtatttcatgcacgtatttctttctacatgacatattctgcggacatagtaacccatggtaagaaaaagtcatggtaagacaaaaagcctttctgactcacctagttgtatccgtgcacatatgttatttgccctgccgttcctttgcaactctgctgctaagatgcttagcttgtagaacatatatccaagaacaatgtccacgaaaaggaatggtgtcatgttgcatagttggctaaaaccggcgataactaacaaagcacctgcaaacataacacccagagtaactcatgtacaaatcacctcagttcatctctggtgctgcatgcctgcattattcgtgttcatatatatattataaaagtgtctttctatgcagactgataagctaagagaaacatgaaaaacaggatcttatcccgtgtaagagactgaactaagggggtgtttagatggggctaaaactttttagcccatgtcacatcggatgtttggacgctaatttggagtattaaaca

SEQ ID NO: 17499 - DNA, 1310 bp, Oryza sativa
tttcataacagaggagaagtgcaggacttcgaacacaatggtaagagagagagagagagagagagagaataaatttcagaaaactccatgtttaatggttaaaattacagaaaacctattgtgacataaaaaaaagaatggtgctagaagagagaaattgatgggttttgtttttcttttaccggagaggatgccgatgtggaaactgcggcagcggaagaggttgccggcggcgccgatctcccgcagcacgcggaagacgggttcgagggggccggacacaagagcatgccatatagcgtccatctcctcccggcccttcccaggggggtcggaatccgcgagagaaaaatacgtggcgtcttcttcggacaagttctccgcccaccacggcgatccgggcagtgtgtacgagcctggagcaggatatggcggcagggcttccgagcagccagaagcgggagacgcggccgcgcaggacaacctcaagccaacgactccattgccacgcttgctgcatcgaagaaggccagcgctaaccctatcggggccgggccgcgtccccactggccggcggagcaaggcgccggctgatgggcagcatcggagagaagacgccattgtggcggagctcatcgccatgatgcctagggtcttagcacccggcgttctatggcgggtcgggggagttccaaaattaggcggcggcggcggcgggaagacgaaggggcgaccgccgaccgggcgagtgctcgatcaattagggccttgtgtcggggaagaggatacaactacgcgagcggagagaactgggtctggtccggcacgaccgtgcgcgcccgtgtccggtcgggttgcgccgtgcgcgcgcccgagaccaaccaaggatgagtggaccgagaccgaccgtcgaccgaggaggagtggacggctggtttcgagtccctccttccaaaagtataaaagtaccatttcattctttgattcttttaaaagtctatttcctccatccataattattgatgtaaaaacacgaggcctggaagatctaattaaactccagtgcaggttcaaaacttgcctttgggtgtgtgagcatgccagttgatttgatcctataatcaacaagaaacaaagaccaagaaaccgcggttaaatccataaacaatagtcaatcggctagttgccgatgacgtaccatttgtctttgagtcgatgtcatatgtagatcggtcggcagtcatgaataagaaagaactaaacctacttgatcggctgtagatattaatgatatataatccttatgtcga

SEQ ID NO: 17500 - DNA, 3860 bp, Oryza sativa
cagaaaggctgcagtaaacaaaattggatggacaacaaggtttaacccaacaaataatacctcctggaaacttatcaaggtaatcagtatgataacagcaaaccctcaagaataattactacttcctccgtttcacattataagattttctatcattgctcatattcatataaatattaatgaatctagacacatacatctatatgaatgtgggcaatgttataaagttttataatatgaaacggagagagtactaacttaattgcaagtgtgtgcagcagtaggaattgtgcttctacacatagttcttactgttcaaatgaggacaaggagcttgattaatgtgtgcaacaggctatgtgactcactcaccagacaaccatctcgcactagagatcctcctacgttggtattgcccaacctgaagtcccaaccatacagcctttctgttgcttactgcagaacaaaataagtacggttacatccacatatagtacggcttttgtttaatctgaactcctttaaatctcgttacctttttcacaccttgatcacggggtctctttgttaagttcctgcttcttgtcgatgttctggtggcagccactagagaaaaaaaaaagttaagcaaattaacaaaactcctcaatttcagttttaatggaggaaattcacaaacgaaaaatctacctgtacttccccgtcttggtaatcttaagaagataagaaccaagaccttcgagctccttgccggacttaatggcatcatacgtgaatgcaatggcggcagaggagaaaacaaaaacagaaagaacagatggagataatcggactcggtgcccaacttgatcggcaaccttcttccggatgctgggattcttcacagctgtgataagaagtgcagatacaacatggagaaacaggaacaaagtggatgtgcccgtgcccgacatggatgatccacctgtagaaatgtacacaaatcgctcaaacagggtagaggcggcggcgttgctgtctggaatctgcggcgtggccggtgcggagcttgtggcctcggtgtcgggcagggtggagatggcgtcgtcggccagggtgtcatcaccgtcgggcaagggggagttggtgccgtcgctcttgggccttcgtgctcgtgtgtgggagcggcgggtgacgacgggggaagccaactgctcgattaagaacacgcgaactcatcggtgggagaaaaggggatgggcggaggagcacgggcggttatggggcataccagagacggaaggcagcccgacgaagacgccggaatcacgaagacgccggagtcgccgccgcggggaacgaagacgccggagtcgccgccgcggggaacgaagacaccggagtcgccgccgctgggaacgaagtcgccggagtcgccgccgcagggaagcgggagggcggtgtcgccgatcgctgctcgattacgaacacgcgaactcattactcaatattcatcagtggagcgggctcgcggggcggcggtggagcagagccaccgaggtcggcaccgggtggaggcggagcgtcgagagcgacattgatgcggcgggggaggagcgaacctagggtttgggattagctctctctctctgtctctcctatggcgcggggcgcggcgggcggcgaaacgaattcgagaggtaccccgactcggggggaagacgatggcgccgcgacgcagaggaggaggcgagcgagggttttgtacttgtcactgactgctgggtcccacacggggacgggggcctgaccctctcgccggcgcgggcgtgcgatgcggcaccggacagcgtgttttggatcgatttgagccattttgggtcgatgtcaaaaggtataccaatttttagtagtttgaatagtaaacgggattgtttggtttaaaattaaatagttggcaatatgtttaatttggtataatcctataacttttttcatctaatatataggatataatttggcatccatttgacatcgattcaaacacactcatttacaatatcatcctatcaaaatcgaaacggtagtagtgcaaaaaacttggcttagttttaatattaccaatattttgatagggtattaaatcaaacaagtcctaaatacaattatggttgaagaacacactagaaccgggcggttaagtaccattctgcagaaaattggagtaaaaatcttgcacattaggatttgtgacccgactaacccttctccccagccttttaatcaaatcagatttgtcttagtgtagactagttgtgcacattaggatttgtgacccgaccaacccttctcctcccttagccttttaatcaaatcaggtttgagaatattcatgtcttgactagttgtgcaatagtctttttgagcatctttggtagttatatgtggtttcgttttcacgagcataaactatctcgtatacgagagactgagccaaagtgggcaccctagaatctttatgctaactacatgcgttcctcggtactccacttatataaatcatgatttgtaattggcatccatgcacggatatatcatagttgggttggtcttcgttgagcttagatacatgtggggaaatgagaaatcgacaacttcattacattgttctaggtgtcatttccatatccatacgtaaagagagactttatcacttttgtgagaccaccttttgtttgcagtaatctataaacaccaagccagaagagtctcatatgcttcaagccagtcacttcagagtagaccattgagaaatataactggacattaatgaacctgtgatcaacagataattatgagtacataaaccatgcaaatataggtcggaaccaaaagggaataatattatcaacaggcttcctaaggcatcaataaagagataaaaaatattctgctcaagggaatattaaccaaccggtaattaaagaattgtaatcagaaatagaatcaacaaagagggatcagcaatctttaccattccaaacacaattatattttacaatagaacacttaaattttaaaccagatgtcatttccctccagaaaaaaaaggaggtggctgtggagttggggggaagcctacttatgcattgcatctagagcaagattaacctatttaaagttcagaaggatttgtataataacctaaacaccacaggtttgcaatgttaaccttcaatcacaattactttgggaattaacatcaaaattttcaggtcatgctttttttcaatgatatttacagaaaaagaaaaatacaccggtgatgaattggatgttgccagaaaaaaaagacaactcaattatatatagagcagatttataatagatagtcaaagataatatgctgaaacactgaccagatcaattctgaaaggatgccatatatgccctgtcataagaaaaaagaaaggcaacaaaattaattagtgaggcatgaagccttgtttgagtaggtctgcatgtgtgagtttgttgagaagggggggtcatacctgagaagaactgttatccttgaaagacaaaataaatatcaaaactgcagtggaaagaaatggatatgtgcaatcagcgtgggagaaagaatacatagtacaaatggaatacatagtgaaacattaaaaaaagaaagtaatttgtagagtttaaactatatagtgtcaagtgttatactgtgtgtttagaggtattgtgttaacacttgtactctaacatgtggatcatatttgtgatatgtctttctacatgacatcctgcagatggcagacatggtaaccaaaagtcaaggtagataaaaagtatttttactcacctagttgtat

SEQ ID NO: 17501 - DNA, 704 bp, Oryza sativa
cgataactaacaaagcacctgtaagcataacaccttgagtaagtcatgtacaatttacctcgattcatctttggtgctgcgttatacgtacattaaaatttaaaagtatccttctgagcagactgataaactaagcaaaaacataaaagataagatcgtatttcttgtaagatactgaacttttgcttcaaaagtaaaaaaaaacgaaaagtagtatttagttagtcggtatgagagatgacacccatgaggagcagccaagcaaaccataagggcaggaagtgtagtttactatagaggaatagacaaacgcacaataatcgaacaatctaacatgcgagttggttttacttaaaaacaatggcgcgacgtgagaaattgttggatgtcttttaccggagaggatgccgatgtggaagctgcggcagcggaagaggttgccagcggcgccgatctcccgcagcgcgcgcaagacaggttggagggggccagacagaagggcgttccaaatagcatcaatctcttcctgcccctgcccagcgggatccaaatccacgagaggaaaaaacttctcatcttcctctttcaattcctttgcccaccaaggtagtgggggcaaggcttgcgatgcgggagaggcagatgcggcggcgcaagacagcttcaaaccaacgactccattgccacgcttgctgcatcgaaga

SEQ ID NO: 17502 - DNA, 9482 bp, Oryza sativa
tttccactcgggaatcggtaggggttgcagcagaccagctggcctttgatgttctgccttgactctttggcaaacgtcacacagggctacgtattctgcgacatctcgcttcattccagtccaccagaagtatgccttgatatcttggtacatcttcgtacttcctggatgaatggaataggcggactcatgagcttcctttaggatgagatctcttaactccttcttggccggtacacagatgcgtggaccgcaccaaactgtgccttggttgtctatggagaaattggtgtctttcttctcctgtattctttttattaattcttttatcccttcgtcgtctttctgagcctcccggatttgcgactctagggtaggctgtactgtcaaactggcagggacacctggctgtaccatggtcagccttaacttctccaattctctgcacaggtgatcttggtcaggccgtatttgagctacattgcaataggccttgcgacttagcgcatcagcgaccacgttggctttaccagggtgatagtggattctaagatcgtaatccttgattagttccaaccatcttctctgtctcatatttaactcggtctgtgtgaagatatacttaagacttttgtgatcggtgtatacttcacatctgttcccgattaaatagtgcctccagatcttaagagcatgaaccacggctgccaactcgagatcatgggtgggataattgacttcatgaggcctgagctgcctggatgcataggccacaacctttcgttcttgcattaggacacatcctaagccttgccttgatgcatcacagaagatcttgaaatcttttcggatatctggcaaggtgagaactggggcagtggtcaaccttttcttcatttcttggaagctgtcttcacaggctgcagaccattgaaatttcttttccttctttaacagctcggtcataggtctggttagcttagagaatccttcaatgaatcttcgataatatctagctaagccgaggaagctgcgaatctctgacacattcttgggcgggttccaagcaagtacagcttcaaccttgctgggatctacttcgacaccattggaggaaatcacgtgtccaagaaatgctactcggtctaaccagaattcgcatttcgagaattttgcgaatagttgatgatccctgagcttttccattatcaacctcaggtgttcagcatgttcttcctcgttcttggagtatattaggatgtcatcgatgaataccacgacaaactggtccaggtattccatgaagattttgttcattaagttcatgaagaatgctggagcattggtgagtccgaaggacattactgtgaactcatatagaccataacgcgttgagaaagcggtctttgggatatcttcagatctgattttcagttggtggtaacctgacctcaagtcaatttttgagaaaactcttgctcctttaagttggtcgaacaaatcgtcaatccgtggcaacgggtacttgttctttatagttacttcattcagggctctatagtcgattaccattctctcagagccatcctttttcttaaccaggagcactggggctccccaaggggatgagctaggtcgcacataacctttactctctaattcttcgatttgtcttttaacttctgctaactcattagctgccattcggtagggtctttttgcaattggtgcggtgcctggcgccagttctatggcgaactcaatctctcggtctggtggcattcttgttaattcttccggaaatacgtcgggatattcacaaactatgggcaccgactccaaggaggtgacttgtaaacaggttaagatagaccgacttgcggtaggagtgttaggggtaaagcggacttgcttttccccaggtccttgcaaggtgatggacttttcggcacaatctatctgtcctttgtgcttagccaaccaatccatccctaggatgatgtccaagctttgcgagtctaggactatcggtttggctaggaagtcaacttcctcaattctaaggttaacttccgggcatatttgagttgcccttatattccttccaggggaatgtactatcattggtacacgttaattttgggttttccaaccatttcttttcacaaaagcttgtgatatgaaagaatgggaagctcccgaatcaaacagaactattgcgggtacggagttgacagagaacatacccatcacaacgtctggagcatcctgagcggtttcagcttgaatgtgattcacacggcctcgaccaaagtggttggaagcacgtgaaccttgtccacttgcctgagtgctaggacgagactgagctgccgctggagtaggagttctggcagtgctgccattagcatgccctgagttggtgttggtaggattctgagggcactgtctagcatagtgacccatctggttgcaccggaaacactgaattgctgacggtccctgtggtgacttgaaagaggtaacactgtttggcgcagtattgccactaggggcacgctgctgtggctggggtgccgggcggttcatctgaggacgaggggcgtagcctggctggcggttagcctgagtgaccgactggtggtattgcatgggttgaccgtagcgagggcgaggtgcgcctcgggaggaattcccttggtggttagatttgcgtttcttgtattcttcggtagcctcttttctggcatcctcaagtagaagtgccttgttgatcatatgttgaaaagtggggaagtcatgtgctagcaactggagtctcattccaactgcgattcctttcaagaatttcctgatcttcttcttatctgagtccacttcctcaggggcgtaccgagccaacttgttgaacatacttaggtactcattgacactgctgttgccttgcttaagtctattgaattcctctttcttcatgtcaatggtgctttcaggcacatgagctgcacggaaagccgtggcaaactcatcccaagcaatgctagtgggttcagggtgtgcattgcagtaattctcccaccaatctgcagcaggtcctcttagctggtgagaggcgtagagcgtcttctcgactggagtacactgcactaagttgagttttctatcaacatctttcaaccaatcgtcagcctcgacgggctcgacggtctgagagaactctggcggacgtgacctcagaaaatccgtcagcttggatctattgttgcccatgtgagggtggccatttccatgagcattatgctgataaccggctacggctgcggctattccttgcaagatttgtgtctgaactgccattaagtgttgcatgttgttttccacatgaggtggggaagggaggcgttcttctccagaattgtgactggcagtgcggtgagagcggtgagactgttccatctctgcatcacgggaagctgtgcgatgcgagcggttgctacggcggggttgctcaacttctgcgttgcgggaaacagtacggtgcgaacggttgctgcggtgagactgctcattagctgattcatgatttgcttctggttcggctctaccttcttcaaaaccgaagcgggctggcgcacgagctgcacggcgggggcggctagccatctaaactcccagaagagggcggggtaagagtcagataagcacttagggggggcaaggagcaaagtaaatagcaactcatatagcacgcactaggcataaactggatttttcaaatcataaaaacacctgatacaacgggtgtggacaagtcacagagctacgccgagcttgactgtgcgcacaccacctaggagaaccagactaccaaacaacacccacaacaaacacacgcacgcactacctcgccacgactccaaaagagttggcggcggaacaaaagggcctaacacacgaacggctgctgaagactgcctcctctactcctcgtcggccgggctgcctcctgtagtcggctcctccgtcgaagaaacgtcgatcggctgacgcgaagggaccggcggaacctgtcgagggccggcagcagcgcgggccgctggcggtgggggagctgggtggtggaaacggaacacggtggaagaaccaacaacacgcttccgcgcagtgcggataaagcgtggaccacggcgggaggaagcaactggggtgtgtccgggggtgtaggaagggctaactgggtgtgggtagggggagtacactggtgagtacggcgcacgcgagctgggggagcgcgggccactgggagtgcaggcagagccgcgggagctgtgggaggacaggtggctggcgtggcagaggcggcctgagtcccaggagatagtgtcaactgaggtgacaccctcctcggccagacgggcctccaaagcggtgtagcagcgggccagggagcggtaagcctcaaggagtaggtcgtgctgagtggcctgagcctccgaaagctcaaccatgcgagtcagcactggctgagactcgctgtacggacaagggtacctggcgtctgagtggccagaaggaaggcgtggaagctgccggaaggcggagcctccgagacggtggctgtagtcgtgggccaggcgacgaagcgcagtccaggaaaggtcctggtacgcgatctggagagtgggcctggccacggtgaagtggtgggggcgaaggccagctccgtgtataccttcacgagggtagaggtacacggagagctcacagtgagggggaacacggtccacggagtaccccgtgtactcgggacacgagaagccaaggaaacaggcgaggtcacgaagctgagcgacgtggtgaccctcactaaaaccgtgggaactgaagctggcgttcactgccatctacaattttgaaagagggagaaagatcagtaaccattttagaaacaaactattgaaaataaagaaagcagaagaaaccttagcttttcgcaagtagttttgaacttagtatccttagggtcgtcctaagcgtcgggtttcgccctagggccaagcctgtgctctgataccatctcttgtcacgccccgaactagtaccgaccggaactagcccgtgacgctccaaattaacctgttaatcgataccagtcccaggaaacagtgctggtatcacaggaagacggattatcacagctacagaagtctctttattatagagtagaggtagagtcatgttgggctgcggacagatcccgagctcacaactgcattacaaaagggaaacggaagccaggacttggaccaaacaacacaggcgcgacttgggaactaggccgaaaccctaaaattcatcgtaaccggcttgctcctggaagaactcctcatcagcaggatccgcttcatcttcttcagcaactgcgggggggttatttatatagagcaagggtgagtacgggagtactcagcaagccataggaaataagtgtttaatgcaggcttcaaagaaaggctgttgtttttgcaatttattttatttgagctcttttctaaaaacaactaagtgagtgcttctcaaacgacacggatgagacagtgctactcgtccggtcggagtatgtgcaatgtatcaatctttagatcttaaaacaaggttggcacccggccaacagcttttcaaacggccacccgggccaacaacttttcaaacggccacctgggcctagctgatcccgtcagctgctgatttttcaaacatcgaaccccttttcaccacagtaatttcacaagcagttgtcaaacaaaactacgctaggaatcacctcacatccgcccatgaccgtgggcacggctgttcgaacagtttgttaacctctgcagagggggtacactttacccacacgacattactaacccggatcacccagcccgtggggatcagccacgtcgggagacctccaagctttcatgacaaggcatttccaaagccgacacaggcttaccatatgccgacgagaggggtcccagaccaacaacaggttaggtcccagaccatactgtgccaggaagcccaggggggtcctctccgacaccaccccggcgaatccacatgtctctcggcatcatggctcccctgataagctagttactcagccaggggtgtcccattccacccatgtggtcgtacttgtcttatgttcagatgaaattccaaggaaacggtccttaggtgcaagagcgggaaaccgtacacccggtaggttccccggtccgcggttttggaaattcatttagttcgcaagcaccgacccaggtgtcgggttttccaagtcttttgtaaaacccaagttttacccaagttgtttctcagattttaagtttgaaggcgaccgtcgatactcgcacagagtgcacgaatatcgaggcgcaactgggtggttacaaggggacatggtataacaattaacaaaggaaggatcaaatgcaacaaattaggcaggtccgccaatctgccttgcagacgggacaacagattaagtgcgatcctatcaatgcataatattttgcaagcaatataattaaattttaaatataggctcaagatgttcaaaggtggcttgccttgctcgagatctggagcttgatcctcgaaatcctcgcactgcgggtcttcgggctccgaaactacacgcgaaacgggacaactcaacaaacggcgaaaataaagccctattaatgacctctaagcgtgccattagatagatctcgagatttggggaattttggaagttgaacggagtcaaacggacttacggtttggaagatattgaatttctaagattattggatttttggtctaaaggaaaaaggatttaattaaatcctttttggaaaagaaaagaaaaaaaaagggagagggagggaatatagactttcctcgggcggctagggcgtggcccgagaggaatggggtggtccggccgagctaattgggccgaccggcccaagacggcccaagacgcgcgtacgcgcgggagggaggagagagagagccggtggaccgggctcaccacgcgcggtcccgggtgggacccgcttgtcagcggctcggctcaccgtgcggagggagcacgcggcgcggcgctagggtggaggatggacgtggtgcacgcacgcggttcgcggaggacgcaggtgcggcgggcccacgcgcagcctcacggctcgcggtggaacgcgcgcacggggagggactgaccggggtcggcccgtcccgacctcggctgagctggcgccgacgtggcgcctacgtggctgccacgtgggctggcgggaggtagacgacgacgccggccggaacggacggcggacaacagcggcgagcggcggagcgaaccacggcgatacgggcaaaagcgagcacaccgggcggttgttcgtgatgaggggagacgaaccaacggctcggatttgccgggggttgctagacggcggcggattgcggcggcggcaaccggcggcgggagaagggggaaacggcgacgaggtcactaggggctgattcccggcggcgagagcatctacgcggttacgggaatccgatgctagcgtcggatttggcggaactacgctgagcgaggccggcgacgagcggcgcttccgagctcgggcggcgacggcggcgagcactcggcgagcgacggcaacggtcggggcagcgccggctaacttcggggaggctactcgagctactaccgaaaactaaggggggggagatggagcgaggaggaagaacggagtgaggcactaccgtgcgggacgggcgcggtgacgagaggccgacggcgcgggagtgatctctccggcctcgggccgaggaagaggaagaagagggtgtgcccggagtccccttgcgcgtccacgaacgcaccggctctcccggcgcttggcgatggacggcggaggcgagacagggcacgggagcggcggcaatggcgaggaggcgaatgggagaggaaggaagggggaggctgggggtttagatgggcggcaatgtcggtttgggaaccgacttgcgtggtcaagggcgcgagctggcgctcggcggtcgcggccaaagcggcgacagggaggatgacgccggcgaggaggaaaaaggggaaaggagggggagaaaggggcttgcccttttgccgattcggaaaaaaggaggaggggagcgggggcgacgtggcagagggaggggggcgctgcctccgtcccttggcggcttgcgcgcggagtggcgggggccgggcggtcggccactcggcacgcgcgcgcggcttgcaacgggaggcgatgacggcgggcggtttggagcggcgcgacgacacgggcgacagacgcgtgcagaggctgacggcggcggcgaccgggcggtcggccactcggcacgcgcgcgcggcttgcaacgggaggcgcggcggatggagtggcgcggctcgggcgcgggcggctcacgcgcacgcgaacacggcgcgcgggaagcggcagcggggaagcggggagaagggctcggctcggcgcgggcggcgcacgcgcgcgggcagagcggaggggcgcagggcgcggctctcgcgcttgcgcgcggcacgcgagggaggggcactcggcgcggcgacgcgcgctcgcgcgcgcggcgcggggcggagcggagggagagagggagagagagagcgggagcgcgccgggggagagagcgagagagagagagagagggggggatcagggagagaggggagagagaggggaaagggctgggggagaggggaagatgggccgagagaaaatcggcccatcgaccccgggggaggcaaactagacttttgcggagggatttgatttggaaggatttggattcggaattgaactcgacgatagatcggggattgagatcttgagatggcacggacactaggcaacaagcaaagaaacaggtttcgcaattagggtttttaggagataattttcccgctaggcgccacgacggaacgggtgctacatcaacgtagaagttgaccttaacgggcgtttgtgaaatgtcatgtaacaacatgtgttggggagggcgagccggttaagctgagcggagtgagccgggagttgcaaaagatcaagcgagccgacgtggagcgcggcattggaatattggattggtaaagtctccacgcgtcatgctcatccatctataccagagctgcacagcacatgggcgtgggtttgcacccggatccacaccaaccctgcattaacttaacgcctacggaagtggtattttgggcttctggcacacacactgtgccacgcatagtacacacgcccagaacctgttccccacgacagtagactaggcatatgcatcgctgggctatataaaggaccttaggtgtgtttagttcacgccaaaattagaagtttgattgaaattggaacgatgtg

SEQ ID NO: 17503 - DNA, 602 bp, Oryza sativa
aggggaagatgggccgagagaaaatcggcccatcgaccccgggggaggcaaactagacttttgcggagggatttgatttggaaggatttggattcggaattgaactcgacgatagatcggggattgagatcttgagatggcacggacactaggcaacaagcaaagaaacaggtttcgcaattagggtttttaggagataattttcccgctaggcgccacgacggaacgggcgctacagaccaacccccctaacaagaatctcgacccagagattcagcacctaaaggagcagctccagaaactcggcgcggagaagatcttctcgctcccaggttgcctcatcttcagaatgattgctccattggactttgtagaacttgatggtcttccttcgagtctgacgttctgcctcttcaagaaccttgatcggtctttccttgtaggtcagattcttttccagcacgatattacccaggggaacttgctcttctggaactcgaagacatttctttaactgggatacgtgaaacacgttatgcacatctgcgagaccttcaagtaactcaagctgataagccacttcgccacgtctggcggttatg

SEQ ID NO: 17504 - DNA, 1993 bp, Oryza sativa
tgcggtatctacctattagtggatcgtggatggtattttgttttaaaaattgaattaattgactgctcgtgtataactaatccctgaagaatcggtctgtacgcaggtagtgggcggtgaggaatggtatttaaatcatcaaaccacatactgcttcatttgttcagggctgcaggaacttggtttggacctccgtagtccagctcgaggatacgccgccgcgcggcggtgctgatttaggatggataaacaagtgaagaaccacagaccttctgatggtacggatggatcaaggtatgttgttctgtttcagtgatttatttcagtatgtgccgctggttttttttctctgaatttcgccgtgtgaacttgagcaattctaaatcatcaattcagggaaattcttatggacgagcgcaaccctaccatggacatagtagatggtattagtcaatctgtccatgattcacaaccggatggtggtcagtcaaggttggatcgtagcttccgtgaatttaaaactctgtaaatggtagccagatactgacacatcttgattgtgttatgaagccgtgtagcaatggaggaggacgtgccgtcgcgggttggatcacatgattcagggcatggaattccagagacaaggtatgtgcatggctaggtgtcagctgagcattcactttaaagcagtatatactacatagaaatgttcagtatgtgtcacatgagaaagttcagtatatgctatcttctaggaaagttcagtatgtatcacatagaaaagttcagtatgtgctatattgcagaggagttcagtatgttgcacagaaaattcagaacatactatatgctgtcgtataacaaagttcagtacatagcctcccatagaaaaattcagtatatatgtgaaaaattcagtaaatactggtgcgtatcaaagttcagactacgaatcactatggaaagatttagtatacgtgtggaaaatgcagtatatgctatcgtctagaaaaattcagtacgtaacccatagaaaaattcagtacatactatcattcaacataaatcagaaagaacccctccattttaaaaaatgagtatatacaatcatctaacaaagttcagaacaaagctccccatatttttttgttagtagtacaacatatattttttttaaatttgcagtaagtactgattataaattaggttgttttttgtaaactacattttcagttagtagtagtatatgctatttttaaatatagtgtctccaatacagaaatttggtcccttcactggattggacagaaggaaacccatatgaaaaagaaggagctgggataccgatggaaaggtttgtatcagcatgttacggatttttacgattttttttttagccaggatattggtggtattttctgaaaactgattgtacattttcttttcagaatggtggtagataatgttgatagcagtgctgtcatacctcctgagtatgctgatcctcaaattcttactccgatgctgggacaaagatttaagactgagagggatgcctataatttttataatgtttatgctgttagtaaaggatttgggatacgactggacaaagatcgcatgaatactaaaaagcagagaacaatgcggcaaatatgttgttctcaccaggtacatacattatgtaacaatatcttagtagcagaaatttacctaaataaagacttgacgtactatgtgttaatttcgaaatcttttatgcaggggaggaacccaaaaaccaagaagccttccgttcgaattgggtgcccagcaatgatgaagataaatatgtctggagctggtagtggctggtcagtaacaaaggttgtttctgcgcacaaccatcctatgaaaaaaagtgtaggagttactaagcattaccagtcgcacaatcaaatagatgaggggactcgtggtattattgaagagatggtagacagtagtatggggc

SEQ ID NO: 17505 - DNA, 703 bp, Oryza sativa
ttataatttggaatgaattcgttatactttacttattttaagtatatgatgggttattcattggatgcttattattgtcattaattttgcagacaattgtccttccatggcagctgccattagaacagtatttcccaatacaatccatcgtgtgtgcaagtggcatgtactgaagaaagcaaaggaatttatggggaacatatactccaagcgtcatacattcaagaaagtatttcataaggttcttacgcagacactaacagaggaggagtttgttgcggcttggcacaaactgattagagattataatctggaaaaaagtgttaacttgcgtcacatatgggacataaggcgtaaatgggcatttgatatttttcccataggttctttgctgggatgactactacacagagaagtgagtctgcaaaccatgtgtttaagatgtttgtgtcaccctctagctctatgaatggctttgttaagaggtacgaccggtttttcaatgagaagctgcaaaaagaggactcggaggaattccaaaccagtaatgtaagtatccactgtgataggtttgttgacctctttttatggatatgtgtaatcaacatttggtgtcgcttggtgcaggacaaggttgaaattaaaacaaggtcaccgatagagattcacgcatcccaagtatatactagggctgttttccggg

SEQ ID NO: 17506 - DNA, 1426 bp, Oryza sativa
accaattaaatttatcgccaaaacccaatattgccgatctatatgtgcacataagtacggacgtttagtaggtattaaaaaaaaggtacgtacatgtattccaagataaaaaagtacgtacgtatgtacataagaaggccgggttaacgacatatttttatcttctttttttctcactcggatagaaaaaccaaactgcccatattaactatgctctacttacgctgtaaaaatataggcacatgtcatcgaaacaccaatgaaaagcataaattaattaaagtatatattatgtaatagttaaattagacttgcattttttaaaataaaaacaattctaactgtgactagcaattctcaaaagttacctattccttacttaaaaaaataatgatatgtcaaaatgatatcactaaatttatcatgaatattctgttttctctattcgtataatatttaaatatcaaagattgtatatattattttcacaccgtactgatctcctttatcttctacttaggattcatttgatctagctggatggctgagcttattcaggatacatgaaaagacacatatcattagtgcaagattaattaaatattaaatataataaagccaaaatagatttatttaatttttaaacttttatataaaatatattttaataatacacaagttgcttttaaatatatacgatgtaggttatggttgtcaatttaattatagtgcataaaatggttcagatggatttagatattattatcaaaagatatgtcttttgtaataattcctatatcaatgggtagataactaggaaaacatgcttacgacaaacaaggagcaaccaatccgataattactctagaacttattgcttatttactaaaacgtttaatatgtagtatgtaatatactttatgaataaaaaatatcctaatatatcaatcatatgccaccaaggatccataagtacataagttttatctgtcaacatttgatgtcgcgattccggtatttgcataatatggggatcattggtactagggtatacgtgagactgaggtaaaaaagatggagacagagatttttatacaggttcaggcccctgaattgtcaggtaataaccctacatcctgttggccgaagccggtattgctcttattcaccataatcacaccagtacaatatttggggtagtctatctaactgttgtcgacatggtggtctgtagttctgactcgtagtcgacaacaggatagtcttccttctcgaattcatgcccgacgagatcagagatagcgctttcgtctctcctgacagtatccggagacaccgtaggggactagccatgcttatccctgaagttgatatccagcgtcttgtcttggcgtatgttggcttctgttgttccgtgtgtgttgat

SEQ ID NO: 17507 - DNA, 1300 bp, Oryza sativa
cttgtggagtggaattgaactggcatgtttgataggtctgtttaagtttcagcaatcaagtcaaatgtcagctactggcatttggaagagttggaaactatgctactgttcaaattcaaacagggatggtggctcgccggttcgttcaaaaaaaaattcaaacaaggcaatattcggattagcataccctgtattcaatttcctcctctgtataccaatttggtgtgtcccagaaattgtatggttcattaggctgtccccagcgagctatacaaactggctgatccacaatagtagccccctgtaatgatgcaaagtgacatcaaatgaacaatagagaaagttggtgtttgacaatgtaaaagagatatgatgacatattagtaatctaagtagttccaagagcagattagtaatctaagtagttccaagagagtatgtgggcatatggtagcttcctaagtgactgaatttggaatatatcaaattgaaagagcctctgatacctaaaatcgttttttccaactgacacctaaaatagtgaacagtggacatattatatactccctccgtcccctaatataagggattttaatattttgcttgcattgtttgaccactcttcttattcaaaaaaattgtgcaaatataaaaaacgaaaaatttgtgcttaaagtactttggataataaagtaagtcacaaaaaaaaataatttcaaatttttttgaataagacgaatgccaaacaatgcaagtaaaatgtcaaaatcccttatattaggggacggagggagtacttgatactgaaaatagaagtactgttttcactatttgtttagtggtaacagttataaatttccaggatttcaccattgtgaaaccagagttcaaccgcatagttgagagcggaatatggtagtccaggaccgtgatcagtgatcatttgtgtaaatagatttaagatggataagtgtagaactcaaaaggaagaattaaagaatttatagttaggtaggaaagaattagtgataggaatcagacacgcattgaaaaaaaaattgatccaggcatctgctttgaaagatactgctaccaaaaaaacttacactgagcaatactgcagtttccaaggaatagggttccttgaatgtcacataagcagtagaaccatattctcctgatctgttgaaaattgttaaattcgtcataaaatgataagatggatgatgagaggatccatacatccaaataagctgaattcttaaattgctaaatcaggttacagttaaagggctgcagg

SEQ ID NO: 17508 - DNA, 2463 bp, Oryza sativa
attcctgcagcccatatatatatatatatatatatatatatatatataaatataagttggtcaaatgattttaaagaagttaaatcgtcttataataaaatgaagggactaataaataaagtctcaaaagataacataatttacacaaaaattttgtctaacagattgaaagtaagtttgaagtgggatttttcacggcacgcaaaatgaacaaaccattagagtgtgattaacggtgtgtttatcactaacttaaaaattagattatttgattttttttaagaaaaacttccatataaaaagcttttaaaagtacaccttttagaagtttaaaaagcatcctactttaaaacttaccacccataactcactaccgaatccgcaacctaaatggctaaatctctgtttggatttcaggagaaaaatgtggataattttaaggtaaacatggttgtcacgtgaagctttacaaaaatgagtcatcgttaaggtctgcctttgtttgacacaagagtccggttttaaccgataagagatcaaaacaacctctaatacttgctatgtgaagatttacaaagagttatagtagatcatcacgctctgcctttgtttaacatatatatgtgtccagttttaacaggttagagataaaaaaaaccctaatgaagaacatatcacaatatcaaactcccaaaaagaaaaaaaaacagaagaaaagaaaaagaaagccacccccggacggaaaacgaagatccaaatatagagcaggcccgtataatcagaaggaaaccaaaaaagaaaaaaaataggagaattaaacgagcaagatatatcgtcgacgaggcccatcgcgtgcgcttcccctcccctctcgcctccccaaattcgcgttcgccaccgtcgcgtcccccctcgcctctgcctcgccggaaccctagggagatcgccggagcacggcgctggctcacgggcggcggcggagatgaactcgcagaagaagcgcagccccaagatcgagcccttccggcaccgcgtggatgcggacccaaagtccttcgacaaatcgtggaagaagctcgaggacgccatccgcgagatttacaaccacaacgccagcggcctctccttcgaggagctgtacaggttgatagatctacgccgcatcccctgccctgatttttttctgttttatgctaggttgattttggcgcggcgtcccatgtggggggcgggggatacggggaatcgagttttgtatgaaacgccagctcgattagtagatttagtttctcacactgtcatcgttggagtcatttttttttccttaggttttgctgtatgatcatctatgtatatagattggatattaggcgatgtgcagggagtttcaaacgattttaatcgatcggatatatgctacatgcatgcctattaggtagttctgtgtatgctacatgcatgcctacatgcagtacatatgtcggaatttgcaaccctagttcatgatttgcatccattgtacagtagagaaaaggaattcccttatttatgatcgataatagtggttctctggaaattgtaacgctttggggtcatgggctgtggtgtagtgatattatccgacatatgtactgcacagtgcacatgccgtctatttcatgaaggccacatctatgtattaccctatggtaggattttgttccctctcttaagcttcaatggattcgaaattttctttaagcctgaaatattgaatataagtcggtcatatctgctttgctcctatgatgtttctagaatagtgctggataattttgtctcctcataagttattctgggttggaagtttgataccctttgcatatgcccttttaatcaatatgatattttatagcttaaaggtaatctatttactctctactagtgagcatgctggttaatcattatttcaaaacatatttcattgttttctatatgctacatttcatcgtggtgttgtacgcatatgtgtccttatcttaacaaacactatcttacctggttttaaccatcataatctacccatttattattgtgtaactacttagcaagtagaaataatagtaaccactagaaaaggaaaaatttgctatacttaataatgtttcatattctaaagattttcccactctgctaaagattttccctgccaaaatatagtattattgtagatttattaattcattagttttggttgagataagacatagtgaggtcctttcttttgagagtttggtgtatatattcaaggaacttgatcttcctggcagtgcattgtagtgctctctttacctgcgtaagttacagctgataaaaatatcccttctttgtttggtcctcttcattttattagacaccaaagaccaaagatagaaattagctgataagcacctttcatgcattgctcttgttggccttttgttt

SEQ ID NO: 17509 - DNA, 1326 bp, Oryza sativa
tgccatggcttccagcggtggtcggcgagcgagcaggcggcggcggcggcagaagaagaaagaaggcaagtcttatcggcaagggaaggctaagcctttcttccaggtctccctctctccatctaaatccgtttttggaggaggaggagggggctatctcgttttagctaatctgttgtgtgtgttggtgatggtttcagttcagtttcagtttcatgtttgtgatcagtgagagtgatggtgtgtcagtggtggtttagatcatgtgttaattagttctgtgggcgtgtctttgtgttggatcttggggttgggttttcagaaaatactattgctgtggtgtgtgtgtgtgtgtgagtgagtgagtgaattaatgagtctctgaaaattctggaataataagaatgtaagcagatgatgtatgtgccttggtgctacttatatatgtgctctcgttttctgatattacagatacatgagacactatatattcatgctactatttgacagattcagttgtttgaaaagggaaaaaaaaacaggctagttaaacatattcagtaagacagttatctgaatagatgagctttattgcatccacattttctgaagcaccatgtctcttcttctataaattcagttgtttgtaaagggaaaaaaacaatataaacatattcagtaagacagttaactgaatagatgagctttatttcatccgcattttctgaagaatcatgtctcttcttcttcttcttcttcttttgaaaattcagaagcaccatcccatagtcgggatttcaaatatgagggagattttggggttgtttggatcgtttgtttgatgttgtttaggattgaaccttgtttgtttgtttgtttggtctgacagaatccccgatatgaaaaacaaagttttctcaaaaagagctatcccctttcctcaaaactgatagctaattgggttccataattcttattgttttggacaagcttaactttcactaataataacctttaaagtatttagtttgaacatactacaacacaacgtatagattactctcaaaagttactttaataaacttaaatatttattacttatatatatataccgcacatcctataccgcacccaggtgcgtaataaataaaatgctccccctcacatcctacccccaccccacccacccacccactccctccccacccccacccacgcctaccgttcccagaggtactccgtattagaatgtcgttcccagaggtactccgtattaggatgcaaccaaccaaaacccaccatccgggaaactattttaacagctcg

SEQ ID NO: 17510 - DNA, 4713 bp, Oryza sativa
ggagtgatatattacatattgatctatcttatcaatttttttaaaattttttcgtaaccatctaattgacatgcaataggatggacgtccactcgaactattggaatcctctccccccaccaccctattttaaaatttttcgtaaccatctaattgacatgcaataggatggacgtccactcgaactattggaatcctctccccccaccaccctatttttctggatcgtacaccatccacttccacgttgatttcccggatcgaacaagagggagagggcacaggcggcgacggttggcggcgtgcgactgttgactcgggcttcctccggcggccggcgacggcgacggcttgtggcagcggcgggcgggcggctgcagcatgcgacggtcttggcgaggccgtaccccagggcatcctcgtcctggcctcgccgccctcgacctcgattcgccctggatctcgatgccgagtttggatctggagatgcggggtcgcatcctcccgctgtcgctagccgattcgccttcttgccagaccatcaccactcttctcgtgactgcgagaggtacacatcggctgcaccaatttgctctctttttgcatttttctcattgtgtgggcagtggatgtggtgaaggagcttggcgcgtgaggtcacgatgcagcccaaatgcgatctgcatcacgtggttcaatctgatgcgtgcgtaggtcaggagtctcgttgagtccttttttttcttttggactatttgaagctctaattttttggttgaaccacgttcttacgatgtgctagaaattcttttttttttgtgtgtgttcgaacgtgtgttcctgattcttttttggtgagatttcctttcatgagcttcacgttcaacagagcatctaagtaattcgtgttccagttgtactccctccgtcccctccgccccccccccctccaaccaaacaaacctttggttttcgtgtctaatgtttaaccgtccgtcttatttaaaaaaatatgaaaaaaaaattaaaaagacaagtcacgcataaaatattaatcatgttctatcctctaacaaaaataaaaatacgaattataaaaaaaaatcatataaaacggacagtcaaagttggacacggaaacctaggatttgactttttatgggacggagggagtatttgtttcctgagttgattgataccagttagtggagtatgtcagaaaacccaaagcaaagccgtggtgatgagagctacacatccacataacttgtttctattctgattttactgactttaatctctgtgttgttttagggtgagtttgagggataggggattgaaaagattggaaagatacgcaaaatgaagtgagccattaacgcatgattaattgagtataaattattttaaatttcaaaaatagattaatatgattttttaaaacaactttcctatataaattttttttgtcaaaaacacaccgtttaatagtttggaaagcgtgtgcgcggactacgatgtgatttctcaccctaactcaccagaacgaacgctcccttattgtttttactgtaacgtttctgaaaatccctgattgaacaagcactcaaggaggctcccgaaattcgacatatattaaggttgatgagctcgctagtacctagtacttggttatctgaaattttcttgctctattgagcagctgggatgaattggagcaatcatgtggaacagagccgtttggatgtattggtcggaacattttgtgcaaattaactttttttgctcagtatatacccatagatatatgatgtttcatttgactgactgactaataagtttcctgttgaacataccatttttactctgtatatttttgacagaatatacttcttcagactaaggtctaaattttactgaaattattaacttataattcttgcaggcgtcagcagctgcagtgtgcactcttgcagtggatgctctgctgaagacgtacatgttctaaattttttggttgctcatctatatctgaattttctttttaatcgtgaattcatctgtgtttaggaaactacgtaagaacatgagaagattatgccagtggtggtggtgccactggaatggcatcctggtcattatcctcgacatgtctgccgtcaacgcacgtcgccagcggccaaacacaaagagcaggggtgacgcagagatgtcgacccaggacgagcacaccacaattgatgaccggcttcggtggcaggcgatgccaaaaatcttcacgactgatgccctctggactgataatttttgacaacgagtgtatatgtgtgtttgtaacgatgatggcacgatcaattgaagaaaaaaaccattatacgtgtattctcgtgtagtaaaatatttactgccttaagcacaaagcaatttatttactgagaaaagacgaaactaatatttcttgccatatcaagagtttttactgagagaagactgagagtaaattatttatcgagagaaggacgttggtacaaaaatcaggaatgagataagggcgcagaactatctaagagtaatacatttagtgaaagaagaaatcgacagagagtaatacatctagtgaatgaagaaatcaactgagagtaaatagtaaagtaatacatttactgaaaggagaaaatcaactgaaagtaaatcgtttactaagagaaggatgcgagaagaaaaaacaggatagagaaaagatgcgaaccagggtgcatgtgggggcggttgggggtgtggagtcgtttactaagagaaggatgcgagaagaaaaaacagaatagagaaaagatgcgaaccagggtgcatgtgggggcggttgcgggtggggaggagagagaaaggtggtttcctggtgggagtgagggggggtgggggtggagggtaggttgtgaggggagcgttttagttattacgcaccctggatgtgatttagcgctgtcctatatatatttgtttgtttgtttattaatataaaatcatagtgaaaaatatgtttaggagattgtgtcgttgtctaaaacatcaattaattatggaactagagagacgataccatgttttttttttgtgaaaacttgttgagttcccttttctattctttcgtgggccaaacatgattattatacttggtgataccatgtgctttgctacggaatatatggatgaaaatatgtttaatattatagaaatgataaatgttgaagtattgtgaaaatgatgcgaggaagatgatatgatatatgttgagctctagtattatattttgcatgattagtcatgcttgtatgatatttaaaatactctataatagtaattgttagtgggtgatgatgtatcatacttaggagatgagtcgacaataacaaattaacatagtaaacaaacaaaatttagaaaataataataaaatatcgttatcagaaaacaatatcttattttccttacccatacaagcactaattattatctctaaccggcctatagtcatgtataaggggaaaatcttttggtcctgggaatggcaccccttatttgttcaaacatataaatatttatgggaacttcttaaaatatttgactacaattatgtaggatctaggtctacaaaatttaacttgattcacacatcaataattttttttaaaaaaagcatataagcaatacatgcattgttctgacctagatttttttttaccaaacttgaattttggtgaaatgataaccatactctgtattgtcaaattattacttcctccgtttcatattataagactctctagcattgcttacatttatatatatatatatatatatatgttaatgtatgcctagattcattaacatctatataaatatggacaatgctaaaaagtcttataactaaaacggaggaggtagtatatcacaatatgtgtaagggaagttccctttagatagaatgcatcttccattcgtttagctgtagtatatgttacaattaaactacgctcggagggatgcttgttttatagccttaggcccatttggttctgactaacacataggataatgattaatagatcacttaaggcccacatgacgagtcgaaggaataaagttggccatatatcctttttcatagaaaaaaaaacaaatatcataaactactctcaggaatcttttaaaaaacaacttttttggcgaacttttataacttttgtatgtcaacaaacacgccctacttccgttgttaataaactgaagaccctattctctcactaaaatactttgtcttcactatacctttttcccatgatgttgcatttgtatcatttaatagccaactgttcacttatttcattgctcactcaatgttcgttaggccattcctaacccaataattaggatagtgtccatagtattaaataagctaccacatagaatgaaaaataatgtgacaagtgaataaatgaggaaagagaaggaaaccatgtcttgcatgagggcagttccaacccataacactagacatggtttctataaactccacatcatcaagaaactagtagtagacactactgttccaatgcaaataccactattccatacttcaatttaatgttacttatctcacatgatgttttggatgttgtgtagaaactatgtctcatgcaagagggctgcaggaat

SEQ ID NO: 17511 - DNA, 3486 bp, Oryza sativa
aatgccctaatacttgcaaatggagctatcagcaatcaggtcgatctgactgaaatttctggtttaattattttgttattctagttgtcaacaaatatccagttattataacatgagattattactctaagacaaaatactaggatcatgaaattgctttggctcggtacatccacacttattagataaacaggtcgaatgctttcactatccttaatgaaatattccattatctagtaaagtctatagtaataaaccatttcttttttctctcctcccttctcaaggaaagataaaccctatataccaaatgattacatacaccttacacgtaccacactttacatgcccttaatttcttttaggaaccaagctttactttacatgctctgctacttggttcactttgtgataagagaaaaagaaaaaaaaagagtccaatttactcccccaaactatctcactgaatcacttaaccccctaaactattttgcagctaattttacccttgaactattaaaatagttcactttactggttacttacatttcacttctttactgatctttttataccagcaatattttaagctttaattttgtagagccatatggtctcattttttttgcttatgcttttatgcttatcagccaaaatttaaattttcaaccttaaatttggagctgattttgaggtttttttcattgaagcttatttttagccattgcttttagatcgctaagaacacatctataaaagttttatttacaaattacttttcatttgcagatatgaagtttcgcttattccgcgaataagcgaaataatggctccgatagatgacaccattatcaaagttcaaaaattttcatgactttctgcttgaacttaaaacctctatgttaaattagtcttagtgcttccaccctagtaaacaacgattcacaaatttcaaaaaatgttgagatataagttataatgcataaatatatcccaccatttatcattgcaaaatatgacatatagaaagagaaatgaaaaagaaaaatactcttagagaataagacgaaccatttttaataattcgaggtgtaaaatgagtcaagaaattgtttagactccagcgaaaagggttaacccggaagtgatatggttggagtcgcttcgtgtataagtgttaacccggaagtgatacggttgaagtcgcttagtgtataagggttaacctgagagtgcactttcgttctcgcttcgtgtacatacagtgaatagtgatatatgattggagggacaagcggacgttgtaagttggttgcaaccacacaactcaggcaggctcacagcccaaccagggaaacctacatctttggcccacgaggcccgtttaggcccaggagcgagtccacaaaggcatcatcgcatacgtgggttgccgaatattcgctccgcttcccccctcacgcgagatatttcctctcccccggtgggccgagccgccacgccacaccgccccctgtatcgctcactcgcttactatatagccagaggggagggagcgggtagggttttacctcctcccccccgcagcgccgccgccgccacacactcccccacatctccccttcccttccactcctcctcctcctcggatcgggaggcggagcgagcaatcccccaaggtgatttcctgctgctcttctctcatctccccccatcctctccgttgcgtgaatctgttgtgtggttcgtcgtcgattatcttagctaggctagattcctcgcggtggtggtgatttgagtgcgtccatctggtcaaaggttcgaggtaggagtagtagtatgtgtgggtgctctcagttcgttgcatgtttgggttctgtatctggtttggattatcatgtttagtggttggcgcggtagttgtaaatctgtggggttttgtcacgctggttaattttttggtttcgtcccggttccgatcgacgtttctttgggtcgtcaggtgtagcgaatggatgggattggttcgatccgtctggtagggattcgttctgctcgtagatctgctgtggattgctttcgcggtcgcctgctggagctaatttggcaggattaggatggttacccatttctccagggcagatctatgctatgttcgttgattggcgtgtgctggctacagacttgttcatgttgttcactagattgttaaacatgtgacgtcagccggtgattgcttgtctgccacggttttgtttgttgtcctagtgaaatatgcacagatacttaagggccgtgtttttgttttcacaataatggcagtagatgagttgaattcagtttgtcatatcgtttttgtatcaaaacaagtttttttcttactggttaagtgcttctcgcggtcccgccagaatttttatgtactgggtatctctgttatgagtactcccatatcctgcatgtacagtactgcagtggtgaattggtgatgtgctgatggtaatgaatatggcggaagtgtatcagtttgctgcttttgttacatttgatgtgtgttttcaagtttcatcttttttttcttattaatgctgcatctatcaagctgtgagtttttttctttgatcgtcttaaacctaacagtgtaactgcatcagtgtggtatttggaggtagtattagtaaaactggacatgttaaaaattcgcatttagtaaaactggacatgttaaaaaatcgtatttagtattttgtatcatgtatgatgcttaatttttgtttgcgatatcaattatatttttatttgttgcattgctatgtttttacttgagtcatgccgtgatatatttgtagttagaattttgattttaggttttgtgttttgcatggttctaactgggtttctttttttggtacaggaatttgtatttgtagcgtgatttgcaaagctagtcaagatggtgaagttcacagtagaagagctccgccggatcatggacaagaagaataacatccgtaatatgtccgtcattgctcatgtggaccacggtatgtgccagaatagttatgactggtgtattaatatctgatcataatgttattgttgggtttacttcaattggttatattccatttcttatacaattgacatttgcaataataaattcatcggattctgtgacatgagtcgatcacagtcgatctctgcatgattagtgccacaattacttgtgcaagttaattcatttggaaggtggcgatcattttaatttactctctttgttgagacggggggagtagttaatagtttgatcattactgtgtgttagcttaaatatttatgctgctgtgctggtcaccaaaatggtatgctaattttttgtatgtgctattttgcaattttgcattggaagaatatgttgtgtattatgctcttttatttaatagcttgtttacttttgcttattgctaatttctctttttgatatgt

SEQ ID NO: 17512 - DNA, 8036 bp, Oryza sativa
gcctatcagccttctcccgtgtcattgagaatgccaatgtcattatggcaacatatgaagacacactccttggtgatgtccaagtctaccctgagaagggaactgttgctttctctgctggtctgcatggctgggctttcacactctcgagctttgctaagatgtatgcttccaagtttggagttgatgaatttaagatgatggagaggctttggggtgagaacttctttgacccagccacaaagaaatggaccaacaagaacactggctcagctacctgcaaaagaggtttcgttcagttctgttatgagccgatcaagcaaatcatcaacacttgcatgaatgatcagaaggataagttgtggcctatgttgcagaagcttggtgtggtcatgaaggctgatgagaaggagcttatgggcaaggctctcatgaagcgtgttatgcaaacatggctgccagccagtaatgctcttcttgagatgatgatataccaccttccatctccgtccaaggcccagaggtaccgtgtggagaatttgtatgagggtcctcttgatgatgtctacgcaactgctatcagaaactgtgatccagaaggtcctcttatgctgtatgtttccaagatgattcccgcatcagacaaaggtaggttctttgcctttggtcgtgtcttctctgggagggttgcaactggcatgaaggtgcgtatcatgggtcccaactatgtccctggccagaagaaggatctgtatgtgaagagtgtccagcgtactgtcatctggatgggaaagaaacaagagtctgttgaggatgttccctgtggtaacactgttgctatggttggtttggatcagttcatcaccaagaatgccaccctgactaatgagaaggagtcagatgcctgcccaatcagagcaatgaagttctcagtgtcccctgttgtgcgtgttgctgttcagtgcaaggttgcctctgatctgcccaagcttgttgagggtttgaagcgtctggcgaagtctgatcctatggtgctctgtactattgaggagtctggtgagcatatcattgctggtgctggagagcttcaccttgaaatttgcttgaaggatctgcaggaagatttatgggtggtgctgaaatcattgtttccccacctgttgtttctttccgtgagactgtccttgagaagtcgtgccgtactgttatgagcaagtccccgaacaagcacaaccgtctctacatggaagctcgccccttggaggagggattggctgaggccattgatgacggtcgtattggcccacgtgatgatcccaaggtgcgctccaagatcctgtctgaggagttcggctgggacaaggatcttgcaaagaagatttggtgttttggacctgagacaactggccccaacatggtggttgatatgtgtaagggagttcagtatctgaatgaaatcaaggattccgttgtggctggtttccagtgggcatcaaaggagggtgctctggctgaggagaacatgcgtggtatctgctttgaggtgtgcgatgttgttctccatgctgatgctattcacagaggtggtggccaggtcattcccacggccaggagggtcatctatgcttctcagctcacagcaaagcccaggcttcttgagcccgtctacctggtggagatccaggcccctgagaatgcccttggtggtatctatggtgttctgaaccagaagagaggacatgtgttcgaggagatgcagaggcctggtacccctctgtacaacatcaaggcttacctccctgtcatcgagtcctttgggttctcaagccagcttagggctgcgacatctggccaggccttcccccagtgtgtgttcgaccattgggacatgatgacctctgatcctcttgaagctggctcgcaggcttcaaccctggtgcaggatatccgcaagaggaagggtctcaaggagcagatgactcccctctccgatttcgaggacaagctctaaatttttggccgccgcatgtgttgtgccgttacccttacatgttctagttggtctactgctaagagaactgctttcgttgtcgtatttcatttcccttttgtcgaatgcatgtgtttcacatcaacaatcctatgttcgcgtgctactgagaaactatttttactctgtcgtgatgtaacggatgtggaacctggatcatctttttgctgtctaagttatagtgttcacattcttgttgcgtttctgttgagtggtatttattgtttcctttggcttgccgttgtaagtccgcttatttttgttccgttcttcctagtttgtagttgttacttggtagaacctattctgttgtgtgttcttctagtttgtacctggcacttggtactaccagttctgttgttctagtttgtaggtacttcatactatgacgtatctagtttgtaggtacttggtactatgacgtatcttgcctgttctagtttgtaggttactacgacgtatgttgccgtttgatcagctcttttgccttgttaactcctggtctctgtttgatccgaactgttgcatttgagtaattttcccccgattgctctgaagtctatcttcgtgttcaatctcttttcatttgctttaatttcaatgggtcatgatgtcatcgacttatttctaatgccggatggcatagagcagggtttaccaaattgtttgggttgggttatcgtcaccttccggtttaaccacgtgacggactttagttagagttaaactactttaaatttaactaagtttgttttttttatgaatatagttatactaaattagtttcattaaatcaataattgaatatatttttataataaatttgtgttgagttaaaaatattattattttttctacaaacttaggtaaatttaaagcattttgattttaaccaaagtcaaaacgtcttataacctgaaacggatggagcatcaagttaccatctagtgttacaaaacgttcaattcccttgtttaatccctaatatttgtgttattcagatctgcttattctgatcgcattccctgatcgcttgcatgatattgaactcaactcacagactccacgaccccaaaatctaataccgcatcatatagtaaggggaaagcaatagccctatttggaaaacttaactatataggaaacgctaacccatctgaaaaagccaagtactccctccattccaaattgatgtatatatagttttttttaattattcctaaatgatttacatatttgtgttcattcattaagtctattcgttatttgtgtattggagtaaatggacattaatgcatgcatcgatgcacacaagtatttataacccacatgcaatatcttgatttgctattaactaggaaatagtggggatggtgcatgtatcgagtttgttgctagtgtaaatatagtataagagagttattagcttttcttgattttggtgtacctatgaaatatgtagatcaatttggaatggagggagtatgtcatagtctttaagtgataaagattaactaatagtctctcttcttacatgtccttagtccacctaattatcattttaaattaattggttgggtcctatcttgatagaagcacaatcattttggagaaaaaaattttaaatttttaatgatagtagaaacacattctttttaggacggagcatataataattagttgaataaaaataaacacctgaagattgcattgaagcgccagcagcaacacaaaggagcatgtgcattccgactgatgttttacactaacacacagtgacacagccacacaggagtaacaaacaaccaaggcccattacaaaacattgggccgaatggactcaaccacgaattaatacacaccaagactgaccagctgattattacacgcgcagacaacacacacgaggttaattaacacgcgtacatgacgccacacgactcgccacaccgaagcgttcgtaatcctccggcgggcgcgctcgccgccgtcgccgatccgccggcgacggcgatcgacggcggcgtgtctcagtagtaatacgaggaggacgacgacccgccgagctggaagccgtcggcggcgacctcgtcggccgcgggcatcggcgagaacatcgggctgtgcacgtacccctcctcgaagtacaccgccgccgccgccgccgacgcgcccgcgtcgtcgtacccgccgaactccagctccgacgcgtcgcaccacgccgcgccgccgccgccgccgacgacgtcgaacacgccacccacattctgaccgccaccgccaccgtaagccatttcctgggcgtcgccgccgtgtgcgggctgagccggcgccggcagcgcggcggcggtctgggtgtcggcgccggcgccggcgccgtagtagtggcggtggaggtcgttggtggagaggtcgggggagaggtagggcgtgagggaggagcccgggggcaggtccgggtaggcgaagttggtgcgcgcggcggcgccgcggatggtgcgggcggcgcggtcgtaggcgacggcggcctcctccgccgtgtcgaacgtgcccagccagtgccgctccttggtcgccgggtccctgatctccgccgcgtaccggccccacggccgccgcctcacgccgaggtatctcgcctcgttccctcctccacccccctcctgctcccgctgctgctgctgctgctgctgccgcctcgtcttcttctccggcgccggcgccgacgaggagaagaagtagaaatccatactcttcgagagatcgaggagaagaagtagttgtggtcgttggcgatgaagctgctgctactgctgctgcatggggaggttgcatggaggagtatatataagggcgggaaagcttaaaagttagtggggaaatggattaaataagcgaggtggtactaatgggcgatcttaagcatgattagcagcaggagtaatggagggaaaatgtaattggtgccctttttaaaaaaattgattcgtttgtgggggcggcaaaagtggtcaaccaatgatttgctctggtggtgactgcatgatgcatatgcttgatgggatgattaacatgcatggccgacttagctagttagctctggatccatcatactaaccttattaatattaaatcgagtttacatatgggaattatgatagtgatatgctcaagtattaattaataaaatttcctctcatcatatgtctatatcgatatcttccatgatagatttgctgggagtattgcagactagtaccgaactaccgatgttcagagcaattgatcaagtgggagttgtgttaggcttgcaccgtccagagtcaggcagaagtacagtacttacttctaaattaaacaataagtgtattatgtatagcaaagatagatgggaatccttttaccatcatataatctggctggtattgcaatttatacaataagtactatgcataattaaaatgcttcattttgatgtgggaagatcatgtgctgatattcatttttgcccttctgttatttcaaatgcgcaaaatcccaaatcctgcaaaatgaatacaaaatacataaagtgctattgtccatttacttttacaaggggcgtgcatgatttgacttgacgggaggttatattgctggcagtaacaaaaaataagtgatatatagtagagaaaatgttttcaaagatgaattcaattgtgctgtttttcctgtttcaagatatacttactgttggactaattgttagtagagagctcgcaaagaatgaatcttggagtacatgggcggcctataaaatcaacacagagagtacccactaattaaggttcaaggttttctgtccaagatagagaatactaagcttattattcaaggaaaaaaaatgtaataccatcgtcctccagaaatagtctattacattcatgttatacctatctataggatctataaataattcgaaatgaagaagacaatgaaacatatatcaactggtcaaaataggaatcatttacacaacagaagtataaatgatgaacaataaactacaagattctgacttataatatgcaacttctgggacatattaattttcctatacgttggttgcgaaatgtgtacaacaagatccaaaccgaccaaactgtgattctgattattctaatgccaagttgcaaagattagtctccctgtcatgtgttctctcccactgatgtcttgatttcactgtccaagaccacaagtcaaggtcaaagtttgtagggggcaagaacggcatgaaaatatactggtcctaatgcaaactctaacttcacatgccgccttaatacctgaggtgattatcgttttcctgcctttgattgactagattagctagctacagaagatcgcggtgtgtgtagtgtggtctacctacacaatatttttctattcattcgatcatgctcaagggatcaagtgaagtaatcagtagataatataatgggatctaatataataatgatgcctagcactaactaaagctaactagctggatgctcagtaaatgaattggagccattggattgatctgtccctacaagcgacacaaagagattttataatgttctttattgatagtagaatttatctaaacattatattgtgggcagtctcggcggtagctttcttattggtctggtgatcggtccagtgttaggtttctgctttgactctgtgtaggggctattgatgcgtggtagtggttttttttttcattcctgaccactaactttcagggtactagctaatttgtaatgttttcgtactctatttaatgaaccatcattctatctggtgctgatcgttaaaaaatgaatttttctaaacattttatttttttctaatctaatatgtcatgtctatttataccagctaccatcttaactatataaggtattagtataattttttgtattagtagtagaaataataaatcaataatactgtcaatagagactacccttgatttgtagcgttccagtagtaaactactcctatattagttcaactgaaaggtgaagtccacagcagtatagcagtttgtcgccggtttggctgggatcatgaagggcgccattattatgttgcttcccaaattttgctgcgctatatatatagcttatgaaactctctagcgatcactagcaaagtagcacgaactattgatgcagtttcagcaaagagcaagatctgtgcgtgtcgtgggtcattatatattttttttcacgaacgcgcaaaaagattgcacgtcaatatattagaggaatagagtttttgttacacaccgcaattggccagaccggcctacgtcagggaagggaaaaaataaagttaaaaaacaaggaagagaaaaaagaaaaagaaaaactcgaatgctactccaaacaacgagaagggtcagagccacgctacactcccaacaagttcccaaaggaagcaacgctcactaacgaccacaatcggccctccgacaggatggactcttggaccactgagaccgaagagagcgcggagtcaatcaccctagagttacgttcctttcatagctgccacaagaccaggaggaccagggagtcgaaactggaacggaggtgatcaggtaaaccagcactggaagatggccaccaaccctagagccagctgccacggggggcgagagggcagtccagctaggaggcgacagcacccgtaaccagacctgacgagcgaagatgcaatcgaggaggatgtggttcgccgtctcgagctcttgagcgcaaaaggggcaggccaagtggctatcgatgccacgcttttggaggaatatatattcttattataaataaactatgatcaaattgtttattgtagtaaatcaaactaaaataaatgaaaattttgttgcaccagacacaattacatttatgtgtgatgatctaatttcttatttgtaacaatgtgttgatgg

SEQ ID NO: 17513 - DNA, 7570 bp, Oryza sativa
  unsure (1)..(7570): unsure at all n locations
ggcaacaacaatgaacaccttatccaacctagagtcgtgcaggtggaagagttgcaggtgccacatccctttccccgttatcaccggtcgcctgcgacactttagccatctaggccccttgatggcggtgctacttcttgatgaccacctacttctagcttttcacgacgatggatatgtaaataacaccgtgggactaatatttctgccgccgccaccccaactttagcatgcgcctgcagtaggcagcagccccaacggtggagtagctacccccggcatatggaagagagtccaactatgaacgtgccatagagccactgttgttgccgttgaggatttggacttcaacctgggcaatctgcgatgccagagcttgagggatcagagttcgcaccgattggcctctcgccgctggcggcgcttgtcatttcttctcgtctccgattgtgctctagtcacattgagagtggggagggtagccatggggggtgcaagtttgttcgtgggccggttttcattagcctagtccaagagcgagcatgttctccatcatgctcactcagctccgttcgatggcgaacgaatggagcagataggctgaatgtccctctaacgtagactgcagtacgttagatgatttagttctggaggaagtgggggcacatgtgtcagatcatctcccatgagcgcgtagtgccgtagcagtagcaaaggggttaggtaataaagagtattggaccatagatgctagcctgatgggcctcgggccaaaccaataggggctcattgctagttgggctagaccctgngccatggcctaggatagtaaaaacaaacaatagcttaatttccgtgttatttggtttgaatttatctcctaaacttcaagcataactcaaatttgagaacctgtttagcttgatggttattgttttatttacaaaatatttttatttgccaccaaattaggttttctttttagggggagggggagaggagtgacttaccgtgcatttaattttcttataacaaaaaactttttttttttaaaaaaaacaaacataacaaaaactttaggataccactgttcgagaccttcaagtgttgtgaaaaatcaaaagttaggttgggtttaaaatcaatatttttgaatagaagagcagaggtgtgcccctctcagcatgacaattcaaccaacaaaggacaaacaaaaatctgtaaacctcataaaagttaatatggaaagagcactgctacacgtactctaacacatactatttgcagtcaaatttgttttttctgttaaatttgaacttgcattttttttggggaaaagaagatatattatttagattttttttagataatggattttcattaatccggcctctatatccacgaaggatatacacagccaaatattacttagaattagcttcctctcttacaatatgtgatacggaaggacaaccatcctctagccaaaaattagactcctcctcacatctagctctgtttgctaaaatatatgtgttgagtacatttatcagtactctatttgctacacgtactcacaattttgactacgggggatttttgaataacaatctccctatttctagacataagagcattgatctccctgattatataggccagggtagacaaatccttctctgcatattgcagcatgcgtaccgcttccaagcagtctgattccaccacgatcggttttagagtccattgaatcgccaaagcaattccttccttgtatgctagaagctccatttcccgtgcatcagagcaccttccaaaaaatctgcaggaagaaaagatgacagttcccctctcatctctcaagatcgtgccagtgcctccattctcataattcggatcaaaagagccatctacattaagcttcatccatccaggctgtggtttcctccatttctgaatccaagcctgctgagcacaagcctttttaactgacggccccgggagatagctaaccacatgtttcccttttgccaaattagccattgggtgttgtcggatttctaatagtgaaaagatatagtgatctcttgaaacctcctagatgcctcagttggtggagctggtttcccatgaaggatctcatttcagcagtaccagttctccacaagaccattaagaacatggcatgttcttcttccgggcgtagctctagttgataaaaaaatcttggatgaggctgaacgcctaacaacacaccactctgacaaactcccggtactctacatagcttcccacaaagctttggcaagaggacaccgacacagcgcatgaaagacatcctctgtttccatcccacatacagtatatggatctgaacttgcatatttgtatagtgacatattatatgttgatctatcatatcaaattttcttaacgacatgtaaaaacgagaagttgtctcctcaaaaggtaaataaacttccgcacaatattgcacagcaactagcaagacaatgtacaacaagtcctaatagcaaagcacggctaaagaacatagtaatctagttctagccacaagatgtatgcatagggatttgtattttctttttcaaaaatacaaattggacaggataaagaagaagaaaaaaagtccacacctgcacccttagcgagaagcacgcattacacacgccgaagaatcaaacacgaaaggtataacctacaaatggattatgccattgtggtttagggattcatgaccaaagttaattagctccatgctagctaggtggccacccagccatgtggactacggaataaaatgatcggtgttgtcaaactccggtctccttgatagctaacatgttcatcttgtagcagggagcctacatgattagcagtacgaaggctctagtgctagctctagcatatctacagcttctcacctggttttcagatctgctactccacaatccatatgccgttttagtctacaagaaatttacaccgcaaatcgtcataacctatgagaaacctatgagaagatgttcataggactttgcttttcagaaaacagtacaaacatggaaagaataattaggtataaatacgagtacatatgtcaaatctatgatttgaatactggtggacagattaaaaaaaatatgaccagctgtgcagttagtaatttcataagaaatttgctataacggttttcttcatgatcttaaatgtgtaagaaattgggacttttacgcacaaatcaacctgctgcagcatcgaagttgagcacatacgtgttatctatttttcagtgacttaggctaaaacttccacgtgtccattttggagatttatgtgggcttcaccggaatactagtcaaaactggactataagtgattagatgcatgggctgaaaaatctgataaagttgctgggctacggcgtaggcaactaagctgcgtgaccaaaaactgccatgggcccatggaaaatgttgaaatccaattggcaaccttaaccctgttggtttaggtaataagtccacttggactcccttaactagtggcaaaatctgattcgtatagttgaactgtataataccaggtatctaacccctcaactattaaaatcggtacaatttaactctctaggcggttttgttgatgtggcatctaccggatccattgttttgcttattaggggaataagcgaaatgacatatttccaaacgaaaaataatttgtgaataaaacttttacatacgtgttcttagcgatctaaaagcaaagactgaaaaataaacttcgatgaaaaaaccccaaaatcaactccaaatttaaggttgaaaattcaaattttagttgataagtataagcataagtgaaaagatgaggccctatgtagcagtgttaacctggtctttgtcccacaaatatatatatgtatatatatatatgggacctatttgttattcaccaaaaaatagaatgagcccacatgtcatcctccctttctctccctcctctctctctctctctccccctttctctttctctcccctttctcttcgcctttagccatctatggggtcgggggtctggagtggcgatggcaggagggagggtgggcaggcggcttggcctgcagaagcgtcgccgcctcctcctccgccttcattgccagcaccacccctaatccgctgagagctagcttattatcgtccgcctcgctatccaaggctgtcgcgtggggaggggggaggtagcaccgccgagcttgtgggcgtgctggcgcagggcagagagatggggaggaaggacaaagaggataacatgtgagccccacatgacaggggtcctatattttttttatgacaaataagtcccacttatatgtttttagttcttataccacataagtgccacgccaataccacatgggcaaagatcaagtcaacaccgtcgtgtgccacgtcaacaaaaacatccttcaaaaccgttgaggaagtcaaattgtaccggttttaataggtggggtcgagatatccagtattacggtttaagagtacgaatcaaattcggctactagttaagggagtcacagtggacttattccttggtttagacctggaagtacagtagtacacgtggttgagtataaagtaatggcccagcccacaaaattttgttagaaaacaatatatactgactcgatcatcgatcacgttgcctttttcttctaactcttatttccagccattccttttttactctgtcgatgtaatactctcttcatttcatattataaaacactatttttttaatcaaccttctttaaattttaccaaatatataaaaaagcaaacatgtacaacaccaaattaataatgtttattttgtattaaaaatattgctatggtttttttaaaaacttggtaaaccttaaagaagtttgactcataaaaggttaaaatgtaaaacggagggagtagtaactttgaataagtattttgtttggcaagtatttaagaattgcaaggtcacatgtttgatttaaccaattcagacactacagatgcagattaagagcaacagagttggaaaaatctcatgacaggacttgaagataaatatgttcgcccagtaattcttgtagtgtacaaatttttacccttttaggttgactatttaattacatcaccccctttttttaagcagaattaacatttgatgaacttttgttaggaaaacattttgtggcctgagggaaacatcaggcattcagttggtattttttttctacaggtatttagggatttgtcccaacacatatggcaaaggccagggatataaatcatctccattatatataaaatttgttattgttcagaacatttcatctatacagaaagtccatctaaggatattgaaggcatatacaacacatgaacacatgcaaacatgttatataccttactaatttttgaatattacacagaagaattacacaggagaccccagtcatcagcagacattggattgatcatgcaaatggacactgcaatatgcatccacagaggttaaagtttcagtcacctatgaaacagttttttgccttaacctccgaagccaaccaataccaaagttgtggatggaagtgcctggagctgaggggttcaggtcatagaatctttcttagacaatgtgcagttgttcaagcagggcaacaactgcaggtattacagactcatcactagctgctcaagaaaaaaaaaagaaagattctaaagaagtgattagagattctgaattttctggtagccatgtttgcggttgaaggggattgacagctatactagttgcacgcctctgcgttcatcagttttatccacagcatcagcatcatcatcatcatcaatcagcacagcgcgaccgcgctatcagatgatgcctgcagcatcatgtacatgctagtttgatcagacagttcctgcgcagacggcaccggctcgatcatcgacaaccgctccagcagagcggtgagcgcctcgcgcatccattcgtaccggcagagctggtaggcttcaccgggggagacctgttcattgatcatcaatagtgagtgacagtagcaggtaagtctctgaattctgagattcagagcttccattgacacttgaaaatggtgaaaacttgcaattcattgtgtggtgggacaatggctcacccatcgacggccatgggtcgcctgctccggccacgactcgagctcctcagtgacctccatggcgaagatgtagcccttgcaagctccccttgggctgctgctgttctggctgctcttgctcttgaacacccagtgtcccaaggtagtcctctggtacatgcacacaagaaatggcaaagcagcaccaaatgtcaatgaaccgaaaaatttcgcatatctgccggattcaaaggagacactgaattgttctaacttctgtcacaatttcgcagttgcatgttgcatttgcatttccactgcaatttcagcaactgttcctatcagcattgcaagttgccttagaattgaatggtttgaaatgatgaaccaagcgaacaagagtcttgtcctatacatggtactaacagcaacatgctgacatgaatgcatcacctacgtaggagtactactaatcaggctggtgatggcagtgtgggggagcaagtaggaaacacaccacatgcatagttgttggggacatggttgcaattcacactagataaaaataaaatatcagcctattgactccgatctgaaggagaaaaactagttttctgatgtcgaacaggccggtcgacgaagtatggaagaaataggggggaaacaataattcatctggcttaattataccgagatcttctcccccaactagaaaatcacaatgatttcagagtatcaccttataaaatggtgggtaatgatatgtttatccccaacccaattgtgctctgcagtactgattaggttggttagtcaaaaaccatttcgttgctgcttttttttttctatcttgtgtgagtctcaaaccaccaactgattgctagtacagtgctagagtgcagttctagccaatgccaatgcctatagagaaacttccatgtcgctttcaccattgaggccttcctctacattcctacatgtttacttagagccatctgaccatagttgcaaacccatcagcctagtttaaccattgctgagctttcagtgacagggcaactggacaaatggctccaaatatcggctgctaaattactcccactatcaagatttgcgccgcaacacgacaccgaaaaaggcgtcgcgccgtgatcccgaacagcagacttttcaggacgcaggcagcattttctctggacgctaatcagcattcaccaccaacagtccaacaccagtgatccacacgtcatcatcgtttgttgttgttaagcatgcgggggaatcaatatagtatgaaatctactggcaaagcaaagaacagtgaagtgttaagcgagagaggaaatggtgaagctgctgggc

SEQ ID NO: 17514 - DNA, 2645 bp, Oryza sativa
atcgatcaatcatttcgcttcaagaaactctgaaccattctggtttcaggaaatcaactctgaaccatttcgtttcaagaaactctgaaccatttggtctcaagaaagtctgaaccatttcggtttcaggaaaattaactctgaacaatttggtttcaggaaattgggtcggaaccattccgattgaagaaatcagcaccgagcaaatttcatttcgaagagagatggtggtgcagttggtaccttggggaagaccatgtcggcgcggttgggggtggagaccatgagcacctccacctggcccggaacgtcgccgaggatgcgagggttggcctcgtctttcttcacccggtacggcacgcagctgcaatacgaacggaacaaaagatcgcaaggaaagaattgatcagcaaaaagattagcaagaaatcgatcaagaacgcagcggggggatggatcgatggatatgcagcaagacgacccaccctgcgacgaggcggtactcgttgtcgtagcgctgcctgaggcggcccgtcctggccaccaccttgtccggcgacgacattgcaatctgccgatcctaacgcacgtgagcagatcaccaacatatacaagaagaagcaaacagaaagtaggggaaatcttggtcaccttataaaggaagcagaagaagggtcaagaagacgaacagaaaatgcctcctctgcctctggatgaggagaggtgatgatgggattggtgatggcggcaatgatgccacggccttatctctccaagggggggaagaaaattgaagacgataaaatagcaacggaagcggaggcaatctctcacaattcacagaaccgagagacgcgcacgcgcctataatggcgcgaggcctcttggttcccgccagatttatgggcgacgacgcgcgagtaggagagagaaagagagagagagagagagagaagaggggtcaaccaacgtgacccgcctggcagtctgccattgctgccactgccaccaccgacccgcccaaagaaagctacggcagacagatttcgcgccatttctatttatgttcctcgatggctaaaatacgctaatttaagctgtcagggaagcaacgagggaaaaatgcagagattgcagcaggggtgatcacgttctcgtgtgttagcgagacaatgtggtgtcaactgttaaaattataataccttcgtctcaaaataaactaagttagctaacgatgtgataaaatccagtacaacgaatttagacaaatgtttatctagatttattatattaggttgtgtcatatcctaatttattttaggattaagggagtgtactttcaggacaagctgaaaaatatattcccttcgtttgatttattttaggataaaggaaatatacttgtagaagaagctgaaaattatattttgttcattcggagatagatgtgggtaagaaattggctaatggcccgtggcatccctacttctaaagatttagccatatctatttaggtttattatttaggtttatgatttggtcaaatttttaaaatttgactttgattttatcttaaatagatatatatttttctaaaaaaatgatatttgttagttagtgtacacggtatgtccatgcaaaaatataactatatatgtatatatgattccacgagagtttaacttagtgctatgattaaatcaatgtgtacgctaaattttattgtgccatatagtattatatctgttgacttctaaaatgccatattgttatacggagtatactctatgcggtttcataattttttatattatgaatgatgttgcggtcttcaaaatatatcttcgactatatttttcattacatattgaaaaaagtaagtaaacatttaattatgttcaattagttttaagaagatatatctatcgttttctagtgtttttaaactaaatattaacttgttgatagtctaggttttaattgttttatcttaacctatctgaaacgtcaagagctatggaatgcatcatcaaagatgtgtcaccatcaccgaacaacaagtactatcatttccccgaaaaaaaaaacaagtgctatcattcaggggttgctatgcaaatcaaacctacatattattgtaaactctttatgaataacattgagaagcttcgtgagatcacgaacatgcatgctagtaccacaattgtcaagttaaaaatagtgatcatgtacttggattcttaggttgctactcaatacaattaatcaattatcaagaatctcatctgctactcagtagagggaatcttttcatgattaaaaggcggtgatatatggagtaattaactaggttcctagttgaaagtacgtatattcttttaaaagtttgagcaatccctattggttttaggatgatctaaacttttgagaaattcaataacacaacaaatataaggactatacagataaactatgccaagtcataaaagtttctcagtctgcctacttctgtgcatccatctattgccgtatatgatcttacagcccatataatttatacgtaaatagtggaaacaaggaataaataattatattgtagtcagcattgtaatgccctggctagttaattagcagggcgcaggaat

SEQ ID NO: 17515 - DNA, 17399 bp, Oryza sativa
tatgggttgcagggttggttatgtgtccatttgtttgagttaaccaatttttttatgtgtgtaaacaacatctagcactagataattcgctagctaggtattatttgctttattttattttgataacacaagcatgttaatatatgttagtaccaaatatatgaacgtatcatagatcgtgggttggtagtacactaataagtaataacttcataattttgttcaaatgttagttagaatgagatctcaagccttgcattgagtcaaaccattttgtaacatagtacccacatctaaataactaaatgtatcattgatactccctcgtcccattttaaatgcagccatgagtttccgtgttcaactttaatcttttttcttatttaatttttttttaaaaaattaaaaacataagtcctgcataaagtactttatcatctaataacaataaaaaataggacgaagggaaacttatggttgtgcttaaaataggacgaagggagtgccaatgttccatatatagctgcagagagcagaaatttattctctgacaaacttcccattttcacatggctataaatgcattttaatcagctcgtcacatgcatgcccattgaatctccatcttgatcctgaccatatatactagtgtaattaaattattctcaacatgttaattaactgtttctttctagtactgttgaattgatgtttcccatttgatttatctattgtactaattaattaatgttcaaattgaggatgatgcattctgtttggagctctacaattcctggggtattctcattgaccagggatgatgagatctactctgctgaatcaataaccctgttccatttttctttgccaaaagaaagttgaacataggtggttttacaaaacatggcgatgataaacgaagactacatctataaccatgaagaagattaacgcaaaaaaggaggcacacattttatggtgtcggtcatgaatatcaaattactccctatttatccttgaaagcttactaaatccctctcgtatccctgaaatttacccaatctcttctttaccctctcatgcccctgaaatttaagaaattaaattaatcttcctatatgatctaatttaatttcagaactttttcgaaagagcagccacatgtatgcgtattacaagcatactgacatgctttcatatttcagttatatgtgttggtgtatatgagcacgatatctctaggtttggtagtttagcttttgtatcaggctctgccttatttgttatatggtctattacctctaaatataataaattaagctcttatcctccaagccatgtacaaatttaatcggtctctccatatatatgaaatcaataaatttgtacaccaaatatctccaaaatagatcatcactcaaagaactgttcccttgtcccaattgcatcatccttgtgctctaaccttttttatatttggcctttcaactgtactgaattttacaatagatttgaaagcgatgttggggccttaggggagaaacaatattcaatatggtgttaatattgttatggcctttgatatatatagcgacatgcttatgccatatgggctgcggtactgtgtttttattgaaacttttctttcctaaacacgtggagctatgctcagcagttgcgtcagtgcttctcttaatttatcgatgaaagtatagtcatatatagtgagtaggttatgatttttctctattagaaaattgtttcagagatttaccctcttactcttgtctttgtctatcccaccaaaccctactaccagataaaagggaccttcaactcttcaaacaaagaaattaacttaattatccctataaggctataattaacccaatcaatagtggtactagttcctcgtaatatgttgtagagtttgtactcccaccatgtaaaagtctctactgttataaaaattatatatatttttgccggtattttggtaagtcatcgtgtttgagttggtttttaagtcatttttgaaaatataaatccgtatttgagtcagtttttaagttcgttcacttttaaaaaatacagaatgagttgtataagaaatctctttaaacaaactcacaggctaacttaagacaatcgaactcctaattacaacttatgattttgtaagaaaaatatctaagcgaatttccatagggaatttgaccttagctaaacagtacaacaataataagattaaaatagccttcacctgttgcaatgcacgggcattgtgtgtgtgtgtatatatatatatatttgatatttaaattttataaaaatcataacttttaagtactaatttttcctccaaaaacctctcattcaaatttcttttcatcttacccctaatcacgttattcaataaggtactctatatgtttcagtttattaaagttctagcaaattttacactaaactaaggggtgtggcaaattgctaccctcattattaattgtatcctaatctccttcggtttcagtttatttaaagttctagcaaattttacactaaattaagaggtgtattaataaattgctacgaccctcattaattgtattataatcattttttttctaagcaagcatcaaaattccttgtaaggagtataggaagaaaaaagacatctctaaaaatattttggaatatgaagacgacaagtattttggcaaaattttgacttctagaacaacatgtaaactgaaactgagggaatagctcatttctcttccatactagtttattgaatgccataattttttttttggactgagggaccagtggtttggtcatacggggttcaatcgatattggataaaaactaagcgtatatgagagggttaaaccggaaaataatccgactacgagacatgacatatgcatgtttacatacgcaattcaatttttatagctaagatgtattttgagatgggtctacttacgcaattcaaaggctggatctcagagattagtttttaggttaaattcaccggtagaaaaaccatctttgctcggtcgtccaaaatccacaatagtcccggttcgaataggaaccgggactaaagattatttttagtcccggttaaaaaatttttgatcaccaaccggggctaacgatcatttttagtcccggttcaaaaagttatcggaccgagttagaccccaattcttttttagtcccggttggtataaacaaccgggacggacaaaaaaaaaatcaaccgagctggcgccactgccacgcccggccacctcggtctctccccctttttttccctctcctcacattaatcccttctccatccttatccatccctcctccatccttatccatccctcctccatcccttctcctctcccattcctctcccttctcttctcttcctcctcctcctcctaccacgtgaggccgggcggcgcgcggcggtagggagggcgtggagcggcgggcggccgagcaggcggccagcgaggcggcggtgctccccgggcgggcggtggagcccgaggcggcggcgctccccgggcgggcggcggagcccgaggcggcagcgggcgggcaccggccgccgaggcggcgggcggcgacgctccccaggcggcgacggagcccgaggcggccgagctggaggccggcgaggcggcggatggccggcacccgatctctgcgatgtggttttttcctgatctgtgcgatgtgtgcggccgatctgtgcgatgtggatttctttttctgatctgtgcagccaatctgtgtgatgtgatttctttttctgatctgtgtgatgtgtgatgtgtgaatgaatttgtggggatgattttgtaattttgtgaatgatttgtgatgtaggctatgtttagttcagcgtaaagtttggattttggttgaagttggagatgatgtgactaaaaatttgtgtgtgtatgacaggttgatgtgatggaaaaggactgaagtttggatccaaactttggatctaaacacaaccgtatttggagatagaaaatgcagcttgatgtatttggggattttgtgaatgatatgtggtgttagaatgatttgtggataatatgaatgatttgtagggctcgaaatcatgcaagcagcagtaaaagaaaaagaaaaaaaagaacattagtcccggttggtaactctaaccgggattagatctttagtcccggttagtaactccaaccgggactaaagatccttttttagtcccggttatttcaaccgggctaaaaatgagtatttttagtcccggattcgttagtcccggttacataaccgggactatagggggttgtgaaccgggactaaaaagggtttgttcaccagtaattggatcaacacacaagagttaatcgggtaactatatcgtattatcttgggcataacttgataccatcttttttgtggataccagataccagtgtcgtgatcgagccagcttggctcattttgaaaggactcacctttaatctttctataccttctatcatcgttcgctagcaataattatatatcaaaatttatacaaccatgcaatatcatttacaatatatttaattctacaaattaacacaaattaacatgaaagcatttccaatcatgatccctcacattatttttataatatttaaacatatatattcatcatgcattgaagtgcgggatactagtatcatttactctctccatcccaaaatataaaggatttgagagagtccaaattcgtagtgctagaatattcacattccttcaaatcgatgaagagagtagtttgtttcatgattagtaatttagtattacataacttgattaatatttcatttacaatctcccacagagtctactaaatctatttctttctaaacattgtttggaaaaaccaattttagttgtcactaataacgaatatcctttttacgtactcctagtatgattgttgaaaaaaaaccatatcaaagattacttaacaattctcctagcaaagcatgaagaatcaactactattcttcccgtctctaaatatttaaccccattgacttttttaaacatgtttgactattcgtcttattaaaaaaatttaagtaattattaattttttcctatcatttgattcattgttaaatatacttatatatatatatagttttatatatttcacaaaagtttttaaataagacgaacggtcaaacatgtttaaaaaaatcaacggcaccaaatattaaaggacggagggagtagttctgatctgatcaattgagtactcaattgtgatcttatgtacgcatgacaatttttcgctaaatttcagtcacacttattatatttcaaatttcgaaattttacttggaatatgcataaattacgtcccgcatcaaaacctcaaaattaatttcgtgacatttcaatcggttttcgagctatatatgtagaaatatttggagttaatatgcctccgatccggccggccggccggccatctgcacgtagaacgcacgcacgcgtgccgacatgccgcaaatcggccgcgtcagctacgttactccctagctagctagccgtcaaaaaatggaaacaatccgtgcttgcccaacgatacatcatatggtccatccggccgaaccgacgaccacgacgaggtcagtttcgacctgctgcatgccaaagtcgatcgtctacaaatcaaatgtaatggcaattaataggagtagtaattaagctatatatagcttacattgtgtaattagctgctaggaattaatcgcataccggtggcttacaggctggctggctcaaagctatgcatacaatatttatgtactcccttcgtaaaaaaaataccaatcctaactttaaatatgaatatacactatatccaaatttaaatttaaaattagatttagcattaggcttttcttaatagcagagtgagtagtcgtaaaagaaattgttttggacagtgacagtctaaaaaaacacaactttgacttcttatttctaataaaatattattgaaaagtgatatatgtatatttttatgaaagtatttttgaagacaaatctatttatataatttttatatttttaaactcaacaacttgagagttattcataatttaaattctcaagatttgacttaaatattgttctcaacgattttctttatgagtacggaggaattaagtaggaagtcggttgcgagatggaagcgtcgtcgtggcggctgactgggtcaggtctctagtctgcaggcaaggtcaggtgcttttgcttgtcggcaactcggcatcgatcgttactttcttgtctactcctactcattattattaattaatgggggtagtaggtcaatttaagtaggcacacgcacgcgtccaaactcgacccccaagctgcatctgcatgccgaccgcgaggagttgttataagccatacacggagtatgtaattaacccctcggacacgcccccgcgttccacagcgatcgccgacgtcgatcgagatcatgggcgcgttgctatatcatgttcgatggaaaaaaaaacagaaacaaaacctcgcaaatttcaaaccttaatttatatccacttaacgattcgtgcttaatttaggatgtcttcggaacctgttcccaacactaggtgcctgcacggaaaatggaggagcgattagcgggtaattaattaagtatttgctatttattttaaaaaatggattcatttaattttttatgcaactttcttatagaaactttttgcaaaaaaatgcaccgcttagcagtttgaaaagcgtgcgcgtaaaaaacgagagtgatgggtagggaagaggggctgccgaacacagtctttgcaactgcgtgcaagcccctgtgacctccatcgccatggcgccgcgcagattcatgttcctccatcgattcgaatacctcattcacttcaacaaccaaacacagtctgaccggttgatgttctcctggatcgatcatcagtcaatccacaccgttgatctcattcacttcatccgctatgcctaccaagggcatttatatttgcacatcatcttattgaagctagcaagcctgcaaccaattcctgctcagtactatcgatcctccatccctatctccctgcagtcgtaccgctagcggcgccgccgccgaccaacaaggcaaaggacgacggagcctcgatctccacgtctatatgtttatgattcgtaagtctgcgatgcgcctgctcaatctgtttggtagtattttctcgtgttgtgtctttggttcatgtttgcccagcaaattcctgattaatatgtatgcttgtgtcctgtacgctttcactcgcactgcagactaacgaatattggctatagccgactgggggtgcctgacgagatatggccgttgcactgccatcacacattcacaccagcttcgacatgaacaaagctgcagagtattgaaagctgattctgtgattcgtttaatttgtactactaatttattatatgagctaggcaaaatcacatagcatttacatacatggttttttttattcgtttacgtgctatttgccattttgtaattaaatctgttaagcgaagaaccacttacatggacaacactcaatctcacatgttttagcactaattataaattattcgtacataattttaccacatatacatggtttaattagtacataatataaggttttttgcttgcctgctttgaaattgttatccaaacgagcaagtagtttccatcttgcaagatatcagaattatattggcaatttaacgtacaaatgtctcggctagattgcatatatgaactcatctattgagcaatagtttttatttagtcaagaaagcttatttttcttacaaagtcttgccgcaacgcgtggggtatccactagttatataatgtttctaatcccatgaaaactttagaatccctgaacaaagttggttatttgttgttagagtctactggcttacgtctctttgacaacatatatattagagggtccactcgaggatatatgtacatgcgctttttgtgtaatcacaaaaatgaaaagaacattattatggctcgaatgtcattagatggtcaaatgtttcattggatgctcgcatacaacatttacaaaatagaggtggatcattactttaaaaaacagtaagataccgacatatatacatgtttaattagatgtttgatacaacaatataatctacatgtataaggtgtgaaacatcacttaaaataattattacaatatttcataaagattgtgccatgtccaaaaatcagtgcaacatttctagaaacaactggtataccattcgaatgaaaagagtgaaacacttgaatgcaaaattacaacaaataaaagaaagaccacaacaagttgtaaagagtatgcagaaggagcctatcagtctaaatgtacatatatacttgctcccttttatcggtcggatctagtctctatcaatgttaccaaagtggaccaatgttgagctttgttaggatccaacaagtggtacctctaggtaatagtaccactaggtaccaaataaaatccagccgttgaattagcagggtacgattggaaacgaaccgaagcggggcggagagaagacccgcgacgcgagcagttgcgtatagatgccataatctcctcgtcgtcctcaagcgcccgcgccgacaccatgatctccaagtcctcatccgccgcagtctctgccatcgctggaccgccgcaaaaatctcgatacgatgccggcggcttgcctgctcctgctgggctgcatgcaggctgctcccatccgcgatatcccaaacaaaatgttatgcaagggctcctaagctcctctagaaaaatgttttatccgttgatattagcatttggcttatggagagataatcggcagttaacatcgcataatctcgtacagaggaatcaaattagtgccggggaggagagaggatgctggaaagtagtcgagcagtcgtcccaacatatcagcccacgtcctccgatgtcgccgccgcgtcaccgtggccgcctcttcgtcatcgtgctcgtagccagcctgcccacgagctcaaggagatcttcccgttcccgtcgccgccctgagctatatctggcgccccgaagtcggcggcgaccggatctggcccggaagccggaaggggggagttgagttgggatggggtagggtggtgacggcaggttgcggcgagggaggcggaggtgtccaccgatctggccggcgagattggtcgcgccgccgccatggaggacgtgctggagggggatcgggaggagcggcgttgggaaggagcctgcggtacaggagtcagggaatacggaccatgcgaaatcctaattttgcccttccgcttcttcaatgcatgcggatgggatttctgtacctggcggtaccgaggatcgatagccgttggatttacctatatggatggttcagattacaggtaccgggaggtaccaaaagtttggatggacggtaaaaaaactctagaaggagaaaaggaaaaaaaatagagaagctttgaagggctcggtagtctaatgtacacatgcacttcctatatagtgtgtaattgatttggattttaaatcagaatgaaagaggaaaaatgcaagtaaaaaagaactgttggatatcttagatgaccgattggatccaaatgccaaatgccatagagagacagaaaacaaaacatggacaccacatacgtgaaaaccacaaacaagcataagggtaaattcgacaaacttgcttcaagagttgagaagcaagttttatacgtccggttttgaattttggagaccaaagttaaaacatttgaaatgttgaaggaaaataaatacttcttttagcacaaaaatgattagctatatcacacctatatcttatataccacattcaaggtaaaaaatcaagcatatgattgggccacgtggctccctaagattttagggtttgctcctttgaaaatcagccacatgtcccgtgagattcagctagagcgtcgatcgtgcaatgtctcatctcttctattaatctaaagctaacggctagccattcttctagcgtttcattggtccacatggcatgtttcattcgtccagccctctcgattagtccagacactggaccgtgaaaaagaaaaagaaaaataaaagaaaagccattgattcattcactgtctgtcatgggctgtacagcccagtcacgcactcatgcatgactgcactaggcctggtcatctagcgttgttgctacagtatttgcatgttgcactttaccttctcgggctaattaattagtaataacacaaacaggaccaaacagaaataggaaaaaggaaggtagaaaaaagtataaataattttgtaaaaaaaatcttcaaaacataaaatattgatatcatgtatttatataaaataaataataatcgggaaaaactaaatatcaaatataaagtgaaagagattggatgagaatttgtaatactaagaaccgttttttcaaatatgcactttatcattgatactatatgtacgattttttggttaatgaaatcacaacaattttgaggaaacataactttaaattttctaatagagtctctagctatttgccaaattattgatcatcattaattacaatcttactttggtttttctcataattctaagacaaacataaaattaaattccattaatatgtccatttgaaagaattttttcagagttaaacttactcatgaaacaatatattactctgcatgtttaatattacttgtcattctcacatttcaaattattatttttacatcgtggtcttctatcttcaccttttaaatgccatgtataactattaatcagttaatattgcttttgaaaacgattataatgtagttaataagcatatagcagtgtaatttgccacatctccttgtttgatgtgaaattttgctagagttacaaataatataaaatgagaggtagtcaaatatattacagatgagccatattacaggctaaattaggtggcacgccaacaggcgtgcagatcttctagtataattctattctacgattcacgaaagacaatcttataataactttccctgattaacatgcaagcaacttcaattttgttgttcgtacgattcaactagggatgtcattctctattttttttataggaataagttcactttaggttccttaatttatcgttcagtctgattttcatcattcaacaaaaataccaaatacaatctgtgtcccaacttacaaaaccaatgcaaacgaggtccctcgatagtattgtcctcggttttaactgacgtgacgtccatgtgactcctttgactaaggtcttcatctcacgtagcattgacgtggtacttatgtgacagtttgatccaaaataaatagaaggagcaaaattaaaaactaaaaaaattaaaacaaatatgtggggccccatgttagccaaacaagaagataaaaaatagcgggaccaacatatcatggctcccactttctccacctcacccctttacccctttatctctgtcacctctctccaccggtgagcgcgcatagaaagagacgaggctaggagggagggggtaggaatggaggagatgaggaggacgagagggactgagaggccggcgagtctcctctctctccaccacccttgccgcttggtgcaacagtagccgagggggcgaagatctaggagggaaaggagagcgaccgctactctcccccatccgccacgtgcccatcacctatcttgccgcgtgctgacttggaaagatggggaagatagagctgaaataggttgggaggagaaggaaaaagtacatcgaaggtccctcaacttgtcatcaaattacaaaatcgtccttaaaccacaaaaccggatacaacgtgtcccccaacttacaaaaccagggtagaataggtccctcggcagttttgactccagttttatccgacgtggcagctgactcagcgtgggacccatgtgggtcccacgtgtcagccccttcttcccctcccctctcttcctctctcctcttcttttctctctccctttgctccagttcggcaggcgggagtccgacggccggcgacgggcgatgaggcggcggcggcggctgcgacgagcgacgaggccgcccgctccgcctccacatcgcctccgcctactcggagcgggaggcggccgcggccgacgacgacctcgccgtgggacgcgctcatcgcctacgcccgcgccctctccctcatcgagcccccagatccgacgacgacgacaaccgccgcgttcaactcctcgcccccccacccccgccgccgcccagctcctccccggcggctgccggccgcgcccatctccggttcgattgatcgaccatgcctcccctcgtggcgccggtggagcacaaggacgggccctgcaggcagcggcacgcggcggtggcggcgatgacagcggcaacggtggctaagccgcagcagtggtcggcgtcgttccacggcgcggcgcggcggagcagcggtcgctgacgcagcctgacttgctcgccgagcatgtggccgctgcacgtgatggcgcgcttcgagtgtcgcgtggctgacctggtcgccgccgccgtggagctctacctccgggaggggcgccggctgctgctgctgtccgccgaccccgccgccttcggactctgcttcttcctctccccaaaggccgcaacgattgccgcaatcaccgccgccgccgctcctcccccaccagtttagggatgagagaggaagagaggaagagagaggaggagaagaaggggctgacatgtgggacccacgtgggtcccacgctgagtcagctgccacgttggacaaaaccggagtcaaaaccgccgagggacctagtctacattggttttgtaagttgggggacgcgttgtatccggttttgtgttttaaggatgattttgtaattcgatgacaagttgagggaccttcggtgtactttttccgaaggagaatgttccgccccattataagcccactgttgaatgtagtctatacatgtacaaattgtgagctaggatgacgttttactttttcctgggagcaaaaaggagggggaaatcataagaactaagaagcactaggtgaaaccccgcgcattactgcgggaatttagtatgataacaataaaaaaataacgtttaagatagctagataacatcagattaagtaaattaatgtggtttatgataatttaaatttaaatagtatgtagaatggtgattcaaacgtaaaaagtaaggtggtatgactttatggaagaagaaaagtaggaagatagtttggaccgtagattaatcatctaaaggctaaatacaattgatgtgatatgacttaattagaggaaaaaatgataatttggaccatagattaatcatttaagcactaattgaggatgaactatatataagtatataggatatcataaaacataaaacataataaagatatacattgaaacattatgtgaattatgttggatgataatttaacatgtttgtatttcaaaagctcttaaattataaaaactataaagatataacatgtttgcatgatgtttaaatgtgatgattgttagtggatgatgatgtgtcatcttgttaattagtggataatgatgtgtcatcttgttagtggatgatgatatgtcatctttgcatgttaagcttaaggagttaattagaggaaaaaaagagaaagataatttggaccatagattaatcatttaagcactaattaagtgaggatgaactatttaagtatgtatgatattataaaacatagtaaagatatacattgaaatattatgtgaattatgtgggatgataatttaacatacttgtattttaaaaactcttaaattataaaaactataaaatcatagataatataacatgtttacatgatgtttaaatgtgatgattattagtggatgatgatgtggcatcttgttagtggatgatgatgtggcatctttgcatgttaagcttaaggagttagtggggataactgtaaggattagttaatcagtattcatcagtaaccactatacatttttctttactaattactcctttaaataaaattttaaaaattaaataaaattctgtaaatacaaaacatattgttttaaataaaattttaaaaataaaaaaaattatttaaatacaaaacatattgttaattactcctttaaataaaattttaaaaataaaataatgttctttaaatacaaaaacatattgttgagagtgggatttgaacccacgccctttcggaccagaaccttaatctggcgccttagaccaactcggccatctcaacttcttggtcaaccagttattatattctaattgaaacagtttgtattacagatcacacatcttccgtgtaccaaattcgctaatcacccggatcgcgtgtgcccgtgcgcggaaaagcaacaccagcatgcacacacacacaccaaaaacgcaaatccaagcatcgcacgctacatcagcaacaacggcactatataaacccatcttaacgacacctgattagcagctccagtacactaattaacccaaactccctccacacacattaaccactgcacaaacgcagccagcgacagcgaggatggccggccgagccagctgcgtactcatcctcctcctcgccattgccggcttcgccgacgtcctcgccgccggcggcgcgacgccatcgtcgtcgtcgtcgcaggtgagcacgacgacggcagcggagttgaaggaggtgaacgggatgcttgcgtgcatgatcgggtgcttcacgcagatgttcgggtgcgccttcgggtgcatggcgaagggccccgacacgacgctctgcgtcgtcagctgcaaccagaacagcatcgtctgcatggtgcgttgcgccctcacgccgccgccgcccaagcccaagcccacgccgccgccgcccgcgcccacgcccaagcctcccgcgccctcgccgtcgccgccgccgcccaaagccgccggccacggcgtcgctggcgaccccttggcctagacatgtacagctcagctcactctactatacccctacaagtgctagctcctgatacgacattataaatgtgcctagctacgtgatatataatcaagaatcaagaaaatacaaactgataaaagaaaaaaaaatcaagaaatacgtatctatgtagatctcatagttttcatatatgcatttatgtggctgaacatgtgtttgtgccagccatatgtaacaaatgaaaatgggtcgtcagtcatactgagtgtatgtatttagtatgacctgagaaatgtactcaattgtgtaatgttccataattatgttctggaaatgaaaattttagattatatttttgtctgtgcaagcatctgctcttgcctaatagcacttccttaattaccacaggttagtatggtccttcctacatgccaaaatcacaccaacaacggctgcaaaatgtgtgtattcatcaagtcactttgctgactgtcagatgggtttctaagaattaacaagcaaattgtagtataaaatgtgagacttgagcaatgtgttaagatacggaagtgtaacttaatttacagtaaactgttaatacaacttacagcctgtagttcacctgcaagagttgcatctctccctttactccactttgagacagtatgtacaccttttttttttagtacataatcaatctttagtcctgcaacacagagtaataacataatggcaagccaacattacatctgcactaatctattatattattaaaacagccttgaaaggaggcaccatgttcgctgttgagactagaaattctcacattaatcggagaaaaagagaaaaaagctacacctttagattatacagtgcatatagattaaagggtgtagatttattgggcaatatttctattggtatgaaacaaactctatttatataataaataaataggaaaggttaaagtacttctaacgagcatgcatgtcagagtcctaatagtatttaggcaggtatgtccgattgggtgtggaaaaaaaaggaaaaaaaaacacaatccacggaaggaaaggggaaaaaaagatgcacagtccacggaagagtattttgtagctaccaaaagttcacttgcccagataatcttgatgccactctaaaatcacgtgcattcatccatcttgctatcaacacctacacgatagatcactggaaataattttgtagcctaccaaaagtttttttttctacttaaatacatatttgaggagtctgttcactatattggaactagaaaaaatatgcataattatatttgacgtttaattatgcgtttaattatgagggctttatatttaccccattaatcatatttaaaaaagtttagaccattaatatggttgatttaatttaaataagttataacaaaacatatacagtatataagttaatcgtataaaaaaataaattggcgtcatggatcactttaataaataataattataaacacacgggttcagacaagaaggacaaaaaaaacatccatgtcttcgtaatatttaccactttgtgaaccctttacttgagaaaataaagaacaagttattatgccatatgtcatatgttatactccctctgtttcatattataagttatttgattttttttcttatcaaagtcgttaggtttgaccaagtttatagaaaaatacattaacattttaatacaaaacaaacatattattaaaatatattcaatattaaatttaatggagctactttggtattgtaaatattactaattttttctataaatttggtcaaacctaaagaaatttgactaagaaaaaagtcaaatgacttataatatgaaatggagggagtagcacctaaaacataatttcatagacatccaacgtcacccacctacacgatcacaagcggtccatgagaaggcctggttgcgataattttggtctatggtgggaggcttggggtcgcctatgtaaaagaattatcataggcagcccactacgctggccacctctagaaatacatttattttttaggactacaaataacgggtgtaagtgggtaagccgttaactcacttataagttaaaataagtaggttcataacttattttgacatgggctgcagga

SEQ ID NO: 17516 - DNA, 11173 bp, Oryza sativa
ctagaaatacaatttaaaagtaactgaaattcagaattaaaaataagcaaaattgaaagaagagtccatataaaaacccaatacgagattattaaaattaggaataaaaaataaaataaaatccgaaattagcaaaaaaacaaaaagaagagttcgaatacaaatactgtcagggttacgggttaggtataccctttacccttcgatatacgtcgcatatcggtatggcatacccacgcgcatacggataccctctgcatatattaaggaaatccttcacggagtttacggacgaaaagagtcctactcggacaagactgggtcgtcaatgtatcgtgtagggtctgatgtctccaagttcgacttggaaaccgcctgacctgtgatataaaagggacccccggggaggacctaaggcatcgaatctcagagccaacacaacccccacagcatacgaagccggagcctgcaggagccaaaccgctagggatctagtcgaaccaactcgactacgatctcgccggatccctcgagttccaccgttccctttgtaatctgtgtttttccatcatataatcccgcatcaactggattagggctattacctatcaaggggcctgaaccagtataatctttgtcttttgtttgcttgatgtcgtactacgtagatccttataccaacataccccaataccctctatatccggtctacgggtatcacccatcgacagtggcgcgctaggtagggggacttggtgctcaaggttctactactatgtcatccagcttcgtcgacaacaacttcaacaccaacctcaaccagggattccctgcttcaacaatgctggtgtggactcaagtcggagaaatcgtcttcccagtttacaccacaatgctgatctcagccggtccatcaatgaccggaaacgagaatgcagtggctacaaaccaaaacgactccatgtcgaaagatcctcccgctgaggcggagaacggaacatcaatgacatccgagctcgagaaggattccaaggcggccaaaccttgtcactccgacaagaaccacgagccgacaaggataacttctgaagcgacaaggtcctggtgtcctatccacaaaaccaggaaacatactttgcaagcctgctgggttttctcaacgtctgcgccgaaattcgcgcctgcaaagagcgtggaattcagcgtatttctccaactcgtgatgtctattgtcctatccacaagacaaaaaatcacgacctctcaagctgcaaggtttttctcagcgccatgaaggtgtcatctcctaaggtccaatagtcacacatccccatcagggataaagacaaggaacgaggagcgacaccaacttcagatcgatttgttggggtaatcgacatcggtccccatgaaccatcagtattgcacctcctcgaagactatggatcatcgacagcgagcgcgccgcgggaagtattggctatcaacgatgtcggcacgtcagcgcgcaccaatgcagaagcggagaatcaagtggccaccccagcccagcacatcagagccgtcgacgctatactgagggaaaccccctacgatcccgttctgaacgacgatctcgcgcgttggacagaacgactacgggaatcagtgaccaacctcagcaatgcgttcgaagaggccgctgccgcagcgcacccagagcagccaccaactggcgatgccaatggtgaaaaccctgaacggagggaatcgcctcatcgggccacccctccacctcgcggcaccggcgatctccgcgatcacctgaacggccaccaagaggcacgacgcacacgagacaacgagaaccgttcccggcgccatgtctcttcacggcatcatgataaccaagatcgaggagactattcaaacgaagaccgagaccgtgataaccgccacaactgccacgatcacaacgatcgcgaacggcgggcgccaagcgatactggtcgaggacgtcaccataatgacgacgatgatggagaccggcgccgagacaacagcggaagactacaataagattctcgagagccaggccgacatcctcgtaatcgtacgccggaaccaagcgacccatcgtcatcgtcatcatcctcgtcttcctaatcatcagacagacatccacgaaggacacacgatcgccgacaacccaccgcccctagtgctgggtgtagagctttcagtcgttccctgcgtgatgtccgatggcctgagagattccgacccggagcaatagagaagtacgatgggagcaccgacccaaaagagttccttcaagtctactccacagtactctacgccgccggagcagacgacaacgcattagctaattatttgccaactgcgttaaaaggctctgcacgttcatggctgatgcatctcccgccctactcaatctcttcgtgggcagacctgcggcaacagttcgtcgccaacttccaaggaacctacaagcgccacgcgatcgaagacgacctacacgcgttgacacagaactcgggtgaatccttgagggaatatgtttggcgcttcaacgagtgcagaaatacaatctccgaaatcaccgacgcttctgtaattcacgccttcaagtccggtgtcagagattgctatactacccaggagttggcaacaagacgcatcacaactactcagagattgttcaagattgttgagcgatgcgcccacgcagatgatgcgctaagacgcaagaacgataagccgaagaccgggggagagaagaaaccagccacggacacacctgagtcaagcaagaagaaaaatcgcaagaatgggaaaaggaaagctcaagcggaagtcctcgcagcagaatacacgaaccctcccaagcgcccagacccacaaagtagcgacgcaaagaaaacatggtgccccatacacaagacggacaaacattctttggaagattgcctttctttcaaaaagtcgctcgagaagcacattgcatttgaaaaaggcaagtgagtacgcgtggtcgaaaaggatgcggaagtggctccccaggaatcggactcagcatatccagactctgacctccacgtttcacacatcttcggaggttacacaacgtactcctcaaagcgagaatacaagaaagtggaacgcgaagtctattcgacatggcagggggctgcaccgaagatgaagtggtctgaacagaagatagaattctcggaagaagaccaccccaagactgccgtcatcccaggacgatatccgatcgtggtcgaacccactattcggaacggagcagatcacctttgatgtcgctaaattcgatacagcttataatgccatcatcgggagaactgcacttgcgaagtttatggctgcatctcactacgcatatcaagtgctcaagatgccgggaccgaagggaacaatcactattcaagggaacgcaaagctggcggtgcaatgcgacaaacggagcctcgacatggtcgagcaaacccccagcccacccgccacgactgagccacccaagaaagtgagcaagacaaacaagacgctgaaatcggacgacacaatcaagatcgttccactctccagtgccaaccccgacaagaccgtcaagatcggggcgacactaagcgagaaataggaactcgcgctcgtcaccttcctccgcgacaatgctgacgtgttcgcttggcagccgtccgacatgccgggggtccccagggaggtgattgagcacaaactcatggtgagacccgatgccaagccagtaaagcaaagactgcggagatttgcatcagaccgaaaacaagccatacgagaagagctcgacaaacttctcaaagctggcttcatcagagaagtacttcatccagagtggctagccaatccagtcatggtgcggaaggccaacgggaaatggagaatgtgcgtcgacttcactgacctcaacaaggcgtgtcccaaggatcacttctctcttcctcgaatagatcaactgctggactcaacagccggctgtgagctgttgagctttctcgacgcttactctggctaccaccaaatcaacatggcaaaagagaacaaagagaagacagcattcatcacgccattcggggtattttgctatgttaagatgccgttcggactcataaccgtagggaatactttccagggcacggtccagggcgcacttagcgaccagctcggcaacaatgtcgaggcatacgtcgacgacatcgttgtcaagaccaagacaagcgactcattgattgacgatctgcgggaaacgttcgacaacctccgacgatatcgcctcatgctcaatccagagaagtgcacgttcggagtaccgtcgggcaagctgctcggattccttgtctccggcagaggaatagaagcaaatcccgagaagatcaaggcaatcgagaacatgaagtcgcccacaagactcaaggaagtacaaaagctaaccggatacatggcagcactgagcaggttcgtcgctaggatgggaaaacgagggcaacctttcttcgctctactaaagaaacaagacaaatttgtatggacacaggaagccgaagaggcattcgttgtactcaagcgctacctatcaaacccccctgtacttgttactccccaacctaatgaagaattattcctctatattgccgccatgccatattccgtgagcactgtcattgttgtcgagagagagaaagtacaacgaccagtctattacgtcagcgaagctctccacgacgcaaagacaagatatccacatatccaaaagctgctttacgcggtcatcatgacatcaaggaagctacgccactactttcaagcccatagagtcacagttgtctcctccttcccgctcggtgaagttgtgagaaataaagacgttgttggccgtattgcgaaatgggtagtcgagctgagccaatttgatgtccactttgtgccatgaacagccatcaagtcccaggtactcgccgacttcgtagccgattggactatgcctgataacaaatcagacaaccaagtcgacaccgaaacgtggacaatggcgttcgatggtgcactcaacagccaaggagcaggggcaggatttatcttaacgtctcctttcggagatcaattcaagcacgcaatccacctcaacttcagggtgaccaataacacagccgaatacgagggactacttgccgggataagagctgcagccgcccttggggtaaagcgactaatcgtgaaaggggactccgagctagtcgcgaaccaggtgcacaaagattataaatgctctaaccccgagttatccaagtatctcgcagaagtcaggaagctagagaaaaggttcgatgggatcgaggtccaacacgtctaccgcaaggacaacatcgagccagatgacctagcacgacgtgcgtccagacgagaaccgctcgagcccggaatttttctggacatcctgacaaagccatcagtaaaagtggttagcggcgaagttagcccggccgcccccgacattagctcggaggccacaaaggcagaacgtgccgttgccgatatcgagaccacagatgactggcgcatcccactaatcaaattcatcgacagcgaggagttgcccgaggacgataccgaagccgagaaaataacccttaaagcaaaaatctactgtatggtcggcaacgatctatacaagaaagcgccaaacggggtacttctcaaatgcgtctcatctgacgacggcagacacctcctccttgatatacatgaaggcatctgtgggtcacacgccgccggtcggacattggtcgggaaagcttttcgacaatggtttttctggccaaccgcccttaaagatgcatgcgacatggtccaacaatgtgaagcctgtcaattgcacagtaaacacacaaagctacccgagcaagcgctccagactatccctcttacttggccattctcgtgctgggggctagatatacttgggccattcccacgtggacagggcggctacaggttcctattcgtggcgatcgacaaattcactaagtggatcgaagcagtacccacgggggaaatcaaggccgacaacgccatcaaattcatcaaggggatattttgcagatacggacttccgcaccgcatcataaccgacaacggctcccagttcatcagcaccgatttccaggattactgcatcgggcttggagtcaagatatgcttcgcctcggtctctcatcctcaaagcaacggacaagtcgagagggcaaacggcatagtactacaagggatcaaaacccgagtctacgacaggctcatgtcacacgacaaaaaatgggtcgaagaactctcatcagtactatgggctgtacgcaccacaccgacaatgtctaacaaggaaacacccttcttcctcgtgtacggctccgaggccatgctccccagcgagctacgacatcagagtacacgagtatagaagtattccgacgaggatcaggagaagcagcgaaacgtcgatgtgaaactactcgacgaacatcgcgaacgagttgccgtccgagcagccaattaccaacaggccctccgtcgttaccacgagaagcgcatccgagcacgcatactttcgaacggcaactacgtcctccgatgggttcaaagccaagcagggcgaaacaagctctcacccaaatgggaaggaccttacacgatcacacaagtcttacggctaggcgcattcaaaattgcagacggtgatggtcgcgagttggcaaattcttggaacattgaccaattacataaattctatgtatgagtcaatatcatccatatctgtaagacaccttacagcatcaataaagcctattcttaggcgcatattacaatcaaagtgttcctgcccgatgatcccttacccagatgacacctagcgttgaaaccaatccttatgtccctttatgtcgtctcgacaagacctccgaggaacctaagggatattcggctggggacacccagagtcgataaggacttgtcagatcctgtagagacgaaagaccatgtaagacctggtcgtgtaagagttctcgccgtgcgtattaaccaagccgtgtaatcggaaattaacttattcaaccaaggcaggtcaaaggtccaagatccttatcctccgagaaaatttctctgacgacaaggctaggggctagggagaatgtacgactcaaacgaccgactaaagtcgtgaactgagaacacactctgacacacgatatccggagtaagaaagatctgttaagatagatttcttttccatttcacaaaatactccttataatttttacaagtctaaggctatattacacttttccctaagatgtctatcacagggtacaaagactaccaagaaggccaacgccagtccatagattggaagaccttctccgccaatggcgccatcgacttcgccagttggtctatctccgtcggagtcctccgggaacgagcaaaaccttcacggagaaaatcgaggtccaggcgcgggcgatgatctcgtaggcaagccaacacgtgccctccggcatatcggctcgatcgacgacactcctgcttcaaggcctcgtcgatgcgtttgccgacgccatcgagctgagcacaggccccgttcagccacgagatgtatccggctgccgactccttgggatccccacggggtactcggagctctctacaaaccttggccatggatgtgcagcaactcttcaagtacgagttgaaccacacctcacgacctcggagcgtttccacagccttctttttcttcactgcaagcatggttctctcgagttcccgctacttcaaattttgtcttccaatattggatacgacgatcttggccagcaagagcactctcgagatctgcccaatgtgggaacaactaagtcaagctgcacgcctctttcgagaacatagctgatctagtcggaggagcaataagggatgaatggaccactaacctaaggaagtcgtcgccatccccgtccccgtagctaggatctggtctacattgtctggcgacgcatgtggttcaaacgcgagagccgaaatgatcgccggtgactcaggctgcccgcgctgctggacatcctcatcatcaacatctctacaagggacaaaaagtactcaagatcaacatgcaagagtaagctaggataatagctgcacgcacaaaggcggttgaggtccatcaaagttttacacagcatgtctgaggagtacaagagatcctactcttcaaaaagagggagaacagattcccccagatcgccgacttcttccatcacctccttacgcgcatcgctagccgccccctgatccaagatctcgcggagatcgagttcaggatgcgccagcttcacacacgcaaggacgtggcatgtcccggtatagattccgttggacgtctcctccccgatcctggccgcatgcttggaggggatctcctccatcgccgccgccagcttcgcaagagaagatgtcagtgaaaactcatcgggattcgccgggatggtagacttgatgccgcactccccggcgagctggtgcataccagtataggtgacccgcaacgagccacggattttcgacagattgttcccgagctccgacatgcggtgctcgagcccctgccgttgtcgctcgttgccagccaccaactccctcatcttcttgaggtcttcacgagcctccgccaactcgtgtaccagccagttggcgcgctcgttcgccgacgccgccgccgacctcgcctccgcaatctcgcgaccaatgccacgagcaccagcctcgaggaggcgccccatttcgacctggagctcctcccaggtgaggacggcagccggtggaccacgaccagccgcgggatcgctggctgggccgcttggtgttgcctcgcggctcccgggcgcaagcacgacatccgtcgaggccacagcgggagacgcgccggaagtccctccggactcatcttgcgccgccttcacccacgccgccctatgagacagccatggttcagacaacgctcgaacaagatcacggaaacttaagttcatccacttacttctcgccaagtgtcacaagtcgttgtcgtcgtggaggcgggggagacgcgtccgaggcctggaaaacggttgatgcgaagtaaggcgaaattcttctggctgtatgatcagacaacaggatagcttaccgagggggtagatgccttgcgacgatgtccgcttacagaggagaacttcctcccctttgtcggaacattgccaccacttgtggtagcagcagcagcagcagcatcggacgcctccttggcgaccttctccttcagtgacgccaccacctgatggtcagcgagcggcccgatgatgtcagtcagaggaagagcctacgcttaatcaagtcacaaagcgatctcggaagaaaaacgcagaatgcctattgagtacacttacattgatggcagtgtcacgttcggctgcctccttctcacaaaggggaacatggatgttactcgccgttgtcgggccactgatcatcacctggccgacacgacgtcccacggtttcgctgttcagacctgtgaatcgagaaccaaattttgataaatcaggaggaacgtgaacacgatcatgtcaggataaatacaagaaagataccccgaggagaaacccgggtcgcgtcctccggtccagaatagtcaaaagctggatggactcgagcctggagcggctggatccgtctaccaacgaagtcggcagcgacttcatacccagaacaacctcgtactcggagatcgtcgacaatatcgatgaacgactggagagaaggggtcaaggggggctttgcggtccaagacgaaatcttatccggttgttcctctggaacaacgaagacagggtccgaatcttcgatctgaaggtagaaccacctcgttcgccatttgctgtgagaggaagggcactggaaggggatataacgcgacttcaggcaatcccgaagtcggaacccgacgcatccagacaccctgttggactccatccaacacagctcgtagtagaagcgaaagagatcgagaaagggctctaccccaatataggcctcacaaagatgagaaaagatgctaagaaaggcgatagaattgcggttcagtacctcctacttccctctccatggttccacgaccgggaagggcgccgtcttcctgaagcttcttcagcgacgcgctggtggaggatgatttgccaagatccatcaccgatcggagatcgccggagaaagaccatagaagttcaataccaagagaagaaattcggaaggtgtagggagaaaaccgcagagaatgtagtcctcgatcgtaaccatgcgacctaagacgagctagggtttcttgtgggagcggagaagacgaagaacgcttgcaggcgggatgttttcttcacaataggcggacttcaaaatggatccccaaaattcctttaaatagacacactaccgacggtgtgaattccaaggaaaggagagagatgcccgccggaaatttctgggtctgttacgcgcggcagttttttagacttcagtttaaattcaatcgtgaccattgggcttcacatggtgttctcgactacgtcatgtctctacggtcctcacactgggaacgacaacagtctcgacacaagaagtcgcgaatggttacacgagttcatttaagcagaagtcgggggctactgtcagggttacgggttaggtataccctttacccttcgatatacgtcgcatatcggtatggcatacccacgcgcatacggataccctctgcatatattaaggaaatccttcacggagtttacggacgaaaagagtcctactcgaacaagactaggtcgtcaatgtatcgtgtagggtctgatgtctccaagttcgacttggaaaccgcctgacctgtgatataaaagggacccctggggaggacctaaggcatcgaatctcagagccaacacaacccccacagcctacgaagccagagcctgcaggagccaaaccgccagggatctagtcgaaccaactcgactacgatctcgccggatccctt

SEQ ID NO: 17517 - DNA, 4526 bp, Oryza sativa
aaaaaataaaataaaatccaaaattagacaaattaaaaagagagttcaagtaggaatacaattttgaaacaactgacattgaaaataaaaaataacacaatgcaatattagttaaaattcaaaacaaaaaatataataaattctgaaattagaaaaagaaaaataagatttcaagtaggaacacaatttataaataactaaatttggtaataaaaaaataaatactactgaaagaaaaggccatttaaaacacatgacgaaattaattaagtaacagggctataatggagtagaatggtggtggttgatgggacatctaaatactattaataaaacacaaaatagaataataatgacaattaaaaggaatgacgacgggcagatagtcaagcaatcggttatggcggtcggcgggacttctagaaagcaaaaaaaaaaatccaatgataatcatatttgatttttaaaatctcaatgacaataaaaatgagaggcaatgggcgagtcatacatgagtacaatggcagagccgccgatggttggtgggacttttagaaagtaaaaaaataaattcaaacaatagttatattcgatttttacaatcttaatggcaataaagagtaagcggcggacgggtcgtagaggagtatagtgcagcgtttgacaggatttgtaaaagttataaaaaatgaaatccaacgagacaataaactctaaaaactataggtccaatttttagaggtaaaagtaaaaaaaaccaataatactcatgtttgattttaaaatctcaatgataataaagaagggaggcatcaagcgagtcgtagagaagtacagtgacaaagtcgctgacgttttgacggaacttctagaaagttaaaaaatgaacctaaatgataattatattcaatttttataatgccaatgacaatcaataggagaggcagtggacggccgtaaaggaatataatggcaacgtttgacagaacttctagaaattataaaaacgaaacccaatgggacattaaactataaaatctataagatccaatttttaaaagtcccaagaagaatgaatagaaatagtgctaggtcgaacaagcaaataaagaaagatatgacagaagtaaggggtacggtgtgacttttaaaaactataaaattagaaacacaaggattataaggtttggtatttcaaagtcttaaaacaacgagataactatttaataaactttaagtaaaatcatattaaaatatatataactttctatgggtgctagccgcgcaattgcgcgggtcacccagctagtttagtgaacacaagaacaaattctgacattcattgctttaattttttttatacaattacaaagctacaaactgttccactcacttccacagagtaggcatttagctcagcgacattggagatatacaactttgataaatatcatctagctatgtgaaactagaaactcctcagtggaaaaggacataacttaaaacttcacaataacatcaaagccgagtttttcatgtgagcttttctatttccaaggtttcagatctgctacaggccccgcagtccagttgagatgcttctcgcctggctttaatatacactgtctgggtgtgggagcttccgagcaaggccgttgaggatctgatggaatgcatctctaggttgtgctggctgcggaaacaacatggcctgtttcattgatggattggcgagtaatctttgcttccttaggatatcatcaattgggatggatgtgaggattgagtctagccttggaacatcctcctcgtcaacaaaaacaccgatttcgtcccatgggattgcgtcagcaaacggaagcacaatatcatcagctatgatgactggaatgcaaccgaaaactacagcctccaccaatctagggctccatggtgcccatcccaaggggcacaagcagaagactgagcgctgcatatcttcatagtaagtagctgggtgttccgtagaaatgtcgaagaggggattgttcttgaaattctcccacagtgaagctcgggcacctctgtataacaagttcaacagagtcaataaagcaggaccaagtaccacaggagatgtatctttcaaggttctgcaaacattcttaccttgcataatacccaccctcagggtcattcccattgtcatagaacaggcctctgaagtaaacaaagattgaacggggagtatcaggaggaatcaagtgagcttgcattttctgaggaggcgcatatggtggtatagtgatagaaccctccttaagcacacatggttcttctgtccaaaagtttgaaccaatgtggcacggcggagcaatggaagtatcccacgctcaatagctttctcttcctgtaaagacatataaccattgcatatgcagtttcagaatagatagggactaaaggtaggatctatcctgagctacctatttcttaaaactattgtggaactaaaatcatgactagctacaacagtgacaaggacttggcaggtaagaagacaaataaaccaatatatcattacctgatagtgaaagcatgccccaaaatcatgtggaacaacaaagaaatgatctgctccatcagttctattccagaatggccattttcttgaaagaaactggattgcgctccgcatcatcctaggagacttgaatggcaatggaagtccagcatgagtcaaatcacaagtagtgtaaacaggggcatagaaccaatcagcctgttcagggttgagcgttcgaacagcactagagagcaagaaacgatgcataaatatctcagcagcaaacatgtggttgaggcatcggggatccttggcgactatcctcttgttatacttgcttggcaagtcataaacaaaaaccttcaaccgcccaactggattgtcttctagcacatcaccagcacttcctgcaggtcaatgatcttggttgagtagaagcacatagtactatcttcataaaactgataagcagattccaagaaaaccagtcatgaagttataatataataaggggacatatccagcgaaaaccatcaaataagtgaaaacccatgaaacctaacctaaaagtttcataaattcatgaaaaaaaatacttgagatggatgtaggcatgaaatacattcccaccaaatatcaagttcaaactcaactttatttaggagtaacagaaaagacattttgggtgaatggtaacatgacactattcacctagaatttctcttttttgtttctctcaaatgaagctaagtttggacttgagatttggtatgaatgtatttcatgtctatagctatatctagtatttttttcatgaatttagaaaagttttaggtatggttttcacgggtttccgcttatttgatggttttcattggatattccccatataattaataagtaatatttaaggtggaaataaatgttaacaagaagaaagaatgtaaaactcaatacaagcttaggggaattcattttcaataaatcatgaataattgaacgaaaattctgttgttctctgaaacataaactcagaatgcaccactctcctaaaaaactcaggtagattctcctctcttttatttggcacaattgcatttatggggtaactgtttatcctggaattattgtattaaatagaaacaataattggatccaattccattatcggaaaagttatatgcacaattggattggctccaagcagatcacagtatcttgacaataactaacgttagttggataggactttgtcaatgagacaatgacataacaagtgtaggtctgcaggtagcacaagcatatatgattgtcttaaaactatcaaatgttaactatgtaacaagtaaaagaaacggaagaggaggagaaataggtgctaaatggtaattcaacatttctatatgttcacacaaccctttgctggcgcggagagattacattccttcgataagcacgagaatcagcgatccattgcagtcagtactgaatttacatcaaactagtattggacatccggatttccttttttatagggggaaaaaagcatatcagtgcgaatgtgcgattctaagagcacgggtgttgttgtacaatgcacattatcaggtcgaacttgcaattgcatatgaatatccatggttgaagtactactactagattagaggagaatttcggcctaagaactgagtggtgttaggctgacacgtcctcgcctagcaacagcatcccaactttgaatcaggtaaagggaaaaatatttacaaacaagctgagccagttgagcgattcccctagccaagttcgtgaacaaatccaacacaagaggctacaactgaatcactcgcatcacaaattcacaatccacaagctaacattctaacaacccagcaagtcgaacgaatcgggtgcagaagtacagctcgctcacctgagatgcgctcggtgttcccctgagccgctcccccgaccacctcggcgg

SEQ ID NO: 17518 - DNA, 16128 bp, Oryza sativa
cgtggaagcttctagaagtcgcgagagcttgatcgctggaggaggaagcaaagggaggcagcaaaaaaagggggaagagagaagggaaaatgcaaagtggtgggggggattttgttgcttgtgaatgcaacaaaaaagagagagagagagagggggaaaagaaattgtcaagtcaaggtggcaagcgtaggtgagagcagcgcctccattgaccaaatgaccagctgcatcaggacatcaggaggcactaatcaagatttatgatgttgctaattcgtcattagcatttacttaattactacattattaggaatttagggttagaagatactactcctatttaagaagcctcaaaactaggtgggagcaaccactaactgcttgttgagttggaaggggattactagattagatctgaccacttcagtctgttaggtaccttaggtaggtagaactgaaatctctgctagtacgacggcattaggatctagcaaatcagatccatttacggtgttactgttgcgttttttcatattagccgggaagtaaggttttgcttgtactatccgagtacaaaattcagggatgaacatgtatgtactcgtgtagaggacaatttcgtcttaattaaactgatttattgcatgtttgggcattaattaccatacccaaaaacagatcgttgttccggcacaagggaatattattatgttttccgtcatttcaggttcttgtttaagtacagctactacagtttctccgacggcgagggttcagaaactaatactctcccgtctaaatataaattattttggagggatatgatacgtaggtggtgtttgaatcttctaaagataaagataaaaattaaatgtttcacgtaaaacgaggtaataacatgtgactaattggattttaattactacaaacttaaaaaaatggattaatatgatattttagaataacctttatataaaaagttttcgcacgaaacacatagtttagcagtttaaaaagcgtgccacgagtatttaaattttcatccacctgttacagaggaaacgaacgagaccatactattcactccttcccaaattgatcatcgtataatagaatttaaaatttctcaaattagtcatcatataaccgcatggacacgaatttcatcataatacaattaatacagcatgagagaatgtgtgcatgctaagatataattggcacggtgttttaatcgatgcatgtattatgggagaatgtgtgcatggtgtcttgattaatatgatttaaattattcttagtcttggtgcataaatttatatgatgatcaatttaaaaagtagtgagtataaatctggacagagaacatatcccttcaaaattgcttatagtttgtgatggaaggaatactactaccttgtacactgttgtgccagaaagctatagatcgccaaagtgcaatgaccaaactgccatcggatgcaagtgtggttgagggtccttgtcggcgtggatcgcacgacactacgacagggccatctgattccaacgtgtgtccgctttcaagtatactccacgttgacaccgacggaaacggaagagaggtctcataataagtttaatttttcatctcttttaatttgtctcgaaataagttaatttttgaagtaattactataacgaaattataaaaataagatataattatattgggaatagagaaaatttttgaagtaattactataacgaaattataaaaataagatataattatattgggaatagagaaagtaaaaaataattgtattgggatttaataacgtaagggttattgtagtttttttttgtttatattaatatgtgtgagatggataaacaaatttagagtgaactgcaacggcggttctcaaacttgccgcggtgtgtcatctagatccatgtactctcaaattacactttaacctctctaaacttgattatgcgtccattagtggtctaaaccagcctcgggatgactttttagccgacgtgccatcgtgatgtgaagggtgctagacaactatggggtaatgttgcaaaggggcccttcatttaatccaatcgtcacacacatctccctagagtcccctcgagttcttcgcgtcagagaggaggggcggcgaggcaggctacacaagacggtgatcgccggactagattgttcataatatcatcccagttaatacctccaacttttccctcatgattgaaatagacaaccaaattcatgcacttttcaaccactgaggccatcacatttgtatcagtgttacatgtaatcactctgagaccatcagaaatacccttgcttgataataaccagtaatacttcaagctgggagtccttaggtaccctaaatcctcaactaattgatccaaccacagtggagaccaagtgtctatcttaatatgatcaaaccaactgactttgccatccacgtaagaccgcaaattaccatgaccaacgaaaaaaccccatggtgaaccttgactgaaaactcatccgaatccatacgtacagtccaacaatgcaccaccccatcaattatctaccatctacaaacaggattacccgtgcaagaaaaaaacctaactttacacagaaatagacaaatgcatctacctagcagccaaatcctggaatttctaccagaacacacgtacgtgactgtataccgttgctctaaaggtataaacaaacacagattgctctaaaggtacaaacaaacacagattgaggatcgatggactcaccataaacaggcgcagcttcatcttgccaccatcgtcactccacagtgtcgtcgtctggtccaaattgagaacctcccccaccctctctacccttcatctgaatgaatcgccaccaatcgccggcgatcaccgccttgcgtcacctaccttgccgcacttcatctctgacgtgaagaactcaaggggactctggggagatgagtgtgacgattggacaaaataaagggcccatttgcaatattaccctcgcagttgtctagcaccctccacgtcacgatgccacgtcggctaaaatatcatcccaaggctggtttggaccactaatgggtgcataatcgagtttagggaggttaaagtgtaatttgagagtacagagacctagatgacacacctcgataaatttgaggaccgccggtgcacttcactcaaaaatttattttacgatataggtagttgtagaactggacggattgatccaaggtatgtgctatactgccacatatgctagggtaacacgtgtaagtggaagcaagtatttattccgtttctaaatattttttaaaaatatattataaatgcagacgcttacaatacacacaaattcatccttatgagattgacaaagccaccataagcgtctctctgtcgacggtacgtcgcccaccactgaagaataaatagccgtaaacgcaagaaactgtatcaactctaatatttgaacacgggtagattggttccaccataaaaatacctaaccagttaagttagactcacttcatcgtttctaaaatctaaataattaatacaattgaccattagtcttttttcttgaaaagcctacatggatactaagaaaaaaacaccatattatcgaagtgtgcgaagtaacaaagatcttattttctctatcatattatggaagtgcgttacgtcaaaaaaaaaagattcaccgtagtctcatttgagaggttttagtgatcaaagcttaaacaactaaagtctaacataaatacattacgtaataccatttttacacgatcagttacgtagttttctttcttttctattctttatttcgatagcgagagaatatctagagtcaccttgtttccttggcagagaaactgccagtattatatgggggagtcgtgtgcgactacgggcaccacgctgtccttgtgctgtgcacgtccaaagaaccattttcctaaacataatgaaggaccagggccattcgattggcatacatgaattcgactcgaattttgtacagcatcttaaatatttagaagatccattgactaagcctggcagtagtaggtgagattgtaaagagtatccatggaacattggtacgcattcatcgcctgcgtgctcacaatcagatgccacacttgcttggaacatacccctccgtaccaaaaaaaaaaaaaaatccattcctagccatgaatctgaacacatgtatgtccagatttgtagctacaatttgatttttttgggacagagtatgtccagatttgtagctagagtttgatttttttaggacagagtagtacctcaccagaagtcttcagttcaaaaactgtcccagatgtcttcagaattccataaaatgagtcttcacaccagaacgctaaattggaactcattctacagccattgcatgcaaatgaagcgttcatgaagagccactttacggcttcacatcgatacgtgtcatcacaacatatataaggacacagataaaattaaaatagtgccaagcctacaacagcctatgaagaattgaacagctgagggcaattctatcatcatgatgtcacaaatagtattggcaaaaagtttctcataacaaacaaatcaactacattcaatcacatacacgaagattgaagagaagggatgtcagttgacaacatataagcttcactgtgccagcttgtaagacaattacaagataactcctattgatttcaggtaacagaaccaaacttggaaattaattaacagtagccaagtagcagctcattattctttactagaaggtgtccaacaaagtagagcaacaaaaaggtgaaacgtcaaaccaacagagaatagaagtgccataagattttaaaccctgtggtcaatgtaatctcagccgatgagcaatttgttctcttccagaaatgagtaggtcgggacttcgaggttgtatggtgcagggcccttacggattctacctgatatatcataatgtgatccatggcatggacagaaccagccaccaaagtcaccagcgttgggaagtggaatgcagcccagatgagtacacaccccaatcacaaccagccactcagggttcttgactcgttccgcatcctgctgtgggtcacgaagagatccaatgtcaacgctgttcgccaagttgatgtcttcctctgtcctgcgcctgataaaaactggcttgccccgccacttcacggtcacagtggtgccaggctcaatactagagagatccacctcaagggaagcaagagcaagaacatccttgctagcagacatgcttagaacaaacttcaaaacgagcaagcgcagaagcgaagcataaataaaccttccaccactcaacacaaagtatgcaaacgctcttttacttgggtcacctggctggtatctttcatggttatattcatcatatacaatctttgcactgggattcttcacagctgacactgttgctggaagctcagtcaagcttacatcctggttccttggaacaagagtttctgaggaaaagcctgcaaaagggaactactgttacatgacatcatcaaatatcaacgtaacacaaaaggtgatatgaagataacagagcattattttatcttaacacggtatcaccaataaatttcacacttgaaaatcatctctatatattactatgcatagagactgccattgtgataaaaaatcaaatttattttagtggtaagtgttcaaactccctgatctcagaattgcatgcttgattaatgtatggttacgaactcatgatagcttatgttctgatcaatctgagttgttccaaacaaggaagaacattcaatgttttctacccaggtttctattatcaaatgttagtacatccaaccagaagtcagacttcaacagtaacataagacggtgcacattgtgatctgtaaaacatctaattgcaaaatgtttgatgagcgcacaagcaaaaggtaaaaatggaagtgctgactgctgaacaaccaaactacaatactggatatttgtaaagcattctagaaatggtcacatctaaatatataatgcagcatactaatgcgataagaattatgaggttcctttcaaagtaagtaaaaaactaaagcatgcgtaatctttaccagtcaaaactaataaagaaagcagatcaaaggatataaaatccaaacaaaataaattcatgggggaaatataagttccactgcgtaaaacaaggtatctgaagacaggattcatatttttaacagattctaagcaaacatgtttgcgatagttagaaatgcatactaaccatataggaaaatagcatcaacatctaaacaatcaagagcgctgatcttcataggttgtacggaattggaaatggaagcataacaaacttatagttcacataatgttggccaaggaaaatgccagaacaatgtgagacaagatttatgcgcattttagggtaacagcaaatccatgctgacagcattaggaacatagattatcaatgagcaaagaggagtgatcaaaagtggtttgcataaactaaatgaaccatgtggaatgtgctttcttgggactgtgttaatgaaaataaaacagactggacagcacaaaccaaaatgatattagcattaatcatgttaaatgaagaaactcaattctggcacatctttcccaaagcacaaaagaacaggagcattagcagtccgcaactccacaaatgtggtaattaaaccagaaagaaattttactgaagtatcaaaaagaggcacaaatctaactatggatttcaacaactacctaatgcctggctagattaattactaataaaaaccataatactgaacactatagcaagctttcaaacttgcattttcaatattatcataccaagcttatctttgctcagaacagtgatcatgtagagaatcatctaatatttctgtgctgtggtatgaacaaggagatctcacacatgagtatacataacaattctaagatagcattcacaaggacttacctaaaagttgctctatctgagtgtgggtcatcaggaaagtttgcgcgtgaagaaaaattgcacataattatatgatccagctatccactaaccaagcccacacgtgttcagatgaagcatctcatatgccacatagacattacgcatgactatttacgtatctggagtgagcacaaatcaatcaaaagagcgttcacaacgaattcgactcagttgaataaacggaaacacaccaaagcataagcataacatcaatcgtggaaaacttctaatatccaatcatccctctagccgctaaactaaaatacaaatccaatcatgcgctcgcaggctaggaacaaacaaggtatgaacagagaacgcatcaagcatgcatggattacatagagatcaacgagctccggaagcaggaaagcatccaaaaaaaactaatatcaaatcaccgatcaggaaccaaacaaccgcgactaccgggatccccctccgaaaccctgggagagcaggaagaaaagctggatcccccccccccaccccgaacccacgcagatcagagggcgggaggcatgcgggccgcgtacatacccctcgaagcggcgaagaacggggaatccacggcgaagcgcggcctctggggctcacgcgagaattcgtcgtcgccggggagggagcccccggcgagcgggcccctggcgccggccgccgcggcggggcgccaggcgagggcggtggtgaggcgcctcccggcgaccctgagcatggcggcggcggcggccttcctctccggcgggtggatcgggtgggtggagaggagatcgggtcgaggcgaggcggcgtggtggcgtcacggagtggacgagaattgcaggaggagagagagaaaaaaaaaacaagaagggaaggggagcacggaaggatgctggcccaggcccagtactcgctgggccttgggctacttgcttacgtcggcctgattaaccctcgtgatttttcttttttttttctttttttactggttctatctaactagttgttgacttgtttccttggaatttaatgggttcagatcggaatggctcaagtgatcggtttgcgttggcgtggtaaggaacgtgccacgtgtgtctgttgcagcacacgacttggccacgtgcatacggtgctgtttttctgtcaaacgaagcatctttttcttatggttgaaaaatgggcatatataacgtgcaaaagtaaagttgactgagcacaatctacatgaaaagtctgtaggtgatcacacaatattatttttataatggatcttttcttccattaaatacatgcattcattatcactactacataaaagagattggtaccgattaaaaattgatcacaggtaccgggtttccaaaccaacacccaacaagtgacacctttaaggaccaaaggtgctagtttaggaaccaatacttttaaggttctagtaatggaaaaaagaaaaaaaaaagctaactcaatgcatcggctcgattcgagaaactctccatcatcactgagatcaatatcatccccatctaccaaacacaatcaaaatcatcattgagatcattatcatcccataaccaaacacaatcacaaaatcaacaaaatcgcaaacacaacacatggagaacgccaccgtcacggcagcggatctggccccgtggtcgcagcaatgtcggccggttggagaagaggaggaaggaggggtagcggcggcggctaagaaggaggaggggcggcagatccagaaagaggagaagggaggaagaaggaggggcagtggcgggtgcttaggaggaggaagtaggagtggcagcaatggataagaaggagcaagaaagggcggatacggttccgatggggtttcacgagtagataacataagccggctcaatgggcagatttttttaaaaaaattaattataggtgtcggttttttaaagaatcgatacatataaaattagtataggtgtcagttttgttttttgaaaacacaagtacttataggtaccgagttttatttagagtcgacacctataagtttttggaggtgtcggtattttttatctcgtgaaggtgggaaacggttaataggtgtcagttttaaatgaaccgacacatatgagccatcacctattaaggtttttaagtagtgtataaggttttggctcaatagaaccactatataaccaacctgacaataagtttggactcatatgcgctcacacatatataacacgcgataaccctacatgtttgataggcatttttcatccaaacaacaatgggttgtgtgctctcgacgggatgaggcttccatgactttatgcagtttgtagatgtgccactgatatatacatctcacatataagtcagaggatccacttccgcttttgacacacattgttatccttggcctatttccaatgccctcatgatgaatcatgcaggataaggaaaaccatgtagtggaaatatccggtagcacaaatgttatctttggtagtcttggtagcacaaaggcttgggaaggagaagatacttaatttcactggtgaacataacattggatgatcaattgatcccttttctctcctctattcatagaagtgaatatgttttcattggtaagaagaggggctacaaatcaatcgatgaagatcaattgatgaagagtagtccatgtataatggttgtcaatttaatcaagtgaactaattttactaattttgtgggctgatctatgcccatctcttacactacgcaccacgactatatgatcataatattgaaggtcaaagcagagagaattagattccctccgtcccaaaatataaacatttttagcataatgtaaagtcaaacatttttaactttgactattaatagcaaaaaaaaatcaattatatcctataaccaaaattattacgtgttaagtataaaaaatacattactacgtatgaataagtctacaatttttagtgatacgtaaagttagaaaatattcattgaacaactatttatctctgaaataaagggttttgttttaatatggggtgaggttgatgataagatccagtggctacaatttcagactaatgaaaaaagaaacccatgacaatatgcaaagatttcaatcacctgtaagctagtctctccaacataagaaaaatatatatgtccaaattcatctctgaagttgatttttattttggtcaactagaaatctccacaaccttgaaaatccctaaatcatttaaacaactattctcattccttgaatacaaatctaattgatctcactggtaataccttttctcaacagtccctttcctccttagttaacatgttaaacattttcacatagacataaaatatttacaaaaattttgatatgaaaatattcataagtgataaaaaataaagcaaaaccatacacatcaacaaaaaaaaatagtaaatactgtaaaaaatgcacaaaagttatatcttacctaggactacaatttttagaattagtagtgtgttaccttaggtgacaagaaatcaaaagttttaagcgtaaaatcgagcaaataccttctgaaagacaaaggcacaaaccaaattaaactaccccgttgcaaggacatgcacacgcacacagcacagatgctgaaaaaaacaaaaaatatggccgccacccatgcatgcccacgatgacacgagcgtattcgatctctctcgcgcgcgctagctcccgtggccgccgccgtgaggccacgcgctcggcgacgacgccgcggtcgtcgtcgtcggcagcgtcgacggcgggcgcggcgccatcgccggagagaccccgacgagccgctgcgccgcgaagtccaggatctgcgccgccggcgccgcggtggccgcaatgccggccacggcggcggcggcggcggcgtcctccccgctccgcagcagccgcgcgtactggatcaggtcggggaacggcgccggcgccacggcgggcgcgggagcgggaacaccatgcggcggcgggcggggcacagcgggggagacgaggaagccgccctggccggtgcggccgcggacgcgctcggggaagttgagcttggccttggcgcccttgaagcggagcgcggcgtcgtcgtaggcggcggcggcggcctcggcggtgtcgaaggtgcccagccagacgcgcgccgccttgttggggtcccggatctccgccgcccacttgccccacggccgccgccgcacgccacggtagtgccgctccgccgccgccgcacctgcagtcaggcacacgcgcacgttcagaattgcgttcttcccccttttgctttcaagaagaaaatttgctttaacacgagtagaaatcactcgcaagctactctatttttcaagaatcatacagcaagttaatcactctaagttattatcaaattatgtgggattattaaacagccgatacgtgattatagttgctctatccgttttatattataagtcgtttaatttttttctatacttttagatttaataagtttatagaaaaaaatattaacatctataacaccaaactagcttcattaaatttaacattaaatatattttgatataatgtttattttgtattaaaaatgttacattattttactacaaacttaattaaattttttagtagtttgattaagaaaaaaatcatacgacgtattggaggtctggaacactaatttaaccatcttaatctacacgaaataggtaaatttgattgcccgaagtttctaataaatagataaaccgatggatctatactcttgtagatagcttacggttaatcatagcgatcatggcagcttaattacgtacttggatagttggattacgtgtgtgcaactgtaacacgtacgtaccttgcgcctccacggcctgcagggcagcggcggcggcggcggctgaaggccccaccggccgccaccgccggtcagctgattccgacgacagcgtcgccccggccggcgcggcgaggtaggctgcggcggcggccacggtgaccacgtcgtccaccggctgccactgcggctcgacgtcgtgccaatccgggggcgcgccgccgcctccggatcctatcggctgccgcgacgacatggctgagctgccgctgccggcccaagcttgcggcggcggcggcgattggtccggccgaggccgacgaggctgcggatggtcgtcaggtagaggccgcttcccatgcctccgatgctccaccttaattagtttgctgctttggagatcttggtcagcttcgcgctagctctctgaatcgatcgctttcttgattgattgagctaattatcaagctaaaaaatacgtagtactagataattagtggagccacaggagaaatataatcgctcgagattaattcgaagttggatactgggaatggatatgatcgatatgggtctcgtcgggagaatactatctttttgctttgatatggaggaagaaaagaagcaaactgaagcggagaaagtctttgagtttgccttggcatccctcttacgtgtatacctcaaacgtggttgttaatttccctacgtgcacatgccttccggcgcgcgcacacacactcttctttttacaccacagacgcacgcaccgctacacacacaacaccacactctcacccccgtgaatacttaacacaaactctaaaactctaaaagacgagaaccagcggcacatcctagatcccacctacatgattagattgtgatttgtgagctattatatgtacgacttgcaaggtataggatcatttaaaaaaaaacaagggtatgaatgttttttcatgttattaattcctcatggatttagctgttcagagttgctctgagataacatgcgctgctatatagtggaacggtataatacatatctattattaattaggatataattgaagaatattcaaatgaaatttggaggattttgatcattagaaattttttcttcatttctcctagctcgtcagctcgtgcgctctcttgatttccctctcgagcatctctcttgcatgaaattaaataacttccttcaaaatttctataaatgttttatgtccttcttccagtgcacaaacccaaaatttatgtgttctaaaaccctataggaatccaaagcttgtgacattcaatttagattaaatttctatttacaaataaataaacacaataagggaaccatgcaccaaattctaaacccaagctagatcaaggcgaactcaggtaggtacttcattgataccctttaatttggaatatgaaagtagctctgggccatttggaggactccgtgtgattttcttttcacgcaagacggcctgtcacgattgagaggggaaactcttttaattacctggtggatgttcacccgtttattgcatgccatctaaacaattataaaaaaaattgacaatataaatcaatatgtaatatatcactccacaaacattaaaattcaacttctacaaattgtaacaaaaataaaaaataaaactcaaattagtaaggtatatttgcaattatattttttatttttgttacaacctgtaaatgttgaatctgaacttgcatgtttacagagtgaatattacatattgatctatcttgtcaaaatttttttaaaaaaaatcataaccatttagttgacatgcaataaacaggtggatctccacccaagtgattagaattcatcttccgatttagaggtttaaattaaggcttttcgccgtaagtttgatatttcataacatcaacttgatcttgtaaggtgatctagatatatattttttataggccgggcaagcttaaaaacagatgatgattaaagtagatataaaataaaattcattctactctatacaccatttaccaagcaagggtggaagttctgaattaggagagaggaaaaccagtagaaggtattatcaatgaatagtcgtacacttgtgtattattgacaggctacatttatatacggagcagtcaataatacacaaatttacaactatttatataagtgtagtctgccaataatatacaagtatatttagtcggatataaaacggatggttgggtcatatgcatcaatttccatagattgctatgcctatgacacggtgaggacggacaacatctcatcatgggaccaagtagatgaaatcatgaaagcatgtatctgcggcgaccctaaatcatagcttgggtgtgttcttttggaggggttgggaatctctcccctccgcacgtaaaacggagcgataaattaaagcatgattaattaagtgttagcagaaaaacttgaaaaatggattaatatgattttttaaagcaactttcgtatagaaactttttacaaagcacacaccgtttagtagtttgaaaagcgtgttcgcggaaaacgatgaagataaattgggaactaggggttaagagtccagcaactttaatttctaagtggtgtatgatagtgtatataatcgtttagagtcaattgcaacttaatttgcaaaaaaacaagttgcccgacaggatggtgcctagacagatactgagggggttgcgttcactgaaagaatggccggcgccggccaaccggaagccgatgatccatcacgctcagcaccacgcaagagatatcgtgtggtccacacgattacatacgatcgatctatgcagcggccgggccactagtcaaagatacgcagtaaggagtacaattggtcgtccatctccatgatcatgcacttacgtgcagtgtaccaaacgggtcatactggctatggctgtctagagatgggccggacgacggacgtgacggctcgatcgatgccatacggtgcgaggggagctagcttttgcacgcgtcgcacgtttccatgcagattaattgtcacagagaggaatgcgagcaacacacggttaatttagctagctcacaattatataatactacatattaatttgtttttacgactatgtattactactattatactttgaccgtcaatttatcaatagctataaaaaaatacttttagatgcaaatctgatataagataccacatgtggtatgcttaacatatgcattattaattagttaaatgatataaatattatttttttcatcttatattttcagacatagggaatttataatgttattgataaataattatatcagaagatatatggtctcttgaaatggaagattttcagagaaaaaattacaagaattaaactagtttatatggagccttgtaaattcgtgtgttctaaataaaccctaaggctgagttcaggtaactccacctccccgcacgaaaaatggtgttccccatcaacatgtgattaactaagtattcgtctaaaaaaccttgaaaatttgattaatataattttttaaggcagctttcctatagaaaactgaaaaaaaaacatcatttagtagttagaaaagtgtgtgcagggaaaacaagggaggtcagttgggaaaaaaggggaagaaaacaacctaaggctcctttgaagctcacggttttgaaagcatgggaataggaaaaatcaggaataaagtgtcctttggaactccaaaaacaactctttatttgaataagcctttcagctcctttcggaacaaagtaaaaatatcaaaattatagatttgtattctgggaaaaaaatctttatagttttttagaacaaagtactacaaattcctttgaagttactatggaatgggctattctaaagtaattttagagtaaaataagcataagatctcaactaatgttttcttcttgtatcttgagctatgcgtttctcctctgtcattgaatcgataattacattttccccctattttttgtgttttggcaatctttaatctagcataattctatgctcattaatcccttcatctcatagttcttttattacacaagacacaacaagtgtgccccgaacaca

SEQ ID NO: 17519 - DNA, 770 bp, Oryza sativa
cccccttaatcatccagaattccatatagaagagctttccgatgcatcatgcggtggcattgacatcgcaatagcaggggaagtattgcaagctactctggcttcagaattatgtgaagattgagaactgcactgcactgacgcacagccctaagtggagtattcttggtacaagtttctgagattgtactaatactaacaaatatttaaacacatcaaagcgtcagtgcaggtaccctgagacaagataatgatagttgtaacgacaatgcaggtataacaacaataaatatcacgacaacgcaattggtacaaccctcaataagcataattaacttctaacagaactatatgtaacatcaatataacaccagaacatggtagagttactgacaaaaatgttttttaccaggtacgcacaaagagtcaacatggggttcaaacccttaatttcaagacatgatcttacacgcaggtatgaagaagacgaatcccagatagaaaccgctaatctgaggaaactcagcaccataaccagaatatagaagaaaaaaaaactaccactcgcttgatttgagcagcaagttcgaaactacgaacctttgacctttacacgaatcatacacaattcaaatgtttcttcagagacaacagtttccaatctgcagtgccaagcaattcatgcctcaattcaattgccctgcaccacattgtcaacatgagtagcaacaagacaagtacggacaatgcgccactggggctgcaggaat

SEQ ID NO: 17520 - DNA, 1153 bp, Oryza sativa
caaaaagcatggtgagatacgattaatcagaaaacaaatgggaattcaacaattaatagcctgggatctaaggtaccatagaacatactagtaaagggattaaagtaacagcaaaaaataaaaggacatgcatttatagtgtgcaaaaaccatacaaaaagagaataattaccctattaggtcatgtttgccgttgctactgaagttgaagcactctatgattaaagggttctcctgcaacagaatatacctggttagtttcatacaaatcattggtcattggccaacataaatagaaaatgcaaaaggatgaagaaagttctcatgccttacttccaatctgttggagattcaagatcactggcttccacttgggattgaggtcgttcttccttacttccgtcttacaaattggaacaggcactccactctctgatattctagatattagtaaaaagggatcctgtaacaagcaaacttagaatggtaaaaacacttacaatacacagaataaacaagtcgtgtttaggtacagagaggcatggacgaactgcaggtacaacaatggtaaatacatacaaaataaaaatgaacaaggtaatagaaacataagcttacactttttgagagaaggtccttgatttcaagatctgaacagcggaataccatctccattattgcttttgaaccagcactttcttctgcctgaacatttagttcaccaaatttactaggatttggtaggttatgttcggaaacgccaagctttagagtcaacagtctgttttgtttagtgataacctgcaaaaacatcatgatcttgtaaaaaattaaaaacgccaagcatctaacataaggagtaatcttcaaacagactaataatacaggcttttgaattggcgttactcttaatctgatacaagtgtaactttgcaatcatgaaaagagatgtgctcatagtaaaactacaggaatttatgggtgttgttttgtagggcaccaaaatggcagaagctatatatacatgcatgtgacaggatgaacctggtctataacagaaacagtacagaacagttaagttttccttcacaggttaagtttccttttacctttaaattatcaaaacaactccaatagtgtataaatttcatat

SEQ ID NO: 17521 - DNA, 6844 bp, Oryza sativa
ctgtgttgaatatcatattagagtaagtattgtaaagtaactgaaagaagaacgaaagaagaatgtgctcaatagtccatacatcagatgctctaacatcctagaagaatcaaacttctgcatttaaatgtagcttaataacatcagcacaaggaaatgctagggactagaaagagcaaactaaggtaattcaaatctatagttatcataagcacaagcgttaattcttagtatggagtttattttatgttaggcataaaattaagacttcattcaacctaactcacaaataactgaatttacgctacatttatccctgctgaccaaagggtccctctaacatgccagatcttgtcatctttggactttataactggctgaatggacaaaaagatatttgaaagcaagaacgaaaacaactaaccaaattaccttttcattgacatcatgaaactgtggatcaatgtcatatacctgaaacctgtaaagaaagttagctgttaaaagaatagcataattaatgggtaccatgtgacaattttacagtaaattgtaacagacgcttacacaattggttgaagaacctcaaactggtagtgcacgttgattcttgcattccaagatgggttcaaagaattcaatattacttcagtacgcccaagttcttcaagtgctccttctttgcttttagaatatacaatgaccatgggattgctctgagaaaagatgataaaatattaagggaagtataactagatagcacaagcagaattcattaaatattcaggatggcatgcatgtcaaaagaaaggtgactgcaactatttctgcacaaatattcaccgaggcttccatgataatggcatgggcgctctggtttgtaaacagatcaatttgtaatttgcagttatatggactatgtcttttggatatggatggatatttactgatatcacgtattcacgttaaatttggttgggtgtgaattatgattggatataggcacgtagcatggacttccaaaatattcatctgtaggttttacaaaatagtctccggacggtaggagccaccagcatgaaacttataacaggtaacttagaaggcagctcaggcagccaacaaactagtatatgcaactgttcaagctcaagtatgatcattgccaacaattcactgggtaagtcttagtttgccaaaataccaccatggtatgacaatgtcaattgccacaggtttgtgtgtttgggagacaggaactgaacggaggcagtagtggagtagcaggttcaaaggaggacaagggtgacaccctcatctccccagcaccatggaaagctaaggggtaaggtattcagggatagcatgcctataaaaatatgtcaagttgtcaacacaccaatgaaggtggaaaatgggatgagaagtgagtagtccagtatggacagacatggtagcatgttgacaactgatgtggctttctgacagaattgcagtttttttttacaagtattgctctttaacatggtagctctcagctatttggaattcgaatttgagtttgtggttccttgatagaagtgaaaataaagttatgggtttgcaaaatctattcacaataatttctctaaaaatctaatgattcttaactaatcaaaaacagagatgtcatgcaatagtaatgctcatcgtagatacctaacagaccagaataccgatcagttataaactgaaataagaaaatagcaaaactaacaaaatgcaacaagtgaaaacctggagcataccttggtaaagaattcttggtcgcccaaatttgatgcagagagagataactgtttcaacaggttatacagagttcttgtcaaaataaaacacaattaaacacaccctcatcagttcggtaattgcatttctatcagtaaatccaaacaagacataaatttatacaatgcacatgcatcataatagtcatcacatgaagcaacatcacagtattaaatatttgaagtttttggattaactaccaggtcaggtagtatgaaatgacagaaatacttagccacacaacttgcagactcccaagcgttcaggcacaaaatcttactaataaaccacaaatacagtaaatcatcttttacgcaacgttatcaattagaagaacatcagcagccaactgctgcagccgtcagaacatcagaatgttcagtgccgtgtcaaaccaagagcacacggcatgctcagatttcacgcccgctcccaatcatcgtcgtgtaatggttttttatcccgatcaacacgaaatccctcgggttttttctcctttttttttgtttgtttgtttgcaaggctgagaacaggtagcggagtaaattagctgaggcacagaccacacgcatccgctagtcccgtcgctgcaaggcgcaaaccacgagactcacgcagaacggcgcgaaactggagaaccgccagcgacgcacgcaaccgaagcgcacccggcgcaatggcacggccacccacgcgcgctcgctcgcgagcacctggcggcgcgctactactactactactgctatggtgtgaagcagaattaaaccgcatggatggggcgtgaggcggtgtgtgcgttgtgtgtgggttttccgcacctcgacctgcgtggacgcgccggcgccgcgggagcggaggaagcggtcggccgcggcggacgcggcctccgccgccgccgcagccgcggccgccgcggggccgacggagtggcggcccgcgtggccgccgccgccgcccatctcgtcggagcagcagttccccatggctagtggctctcctcgccgtcgagcaggagggggaggaggcgagcgagatctaccgccgacgcatcgatctggaggtgggaggaagagggagagcgagagcgagaggagagcaagtggagtcgtggagacgacacggagactttggacccctcaaacactaggcgaggccgagacgcacgggaggggaagggacggcacggcacagcgaaacggggcggaatttacggctttgtccctgttccgccggggggggagtggggcccggcgtccacgttcaaggagagaagtttgactttggttttgactggcccggggagttgggacttcggacttgggaggactggttcctcgtggcaattagggatggcaatttcccccgcggggccgggtcccctgcggggacccacccctacgggggcgggggcggggccaattttcgacccgcgggtgcgtcggggacggggccccgcatttgggcggggaggggacgggggactgatttcacccgcgggcccccggggagtacatataaatctcaaaatatagatcaaagaaagcccaaaaagcccagcccactaaaaaaatccttaaccctagcagcactgcagcacagcagcagtgcagcacatccctcagtctctctcctccccacatccattcccctcccctcccgtcatccactcatcccgtgcggtgcggctgtggcgtcgcctctggatctcgccctctcggcgtcgccggcgcctgccagccgccaggccaccatctcctctcccctcctctccagtctcccatccggcgtccggcggctcgagctcgtcctctccctccggagtcagcggcggcggcacacagggcggcgccgcggcgggccggcggcggcgcacaggcgcggcggggaagcgacaccggcagcaagggcgcggccggcggcgcacagggcgcggctggcggcgaggttgcagcacatcacaaagagtgagaggtattgctccatctccaatactccaaatgtgccttgtgatttgtgaatgaaattatgaaacagaagattgtgatctatttcagtgtatatttcagtgtatatttggtagatttggtagtacatagcacatagcagcagattgtgatctattattgaattatgttatttgtggacagaatgtcgaaccctgctgccaccgttgagtcacaagttgcattgacaccatcttccacttccactcccactccaaccaatgctccaagcgtcgaaataaatgattcacaaggtacagaagtagaacatgataataagagactgaaatctgcagcatggcaagattttgttaagaagaaaataaatggtgcgtggaaagctgaatgcaaatggtgtcacaacaagcttggagctgaaagtagaaatgggactaaacatttgttagaccatattaaaacttgcaagtctaggcatgctagaaaaggtctaacacaatccaatttgaagatgggaatagatgcagaagggagggttaccgtagggaaatatgtctttgatcaagaggttgctaggaaagaacttgcactgatgatatgcctccatgagtacccactttctattgtagaccatgttggttttcgtaggttttgtggtgcattgcaacctttgttcaaggttatgaccagaaacacaattaggaaggatattattgacttgtttggggttaacaagatttctatcagtaattattttcacaagcttcagagccgtgtggccattactactgatttatggacagcaactcatcaaaagaaaggatacatggcaatcaccgctcacttcatcgatgatgaatggaaattgaagagttttcttttgaggtatattgaatatgtgctgcacattatgctatatcatgcttcttacatttgtttaactctatactaatgttctcttgtggtgttttatgttttgtaggtttatttatgtaccagcacctcataccgctgatcttataagtgaaattatttatgaggttcttgctgattggaacttggagagtaggctgtctactatcacacttgacaactgcagcaccaatgacaagttaatggagaacctattggggacaatgctagataagttgcctgctgatactcttatgttaaatggttcattgctgcatatgcgttgttgtgcacatattttgaatttgattgtgaaagatggaatgactatcctagataaaatcattgagaaggttcgtgagagtgtttcattttggacagcaacaccaaagagacatgagaaatttgaaaaacaggcccaacaaataaatgttaagtatgagaaagtaattgcccttgattgcaaaactagatggaattctacttatctcatgcttagcactgcagttttgtatcaagatgtctttacaaaacttggaactcgtgaaaaaatgtatactccttattgtccatcaaatgatgattggaagtttgctagggagctttgtgatagattgaagattttttatgatgcaacagaggctttttctggtagtaagtattgtactgcaaatcttttctttcctaaggcttgtggtatttatttggatatgagaaaatggtcaactagtgttgatccaaacattataacaatgactaaattgatgtcagccaaatatgagaagtattggaaggatgtgcatggtattttggctattgctagtgttttggatcctagatataaacttcatatgttgaatgctatgtttatacaaatctatggagaagaggtggcactaagaaaagttaatgctgtgaaagaagacttgtataagttagtgctacaataccaaaatcatgttgaggagggtgttggaacttcagatggagttaatgcttcttcaagtgttgcccctccagggggatttgatttggtggatgatatatttgatcagtatatgtctggacaaactgttgcctcttcctcacagattcgcactgagttagatttgtatttggaagagaaaccgttgcctaggacacaagattttgatattatcaattggtggaagtttgggggcattaggtacccaactttgagacagattgcccgggacattttggcaatccctattacaacagtagcatctgaatcagcatttagtactggtgggagggtgataactccaaatcgtaatcagcttaaacctgatcttgtggaggcacttatgtgtgtgcaagcatggggtcgtgctgatatgttaggtaatttcatttttgcttttgtatcgttcaagtttaatttgtcctttcatgtttcttccatttcatctaattgcaaatcacattatatgttgatagctgaaattgctaacaagaccaatgcattgaacacggtacttgacgatgaatcagaatcggtatgtcctacactcccactttattgtttttattactataacatacaatgcttagttgcttcctctaattttgatttcaggaagcatctactgtcactgaagcttgaggtggagatttcataagtgaaggattgggctagaaagcctgcattgcaaactatctacctatatattttattatgttggcaatgtaatagtatattaagacttctatatttctgtgagactgaatttgcttgctgagttgctgtgtgtgatgtgttgaacaattcaactgttgaactttgaaggcttgattcgcttgaacagttgaactcatgtgtgttagtgtgtaactgtgtgaaatgatggatatcatcaatgtgttcttgctgaatttttatgatgaaattgaagtattcatgctatttttgatggtgtgttaattatgtacaatatttcttttgatgaaatgatgattgtgttgtattttttgagctgattggatggagatgctacccaatgcggggccccggtcgggttgcggggccccgcaggggtcgggggcgggggatgttttcaacccgcatcactggtcggggccgggggcggggggtgaagtcgggggtcggggtcgggggcttt

SEQ ID NO: 17522 - DNA, 1669 bp, Oryza sativa
ctttggctcataattttacactacaaacaattaaaaatggttcttttcacttctttaaaaagaacttctttatcactatttacctaggttgggcgtaactaagtctagtatttaagcaaacaatcataaaaaaataaaaaatgttttcaaacttagataaatgtgacatctatagttgtaaaatgttacaacttaaagtatactatcttatatgaggagagaaaaagaaagataaatattattaggaagtcgagtggaccattttcaatagttgagggtaaaataagccaaaaatggtttaaggggttaagcatttttaatggtctggtgtaaaataagctaaaaatgatttaaggggttaagtaatgcaatgaaataattttggggaatgaaaatgaccaatctttaattcaagcagatattagaccgacgtagatgctaaatttacgatttgctacatcaaatttgaattaattttgttgaagaaaagaaaggctaaacagaaaaaggaggctaagcatatgcacatgttacctttataaatagcctcctgccttcctggaattaacaaccacgcccttggcacatttttccttcaccccctcgcatcatcaggaatagcaaatcagcccccgcctctcttcccgcctaagcttttgacgccgccacgatggcttccacgtcaggcacagcaaaagaccagccggtccatggccgcgccacccaacgtcgcgagtccacctccacctccaccgctgcagccgagggcggcgccgtcgcctcgcagccgccgcgcccgcctcagccccggcccggcaccacccgcccgccattatggcgtccgccgcgttggccatggggctccagctccagcgccgccaccgccgcggcacccggtggtgcttcgaccgccgctgcagcccagggcggcggctccgctgcctctcgcccgccgcgaccgccgcgcccgcctctgccgccgcggccaccgcgcccgcccctgccgcctcttcgagagcccggagagggaggaggccgcggcgacggccggggcgccaccggcaccggatcgagctccgccgctgcagcggtcgaccggaaggggaagaagaaggtcgacgaaggtgatcgggatccggaacaggtgaatggctcctaccacctcgcattcctgtgccatcatcgcgttttgggggtggatttcgatcctgttcttgagcgtttcttggtttggttttcccttgaaggcgctaaggaagtctggtccccttgaagggaagttactccagagcagcattcgtgcgtatcaagggccccccgccgccgagaaaccatccggcgcgccgccggcagcaacaccccccgcccgcaacaccggccgtctggggctctccgaccgtgaggcagatgatgccttgaacgatatcgacctggcgatggtgcgtatgccatcgattattctgggcatcttgggagctttgttgttctaattgttcttgagcatttcttggttggtttctctggagtaggccaggcagctacctgttgttgataccactgttcagaaggaggaggaagagaaggagaaagagaaggagaaggaggaggaggaggatgatgacgacgatgaggagggggagctgctgtcgcacgtttccaggagaaagaa

SEQ ID NO: 17523 - DNA, 5369 bp, Oryza sativa
attcctgcagccctaaatatatgattgcaacataagctatattttattatgtgaatatatacaaatggcatatttatctatactggtttattaaaaaaataaaaatcatatattgttatgtttgttaggagctcgagcttgactggacaaagctcgcaagctttggtatacgctcgggctcgactcgtctggaactccagtcgaggttgaaactagcctaggacgaatcgagctcaagcagcctgtgagtctctagcttttctgatagccctagtccatgtaagttactttatgggtaggcggcacaatactatagtatacgataccaaagatgtctcgggcatgacccatggttataaattatctgaaagaaaggttccaatgaaagagaatttatgattgactcatatgctatgggtacccttcgtgtttgctacttaggctggttataaaaataatactattagatagctgtttgagagaagataattcattttggaccgactaaagtaaagggataagaacacaagtatgagcaataaaatgctatggccatgcataatgccttaaaaaagaaagagtaaaatgcatgaatgaccatttaacttgtttagatttatcatgcaggtcattctacttttagaatacacatttagatcactattttaagttaagctaactattcatatgtcatctatgattggaaaaatgcttttggacttggcaatatacaaaattagaagaactaaatcatatcacttgggcatgttttaatgagttctcttagttcttagtcctctctctcacttaccatcaatcccgccaacggtagcggccgataggctgaatataaacagcgatggaaacaaaatcttaggaggcaccgactaaagatgtccaggtgcaaatttttacaattcaaggtggcatgctatgcgtaccaggtgtgctcatatggatagttagatgattaaatgacacacttaactcatgttagtgattaagatgtacattttaaaagtagagcaatatatatgacacatccaaacaagttgaatggctctccatgtattttactaaaaggaaaattcaagaggtttagggccaacacaaatattacatcaatacaagtcacaatatgaatgaatttctctcgaataattgattttcttttacacttaataagtatggttaaataacatgaaagaatgttattccatgcaagtgaaaagagaatgttttcataaaggagggtttcatttgaaaagattaggctgatatagtaatataaatgctaaatcaactaggattttgccacatcggatttaaattacttttattgaagaaatgaggaaaaactaaactgaaaagaaagaaagaaaaataaaaaccccgtctgctggactccataggtagcaactgcctacgaatgctacatttataaataccctcctgcctttccagaattgacaaccacacccttgaaatatttctcctccgccccctcgcgtcagcggaattagcaattcagcccctgccactcatcccgcctaagtttttccccccgcccgccacgatggcgtccgcgtccgacccagcagaagtagagctccatgggcagcgcgagccccacgcctcgagctcctccaccgatgcttcgatccccgcgccgacctccgccgccgccgccgccgccgatgtccctccgcctccgtcgtcgtcgtcgtctccgccgccgccgcctccctcgtccgtcgagggccgcaccaagcagcccggaggcggaggccgcggggccgacgccgcgtcgagcacctccgccgcggcggcggtcgagcagaaggggaagaagaagatatcggcctcggatgatcgggagcaggtgaggattcctaaatcttttgcgttcttgctgtcattgcgtttgtgcctggcatcttggggttttggtggggttttttcttttttttgttcttgagcatttcttggttttgccctgaaggcggaaggggatgaggaggagaggaaatctgattcccagaagaagaagctagccgggaggaggaggaggaggagattaaatcttgctgcgtatcaaggcgacgccaagaaaccatctgatgatgtcaacctggtaatgatgctgcgtattttggcatcttggagttttggggggcttttgttcttgagcgtttcttggtttctatggtgtaggccaggaggcccgggaagctaccttgggatgatcccagagtttggaaaccgcatgtgacgcccgtttccacggtaaagaagtcactcgggattagcatccttgtctatatcagcaacaaggtaaggagaagtttctgtttctgttcttggctgggctgagcattcttgcgccaaaattttgtgccctgtttgtgggattggttcctgccgttcttgtgaggaaccatggaaaatcttgcatccttgcttaggtgccaatttgcttgttggaaatgttgaactgggatctttgccctcgtgtttctgtttattcgtgtgaaatcttggatgatttagtgcaattgagcgaagatgtcttagctgaaattatgatgcactctaaatttgggtagagatcattagtgatttcagggaaaatttggctttctgttgaaatacaggcaatgacctgcttgggaaatacaggcagtgatcttcttgcttgcattggttcggcttgctgttaatgtgacgtacttttcatttcactgtaaaaaacgagcaatgtaggaaactactgtatcatgtcattattactgcgatatcatggcatgttcactgttattgaattgtgttgtaggaagtcaatctagatgtatatttgggattgcattactgaacgcaaattctatattattgatcgcctgtatgtaaaaccagcgatcatactttagtgttcagttgaatagattcaacctctgattggttgctacttgaaattggtgggaaaacttaggacataaatggcaagcgcagaccaattctagaaatatcagttttgctctcttgctatatagttttttacaagttccatgcacaaaatgttttatctttgatgtaaattctttgtagtcagtgctaattctgccattctatataattttgaccctttttttttcttgtgggttagtttttacgtagaaaaggaagtccagctgggttctccaatctaaaatacaagcagcaacctcttgtgcaacatcaggtttgactctttttatcctttgataatgttgaaattatcctttgataatgttgaaagtggatgtgtataaattataaatgtcaggattagaacccttaaacatgatattgtggatactcacgaatttttgtttgccactaactgtttgatcaggctaccttttcttgtctagatactatcatactagttgtgtttcacatgcaattgattgcactggattgccgtgggacattaaattggcctagtgctctttaattttgtgagggacatgatttattgtactaaccaatgaccgttctgtgtcaactatattcgtgagtgatttcaagcatttgtcagatagtgcagaaaccagaaaactggaatgcaagattacattgcattttagttctacatgatcaaatgtccataagttgaatcccctcatttgtgtctgttgtgcagaaaattcccctggcttctgcccctgaacattatgggctgcgatcaggtttgcggcgaattatgtctgcgaatttgctgatacttctcaacgagtattcagattttaggccggtgcatggagatggggaatgtttctacaggagtttcatattttcctatctggtagcggaccagttatcctcctccctgttccttagcatagcatcgtatgcttcatgtttggtgatttattcctttatttggcaggagcaagttcttgacatggtgggcacagatgaggaaaatcgcctccttgctgctgttggagcaattgatcatcgtcaatgggcctctggattttctcagagccacaaagtaatcactcgccttctctgtattgtttttttgttcattctgattgaaaaatgcgtttcagagacgactctctccgcgaatgcttgtaacgttttttcttttagttaggccctttacttaatgtttaactatcacagcttctcagacaagttatcctactatcttcattcttttctaaatatcgatgataagcattttgcaagcctcattgtaacctgttaatctccagtctgtgtgcgaaaaatgccagctgtttgtaaggtttaacatgcacggttattgcattactgactctcaggtatttgagaagctgatacagaacgtgatgagatggaagaggagacagaagggtgtagcatcagctgacaggtgtttatatgcttggttcctacagttccaacagagtgttgtttgtaaatgcatcccatcccactgaccacatatgggcgcttttttcagccgtaggcagaaacttctcgagttcttcagcagttacagcaagtcggatggcagtaagaacaacatccttgagtctacgttcctttgattcatcctaattcttggttctgaaacttcttttttgtcagttttggctttcctcaaatatgcagcagctaactggatatgctcgcacagagaggagtatgaaccgaacatagctgggcttggaggtggctacaccctggaagctgttagtgccaatatcacttcccttgctcgtttctgaacttgcaacaattccttaacacttgatactcatttcactgtacctgtttgcttgcaagcagtggtgcgaaatctatcttcttcagcctcgtgagcaaactgaccatattcagatgacggccgtggcagccgcgcttggggtgcctctccgagtggagaacctgcataatggaccagctcaagatatctacactgccgatggcgttaacattcctcgcgtcaccttgctgtacacaggcgtccactatgatatcctttacccacgccatccttctggtgggagtgggagtaagagctcgacacaacgggctggttgctttcgtcccttctggtagggagagagctgagtttgattgctgcagatgagtatgaacattgccgaaataggtggcagacaaattttgactttttggtgacaaggagaagagaaatgtgatgatcttgattcttttgcaacttaactgtgattaagttctcttaagtgtctttgcagcagaatattttttcatgtagataaaagaaaattatattggaatcctgattggtttggttgtgctgaccaacttatgcacacccttgttgtccatatattgaatatttgcctgga

SEQ ID NO: 17524 - DNA, 1257 bp, Oryza sativa
ttgtattagttgacatgactgctaagtttcgctcattattcctattactttggtgttgcctcttagggaattgctcaaggctgtatatcgggcataagctcgtttgccagcatattagctccactaatttttacccctctaacaggtatttttttcatttgtaaataaatcctagtttataacccttgtttcctttaatttactccatagcttttgctttcttgcggcagcatgggtcctttcagaaacagcgccattcaaattcaaaggtttcagtatcatgtgtgctggcttttgtacggtaagatttcaactgaatatgttcagtgcacactttttatgccatactaagaatagagtatatctactctgcagctcattgccttcattatcagcatgaggatgcgagcagggcaatctggtgcaagtgagatgttggccattgtgcagcatgagcaagcatgatgagtatgctagtagattgtaaatttggccaacctgaaaccattgtaaatttacatactgtacattgtaaatttggccaacgtgaaaccatcccattgtctactatcctgatgggcgaatgactattcccctattcctctgcaaatctccatcagggaagggaaggattcttcttcagatagtaaattgacaactgctatgtcatagaagccagcccagcttgttgtaatatcacctagtagtgtatattgctggaatgatggcctacatatttcggccggagcttcagacatgagttaatgccaatggtagtacagatttcaacagcaagtaaaattttctagaattagcaggattactgttagcatcaacacttgttccattacaacggattggattttacctcgtgttaccaatactactaccacccccagaagtctagtttcagagcttccaattaacaatccacgcccacggtatcgacgcagcgtctgaatgcaagggcccgtggtcacctcccgtcgtggtactcgcagtcggcggcgacgccgtggacgggcttgccgaggcttgcctcgcggacgtcgaggcggcagaggacgcggcggtagaacttggagcggacgaggaggccgaggatgtgggcgcgcgcccgcagcacgaaggccatcctgacgggcaccaccgcggggccgaggcggccgttgttgggcttgctgtgcagctccgcgccggcgccgtagagcggcacctgcttccccaccacggacaccgtcaccacgcgcccgctcc

SEQ ID NO: 17525 - DNA, 564 bp, Oryza sativa
gactgctggcatcacggtcggaatggcataggagattagtactccactatagtcgtgatagaactcatgttagtaatgaagagcacagtacgaataatcgggacaaccctactgatccattgtacagagcccagatccaactcttgattcacccgtttgtttgtgagttgttacgcagtaactagcaataactaccatcgatttacgccagcctaatcaggcacggaaacgtccgcatcacctacccaatccattcagattcaccaaacgtaacgaggatggcataggcaaattcaggtagaagtacgagcagaaaggcgagggttggggtggtggaaagggcacgtacgtggccggtggcgacggtgaggtcgtcgtagaagaggtggaacggcgtggaggtgacgtgcaggctgaagaaggtgccccggttgcggaagcgcagcctgaccgtcgcgttgacggacatcatcttggtcgggacgcccgtccggtccgtgccgccctggatgtggtacgtctcgaacaccacactctacacacacatggagaggaacagcaaat

SEQ ID NO: 17526 - DNA, 729 bp, Oryza sativa
aagccagtctccaaagaactccagggttaagcatgcttggcttggagcaatttgggatgggtgaccgaccgggaaattcttcccgggtgcacacgagtgaggacaaagtatgcagaaaagatatgtgttggtctgcttggcctggagcaatttgggatgggtgaccgaccgggaaattcttcccgggtgcacacgagtgaggacaaagtgtgcagaaaagacatgtgttggtctgtgagggcagtctatgacctatgaaagctatcagatgtaagcgggcccggcctgggagagggagagaggacgttcctggcttggggttgatcgacgggggcgtcgatctctcttaagggggtgagggtgtaacatcccggcctagggcttaataggattaataaaatactcatatcaacaagttacaacctatgaaagctatcagatgtaagcgggcccggcctgggagagggagagaggacgttcctggcttggggttgatcgacgggggcgtcgatctctcttaagggggtgagggtgtaacatcccggcctagggcttaataggattaataaaatactcatatcaacaagttacaacttcttttccggaagccaatctccaaagaactccagggttaagcatgcttggcttggagcaatttgggatgggtgaccgaccgggaaattcttcccgggtgcacacgagtgaggacaaagtatgcagaaaagatat

SEQ ID NO: 17527 - DNA, 2074 bp, Oryza sativa
atccatgtatgagttctataacgatgttgtcacacttgacacatcgtatgtggtcggtaaatatgatatgcctcttgcaacttttattggggtgaatcatcatggccaatctgttttattgggttgtggcctgctttcagatgaaacagcagaaacctattcatggctatttaaggcttggatagcatgcatgtctggtaatcttccaaaggctatcatcactggccactgcaggggcatccagagtgcggttgctgaggttattcctggagtccatcatagaatatgcctatttcatataatgaggaaggcgacagagcgattaggtggtctgtcggagtacgcagctatcagcaaggctttccaaaaagctgtatatgattctttaaccatagatgagtttgaaggaaattggaatgctctgattacatacaatgggcttcagggtaatgactggctaagatcaatttatgagtgccgatactcatgggttcctgtttttcttaaagatacattttgggcaggaatgtctgctacacaaagaaatgaaaatatcattcctttctttgatggatatgtagatttgaaaaccacattgaagcactttcttgggaagtatgagatggccttgcaaagcaaatatgaaaaggaggcccaagcagattttgagacattccataagcagtgcccacctgtgtcaaaattctatatggaagagcaactgtccaaggtatacacccataacatcttcaagaaattccaagatgaaattgaagcaataatgtactgccatgtatcttcattaatgttgatggcctcatatccacattcgatgtcaaggaatggattttccttgaagatggtaaaaggactatgagcaagatctttacagtgacaaataacacagataaaaatgatttaacttgtatctgtggaggtttccagtttaatggaatattgtgtaggcatagtctctcagtcctcaagtttcaacaggttcgtgaaattcctccacactatgttcttgataggtggaaaaaggatttcagacagttgcatgtgatggggcgtccttcaagtgatgttgttccaaacaatcgtgtggatcgatatgattatttgtcaatgagatgtctgcagctagttgattcagcagtcctatcagataaatatcgtcttgctttgagattggtgagggagatggagaagtttatgttaaacagcaacacgcatgatgatacacaaccaaggatcaagtctcgcattcctaaagcaaataaaccaaatacagtggttggtcaaaatctggtaaacgttggcacttacaatggaaatgataggcccaaagcaacaacagaggtatctgttcaacctgtagttaacattgtaaagatgcctattatgttggaagcattatggtaaataactatgagaataatcatcttaacccactgcctatctgattgatcttattttgcaagatgcaggcttcttcattaacacagggattggatgtccagaaggtactacatttagctatggcatgagtaaattttggtgcattatcctcttataggtgacatttgttaataaggatattgatttctattttttttttaactatagggaggagcagaaaagggcatagttcctgctggttacattggactgccagctaatgttcagcaattcgtaggcagtcaaacagcgattcgcccaagcattgtgtatatggttccggtatgtcaaagttacaaataactatatctgctcaactgtgccttgatagtatctacagcaccagaggaccaaattctaggatatttggttgcttttcttgcacaaacatatgtggattcatacaactcatctttatttgttaatgcataagccccaagtactcatcatttttcaggatatgtgctgtgaaattgattctttcttatttaatttttcagagtggtgttgacccacaggcatttggaaatggtgttctgatgcctgttgtgtaccagcagatgttccaggtttgtatatttttgtgttaggacttgagaagttaatccgttcgtct

SEQ ID NO: 17528 - DNA, 5324 bp, Oryza sativa
  unsure (1)..(5324): unsure at all n locations
tcaagcaatacttgaggctcttctagattcaataaattatctgccaagctagttagccaagttaggtagtgtatttgtacatagaaaaaatcaaaagctttcttcttcgaccttgaaattcaaatccacagaaatatttcaaaagtaaaagcaatctggaaaagtctgaacactgtgctctttgaaatacatacctcagatggaaaaagcacatgatcaaataccgcgtctggccagtcgtgcaatgctgacattattttctccaccttcttcttgacacctgtgtagaatgaacaataacaaaacaagttatctcattatctgagcctactgaaagcaaaagggttctatggcatattgaactgcaggaagtgaactcttacgtttgtcttgactgtccttttccaacttctgagaatcattcccagtgaagtgggtgccctccaccccatccttagcccattcatgacattttgcggtctcatcagaaaagattacagtcttcttcactgggttcttggtggcctcatggctgcgaagagcagtcttcttcaagatagtgccatcagaaatgttgcgccctcggggcttggcggtgttggacacgtcctgcaggggcctccgcgtagaccaccggggcttgccaatgttggatacatccctcagggccttcttctcttgaagcccttgctntgctgctaatggcttcagtggcttggccttcaatccatcagccctcttgccagcaggccctgcacacatggaccaaacatgtcagtcatttaaccacaggagatcctccttgtgatgaattagtcagatcaaaagcagccttacccctatggatatgcaggttctcatcaagaaaaacagctgttgcagttggggcagccatcacaaatcagcaagcttttcttcctcaaacttgcctgaaaaattctaggtactgagcaaagggggaaaagacaaaattgctagagaaaaacaataagcagtatatattacacattttgttctacaaattttgcacaaggtcagaaaaatattagttcaacttgtagcataacaacatatggttgctgaaggaaaccaggatttcacatacattctgcatgagtccccatttctccaacagattttcagcaaaatatcagaaatattttgctttgcgttctaaactactccctccgtttcataatgtaagtcattccaccatttccaacattcatattgatgccaatggatctagactatatctatatagattcattagtatcaatatgaatgtgggaaatactagaatgacttacattgtgaaacgaaggaagtaacagattagacggcgcacctagagtcttcaagggacacagccgtttctccaacagatttgcagcgacagctcagaaatattttgctccgggttccaaactaacagattagacgacgcacctaaaatcttccaagggacccgagccatacgtatttcatgaaattagcaggagcaaacaaatccccaataacatgccagtttgcacgaattggaccggaatgttgcggataacctagggtttggattcggtcaccaacaaccatgaaacgagcaagatagggcaaaattttcctcgatgacgggaaaaaaaaattcaagacaacgcgtgaccaatccaagagaaagccccagtgcttacctaccaggtagaagagaaaccccgctccggatcgatctccgcctaaactccggcacagcggcgtcgaggacgaggaggagaagagcgcgcgggggcggcgggagaagggcacgatcgcggttcgattcggcggcggcgcttctcgccttggtcggcgtgggggttttgcgtttcttggcgtggagaggaaaggggaaatttttttgctttgcgcgtgggagagagaaggatcgggaagaggaagacgacgtaaaaggcgaggcgggcggtgcaacggtcggattctggatgggccgccgacttaccgttgtgacacacggcccatctacacgggctcctccggcccatataaatgggcttcaccggcccaagatggctcaccgaaaccctaaccaggcagccgccgcgactggctatatatatactcatacttgctcaggagtagagacaagcatcgccggccgccgctcctttcgaatcatatccattatatctctatcgtgtgctttttatcatcgtggtttgtagtcgtgtgcgttttattttcgtagtttgtgtaattggtttgattcgttgaattttcggggtggttttgagttgttcgtttctttcgatctggattttttttttgggggtgcggatttgcaagatcagcttcttgtttggatctcgagcacacgcacacggtccaggcaatcggcatatggtctgccatcttgcgagattgaaatcgagccagcttaaactcacctggatctgaccctcggtgattttctgggccctttcggctggcacatgcccctcgtcttcaaaatattcgagatttgtctttttgttcttggttattgatctcgaagcaaagcaaacgcactctgtcccaagacttgtcagtgttttgtggcaatttcttcgtttgcgagaaggatgttccgagaatctcgtacgccggtgaggtttcccgtgatctggccgaggttttctggatacattcaacgcggaaagctgcttttaattttgttccaatttgctgtctttgtaggtctgcaccaaattcgatctgaatgtccttgtgaagcgtgaaatcaaatttggaataacatagtacggagtagtgcagaaccgaaatccgcatgaaagtactctgtatctgttgtctgataaactgagaatttcgaataaaccggaacataagcattattattatatgaaaaacggagcattgaaaatttcgttatgaaaaacggagcattgaaaatttcgatgttttgctcgtctggtagacgagaagcttatttttcgaagatatatcttccaaatcccaattatgtttgcgcctaattcagacgctcccactccttgagggcttgccggctcgtttacctacattttttgatttaccgaattttattaaggtaacaaacttttgccaactgccagtgtcagtttgtcactatcaacatttggtatttcaggaagtttacttgtgtacctatacaaaaatttagaaagattgcaaactaaacacatctaacattgacaaaaaattattaacgagtctacccagattttgcactgtcaaattttaagaagattaatttatcaacaaactgaactagggcttaagtcatggataaattcactcgcactcacgggccaacattacgctcaactggcttgtgggcctaaattatggctgctggaattgctcgaactgatgggccaaaatgaagaacatttgtgggcctgaatgttatcatatcatccaagatttaaatttagaaagattttgaagttttttcatcaaagttaatgtttcagtctttgcttttagattattaataatacgtatataaaaattttatttacaaattacttctcgtttacaaatatgccgagctccgaatagctagagacgatccctcaaaaagaaaaaaaaattatagccagagacgaacatacaagctggacgcatttcttcaccacggagttgatttgatcgatccacagcattttcagcggaatatcgcatgaaaatggcgtttttttggcaacacaatcttgaaatgctcgaagccaccaagtcctccaccaatcgctcggcaccacccaatggcgggcagccaccacgcatgcacccacctcctcacctttgcaatgcccataagaggaggccagccttcacgccttcctccgccatcccaccaccaccaccaccgcggcctccgacgcctccctcccacacgctcccctgtggccgtacgtgcagccggctgcaccaccagctagcggcggcgggcgccggccggcggcgaggggatggcgtgcgaccagcaggcggagctccggcgggtgttcgagctgttcgaccgtgacggcgacggccggatcacccgggaggagctgacggagtcgctggagaggctcgggatgcccgtgcaccgggaggagctcgccgccaccatcgcccgcatcgacgccaacggcgacgggtgcgtcgacatggacgagttcacccagctgtacgagaccgtcatgcgcgtcgacggcggcggcggcggcggcgcctgcgacgtggatgaggcgagcatgcgcgaggcgttcgacgtgttcgaccggaacggcgacgggttcatcaccgtggacgagctgggcgccgtgctggcgtcgctggggatcaagcagggccggacagcggaggactgcggccgcatgatcggccaggtcgacagggacggcgacggccgcgtcgacttcctcgagttcaagcagatgatgcgcggcggcgcgttcgccacgctccggtgatcggcggcgtcatccacgcgagcgtcgttgtatcgtctatatacccaacgtacggtcgattgtttgttttaacatagcttgtgcatgacagtttgtatgagtgtactacgatccacacacgcgatcgaatttcgcagaaaatgtattgtgatcataagccgataagtttcggaggtggtaaaagcataaagcagccgctataattaagaaatttaatttgatttcctgatgtgcattttcaattacgtactgtttgatccacggcaggcctgcaagcttattgcgcataattttcacgtatgacccaaaatggaaaaatgatgttcctggcagaaaactgataatctattacatttgtaattgtactgaaactataactatgatgatataacttatatataactatgatttggttagctaacacccgcaatctcgcggtgtggaggttaggagttcgactccttgcatatgacctgaatctcaaggtgatctgatggctacagtatcacatgaaaaaaaaatcacgcattacatttttcatcactgttttaaaattcgacttaattattttcaaatttaagtatgtttctcaaaatccaaattaattatttccaaactccatgtgcaatccaatgttttgggcctgacaaggccgcgcagggaagcctcctcagccggcccattaacaattcacaccctcgacgacggtttgccctctctcccgagcccgggactccggccgccacgtgcgtccacctccccggcggcgccaaaaccctaggcaaggaggagagcagcgaagggaggggagagtcagagtccaccatggag

SEQ ID NO: 17529 - DNA, 887 bp, Oryza sativa
gcgacgtggggaagtcaatgccgttgtgcgggaagtttgcccgcggcacggcggcgccggtcaggtagttgttgttgccgacatcggccgtggagtcgccgaacacgtatatcgccggcaccttcgccgccgccgccgcggtgatacagatggccacagcaacaagcgcaatcggcggtagcatctgtccagccatgccggactgcgaggtgcagtccgctggctctgggtgggggctgaacggcaaacctatcccttgtttgcttttgggaaagggaggggccgcgaccggagcggcaatggcgcactttaaagggcgacgatggcgagctgcgtacggccaacgccttttattgagaccggcaaggcgtggcacagcacttagaccaagtagtagtacaaagttctttacttggcttagctttggtaaagagagatgtgaatgtgacctggtcacctggctatcgcgcaaaacgttgctcctcctcctgggttggtcatgggggtctcctggtcgaccaggagacaggctactactctcgtactcctacacgggaagagtaactggatatacagcgaagaaagtcgatcgatcaaggtatcctactatcctggctcctacatgtacttgtgacaaaaccaagaagatccctcagtctacttgtccagcaaaccccgtcaaatttactcgccacgatctcatgctccctggtggtcctacaggcgaattatatcggcatgatgttctaagtgcctttggatactctgtctctcaagagtaattactgctacttttcacagaaaatcgatccccgggaggccgggactgagtgggggtaacttagcttgatcagaaccgattacttggatcaaccccgttgtccata

SEQ ID NO: 17530 - DNA, 709 bp, Oryza sativa
attcctgcagcccgacgctactggcgcgagggtgtaccgcgagacggcgagatggcgaaacgcggcgaagtggagctcgacgcggtgcaggacaggggcaaacgacggcgacgtaaggtgcttgacaacgtttcttgatgtccagcggctacccggcttccccatggcgacggcggcagcacggctcttcctccactccctccaacctccagctccggccggggagcctcacaatggtgatctctagcggtggtgagagggtgatcgcaaggtgttcgatgaaatgcatacgagaagaaggctgagagggatgaggattttgttgagggcttcgcttaggatgcaagcaaactatggggataagatcaccagcacatgcctaggcgagctggagtactaatggtgatcggataagagcaatgaggtggatgacgcggataaggtttgatctcctcctccattaaggttatgtggctccatcatcgtacctaaagcctaaagtctgtgcgttctaactctagctgtggcaggaggctccgttttattcattgggcgcgaatgggggcgacggaacgcgcgcacatgggagctgtggcggagcggcggcttgctggggcggttttcccgtcctaaggtagttggctagggctagggatgacgcggattggcgttctggccgttatccatcggtggcgaggtgatgggtgat

SEQ ID NO: 17531 - DNA, 779 bp, Oryza sativa
tcctgacaccatcatctttttcgccactttttggctgatgtactttagatgtccaatttttttctcctctgttggttcattaggtgagcaaggctgcaggggagaagtggcgagctatgtctgagcaagtgagtttttctctgcagtgttcaaaaattagtacatgttcctattaagtgtgtgcatctgttatttagcatacatcatccatgagtatcactagaggactgtttaataattgttctggcctgtttgttaggaaaaagattgaattgctcctaaagtactagttgaatgaaaattgcaatttgtttttgaattctactcagtgaagcgcttaagtacacataagtaccatgggtggctattgatgtgacaatgtgccatatgtttttggcccttcgtgttaaattttattaggagaaggcaccttatgtggacaaggctggccaaaagaagcaggactacgagaagaccaaggccaacttcgataagaaggtgatgatagaataattgtgcatcctaattatagagcccttcaagcgttaggcactaattggacttcttgaattacttcttcaggagagcacaagctcaaagaaagctaagacccatgatgatggagaaggctctgacaagtccaagtctgaggtcgacgatgaccaggatggtggtagcgatgaggtaatcattaaaggaacacccggtgccctattttagcttgaatgcccaatgaatttttactactgctagttgtgttgctaatgaacatttttaat

SEQ ID NO: 17532 - DNA, 710 bp, Oryza sativa
ttcctgcagcccctgaaaaagggatcatacaccatcacttccctgtgaattacatattgaaaccatggagaatgggtgtgaggttttaccagattatcaaatttggtatatttcaatatgtatgaccacttgtccagctagttgaaatggaatttatgattttgagagcatattggttaagtactttgtacctgtgcaggtgattataaagaccctcacagctagcctatccctgattcttcaaccttttggtgcatattgtgatggagaattcaatttgagatgcgggtaagacaattttccattttcacctcttgtgtcttgagttcagcaaagcaaaaggcattcacctttataatttgaatttcataatgcttggaaaaattttataataggaataatgcagagacagataactgcatagaagagtaatgcaatcttcttgatgactctacctgtgtcactgcataagctgttatcaccttgtctttatccccagaatatatgtgaacatctagcagtccacttcaatgaattattttatgcatgcttatccattttttcaacttcattgcttttgttcaaactgcagatacccatactttgccgctgtccttaacttcagtcaatattgggccctatactgtttggtggagtggtacacggctactaaggacgaattggcacatataaagccattggcaaaattt

SEQ ID NO: 17533 - DNA, 1145 bp, Oryza sativa
ggaactccatcagccgtctcctcctgctgatagttaagacagagtgccagccatccgttcagtgccttgatgaagctcctctgctcattcacccaggaggaaaaattgacgatccatttaatcaactctagttcaagcccattgccagatctcgactggttccaccagaaattattgaatccaagttttttgcctctgatattgcttgacactggatgtggtagcagttcagcttatcttgccacattttcacaaacctgtaaaagatggctataagacttttcttttgacacaaactagatttgaagataatatgaaatgcaagaatatctagaaaataaatttggagtgttcagtattccacttgattgttctacaacataggtatcgtcaaatacacttttgccatagagtacccaaaaaaaaaagcaattctagacgtacacatgactgtttgtgatgctttaacttgattaacttaaatgtgcataaatcatttttgttatgaaaatgtgtcaatttctacagagatcaatttagtgcactggtacataattaccttcagaattaaggcagttactttctgatagacatactacacatgtggactgacattacaaaataaaaaaaataatgggtaaagacaaagctaaatcagactatttgaataaatgtcagagggaaagaatagagtgtacccttggattaaggtattaacttgtggccataactcctcgtcccttactctgtttatctttttcgacaccttagcaataactcgcacagctatccgtatttttgttgatagcttcctaaccaaattacgagttgcatcaatcttgggagcttcagcgcctttttgatccaagaatttcagcctcttagagttcttggcaagcaggagccgcattttctcttcagcctggaagaggaaaacagcaccaaaacattcaatacggaatagagactaccaagggtgagctcaagcaaacaacatgatttccccaatgtaagagcagtaattcttcattgatgggttcctcataggattattagtttacacgtagggtgatcatgacatgaaaacaaaatataatattgtcctgttatgctacaagggaacctaaaaaggcatggcagcaaca

SEQ ID NO: 17534 - DNA, 14300 bp, Oryza sativa
ttagaattgttcctctgtacttgcctgtcatgaaaggccatcaacacagagcaaaggaatgcaatttttaaaggcctctatcatgcacccaaatgaccagaaagcccgacgaagaacattctccccatattcattcacctcatcgagaatagcaatgtgtgtgcccgggtttcttgcctgcatcacctccaatagtgggggaagattgtgataagaatcctcataagttccaaacctcatctccaatgctttctgttttgccctccaagccttgtcgtacgatatctcatatccgtactctttctcaacgtcatgcattatggtgaaaggggacaaagatgtttttctaaccacctttgaatataccatttgtgccacaaatgccgctgtcaggtttatgtgcaccagacgggtattctccaacaaacacgtatgttgctcaaccctcgaagctacccataaagtgtcatgttgtggcttgtaaccatgcactctccaaggacatccaccctgtatgcacttcacgtcatacgtcgtcctatttgaaaccttcaccctgaactcacgcttctggacaaatgcccacctcttcaccgcatcttgtaagtgacctttgtcatgaaacatctgtccaactttcacctgctcactatcataacaccagtgggcatctaaaccatcgtttaccttcatacgactcattgatatggtcgtccaattatcgggtatgtaagtttcgttgtcccacagtgttgtatcttctccttccactacaagcgcaatgtattcctcgttttccacttccatctgatccactaccgcctcattctcctccgctgcatcaacacgcataggcgaatccggttcttcatcgtccgagtcgttggcctcacgattagtaccacgaacaatgacctctccttgtgtattaccctctactacttcttcccctcgaccttgctcagtccgccaaacattttcagcttgtccaccttccaacggagtttcttccaccacggcatgacttgactcccccgatcgatcaacacattttgtcttctgcaccactattgccaggctatagcctttctcccttactttactaacaaacttcctccaactcccagttgacgcaacctccactactctccactgccatccatgttgacccctcactggccacacggcatttatgacaaatttatcgtgcactggatctaccccaaacatattatacaaccaccctaacacgtcgttcaaacccatatgctctggtgcattcagactagtatcatggaaggcatatacagtcaaatccaccccgctatcacatatttgtataggagcatcgccataatacagacgaatgggcatatcacctgacatcctgataaaacatgacaaatagtctcacgtttaatcatttaatcattcgataattaccctattacaacttatactacattgccgtgtactaatttacaactattagtaacaaacaactagtttaataatccaaataaaatataacacctttctacatattttaacacacaacatatcaataatatgtactaactaagaactaatttaaccgtacaattacttagatacctctaccagcatttagcaataacaaatatgtgctaaccatacatactaacatcgaacaatgcgaaacaattaacaactcttaaaccaattttttattaaactttcatatgcattgtacttagggattactaatgtataccttaacttcactgctggagggcgtcgccaaccctttcctcccggccggcgcctcctcggcctcctctccggcctgctatcccctcccctcgctccctccggcgctcacggcgacgaactggcgactctcggcggcggctggcgatgtggtcctcgaaacaaatcgagctcgcggacgggccttttaaaccggcctgtcgaacgcccattgttcgacagggtcggtggagggccctgtcgaacgcccccggttcgacaggcctcgcggcgccgggtggtgggccctgtcgaactccctccgttcgacagatgaggctgtcgaacgcccccagttcgacaggcctcgcggcgccggtggtgggccctttcgaattccctccgttcgacaggtgagcgtgtcgaacgccagccgttcgacaggtgtatgtcgaactgcacccgttcgacagggacctactttcgcgattttccccggttggccactacttttgcgattttccataaaaataatattaattctcaaaaaaattcagaaaaagtgaggaagtgggtcacttgcgcatgactggaagcaggagagaaagagagagggaatatgatggcgaagaggggagggactcgccggcgtaggcgaggagggcagggtggcggcgaccacgacgccagcgatgaagccactgccacgtccatccttgcgtcgcgccctgacgagccgtcgccactggatctggcgagcttggccaagcactcacgccgtcgtcacgactcgccgccgcaccccgatgagccaccaccaccggatttggcgagcttggccacgccgtcgtcgcgactcgctgcagccgcgcgcccgcgcgtcgtgcctcgacgagacaccgccactggatctggcgacccttgccacaccattgtcgcgactcgttgccatcgcgccatgccccaactcgccgcaatcgtcgcccacagccagatccggtgagccccgacttgcaaagctccagtcagcggcgaccttcgcgaggaagacgcaggtgaggcggcggtggcacgcgagaagaggagaggccaagtccactgccgccgtcgagtgccaagcccgtcaccgccaagctccatatccgccatcgccgaggcgggcaggggagggaggcgccgacgaggtcgctgggaggtgagaggagaggaattagttgaggatgggatgggttgggattttggggaaatgtaaaaaggagagagagagggaagatgaaaagatgtatgttatgggatccattataattagctttgcactgtgagatgagttgctttgtagaagttctatccaatatatgacatcccgggtttggtcttggtgtgcaacgcactgtaaacgctatcaagtccataaaaaacataaatagacaattataggcttatgggtatagttaattaacatacgtataagtaatttaagtcccacggctgcctcggttttatgggtcttagaaaggtatggaaaggtatattttgcttttgatggaacgtccctttttcttcatgtcgttaagaagattatttttaagaaaatattgataagatagccaatatgtgatgtgctgcttcaaagtttaaatttgacctatgtaaattaaaacaataaataataagtatgattgctaataatacgtactattggcaacatatttgttatttttgtttcccatgtatatgttgaatttgagcttgcatcttttacggagtgccttaccaattttttttataactttttaggtgataatggcataaaatgattggacatcctcgagaaaaaaaaagaccattccctgtaaagttattatgttggatatatatccagtagcattacaaatggttaatcgatgggtagcattttcggttaggtagaatcaagatagatgacttgattaaaaaattcaagcgcacgattttctcacttttaatatatactgtttttggctaagatatgcaacctgcatccccagtggtcttttcttaatgccataacaaatttaaaggcctcacctgcacgcttgccaatcgaacagacaacgtagtgatagtcacgggacgaacaattccaattgctaacgcgcactataatacggaagtagttgaagtgttcaaagttctttggctttatatatatacctaaagacttggtcaaaattaaactcagatccgattatattggatatcgaatcaaaatttcactttcgagcttatgtgaataacggaaattatgtttccagtcaagcatgttgtcacgttttacaagggcattaagcatgactataattgactaaggtgaaaaatgcattcacaaacacaccctgataagatatctcaattaagcggtggaggaagctcgatccccggcaggtcggacgaacgcttaggtttcgccgttattgtcttcactactgatagccgtcgacacttataaaaattagttaattatctgaaaacaatgctagtcacctaagcttgatggtgctgctagctcttcatcattgtctcaattagtttattgaaggacacacatcactagtttgtcaatttcaagttctcctttttaaccattcttttttatcgatgggatagtcaacatcttgaataaagttccttttatatagttataataaaggttttagaaaaaaacaaattgcatgatatatatttccaataataaacgactggttatcttcctctcctaatacatcctaattaagtgatgcagcaagatgtgagatatgtactcgaatataatcacatttcccgcgtgagaccacatcacgttttttttcacgcttaattagttttgtacattattatcttatggagtagtaatttaacttaacatatagtcatataccagtaattaactacgtccgcgaactgacctcaaaagtggaatccactgtcaccaaactcaccatgagttcaccacccctctcaagtagctagattagagaaatagtagagttaggttcatgaaaggctagctactaataatcaaacatcggcacagtggattgttcaaacatatatatatatatatagctcttgaaaatgagatgcatggagcttaattattggcattgtttagtgtcgcaacgcgctctatatggcaccgaccacgtgattagtattacatcgtcctgattgatcaagtgctatagacttgttcgatcatcctcatttgcttgattacataaagtattatttctagcaccactatgcaataagaaaaaaaaaagagctcgctgatctctcagccaccatttagttaataagcttgattaggcacagttgttagcttaattagctcggcagcttagctaagctattgtgtgtttcttgctgttaaggatactccgtatgaaatagccagtggccggcctagctatagctatagctattatctaggctgtttggtggttcagtactcctccgtccacacacacacacacacacacaccatgcgtatatattgcctacggcagtacggggtggccaaaaagttgaagcatttctggattattggcacgcgataattaattaaactaaactaaagctgggtgatcttagtttggcctttttttatgagagagagagagagagagagagagagagagagagagagagagagagagagagagagagagagagagagagagagagagagagagagagagagagagagagaggagtttgtttagttaccttcagaaatgtgaagtcaaggcgtctaagcttagtgtgtgacatgtgcaggcacattggtgcagtaagccagtaacacgtgcaagcaaatagccactactctctgagtcacctttttcttaatctaaatttataatctgtcgatcgaacaagtgcgcattgccgcattggtaatttgatatggctcttatatgtccgaagtacgtccattgggcgtgtcccgatccgccgtcaaacaacagagcgtacgcacggacgtaggcaccgtcgcaccgaccaactagctcgccgcaagctgcgttcgatcgttagtactcgctctgttttaaattatggcgtatgtattttttttacataactttcaataacatattttaaatattaatttatttcatattatattctcaactaatatgaaattaacatatcaaatacttcaaatatataaattcagttatataaaatgcataatagttagcatagatatgactagtaaattagaagttattgagtttgaattatatgacgaatgagtaatacgtagtactagttggaaatattttcccttcacacgtaaaatgcgatagtatattgacatatgattaattaaggattaactaaaaaattaaaagattaaaagataggttgatatgattttttcacagtaagggtgtgtttagtttgcaccaaaattgaaagtttggttgaaattggaacgatgtgacgaaaatttggaagtttacgtgtgtagaaaagttttgatgtgatggaaaagttggaagtttggagaaaaaatttggaactaaactccgcctaacttatctacaaaactttttaaaaataattacattatttagcactttagaacgagtggttatggaaaacgagatgaaaaatatagagtttcgaacgagagtgtccacctcgactactccgctcccgtttccgctagccgaccaggggaggaaagttggagtgggctaatcggtttctgaactaggccggcccattcagagcttcttgtaagcccagtaagctttgagagggacgggcccagttagccagtagggctgatttgggaacactaaaattaaagcccgcccctgtcttttatgggccattgttttaggcatgctcttaatgagacaaaatacaccttatttttgtatacgaatggaataggattttcagtgaagaatgatgtttgttgatcagtggatggttttaaaaatatataatacgtaacgtacccacatgtactcttttactaaaaccgtacgttacgtatttgcatgatggcattcgctagattacagctgtttgtataagaatgtttcacataaagctttgacactcatattttactgtcttcttttatttcgttgaagaattcttctccatattctgtaaaaaaactggacattcctttatatatattacgtacgtaaagtacccacatatttggtcagcttacttattctagcttatttgcacgcaatgtcaacactgatcaagacactttgtgggctccagctgtcctagcttatattcatgtttaatttagcgttgattatatccatgtcacagcaaatttacctaattaaaaaaatatcattactatttgtgatatatgttactcctacgtgctattatatttttgtaaaattgggattatgctatcgccatcaaaattcatatcatcttatttcctaaacccattcttcattctctctatattctgttcatctccccctcctctcttggatctggcggccggagctctatccaattacacgtggtgcacattttttttttcaaatcaaaacttatcaccaaaccaaatcagcactgaaatggtcctgcgctatatcgaagcaattaatagcaaacaaggttgaaactcgacaaggaattcattgcatgcatgaacacacatttgataaccgatcgagcgtagcgcaagccccattcaattcacggaagaagctgcagaggattcgtcaaacaagcatagattcgtcgcagaacaaacaaaatccagaaatatcttataaactgaacccccaatctggatcatttcgatgtacaccaaacagaacccaagcgacagcacgtacggcccaaatccagcccacgctatcgctgcgccgttggcgacaaggcactcggcggccctcgcgtcgtgccagccatggacatggagcgcgcgtgcggctggcgtagcttcctcatggcgcaacgatcgacgtcttcagacttcatccagcagcttcctcatggcgccggtgtcgttctggtgcatatgtgccacaggatcaacgacgtccgcgccacgtactattggacggtttcatggagcttacataaatactccatataatgatctcatatggggtcaattcgagatcatactgtttgatatgatctagctaccgttatttgatctataaattctactattctagtgttaacctctccacgaggtaaatactagtacgagatttacactctcgagtaagtgaaaagaggaagcagctgctagctttcaatttgctgagggcactgaaacgcgtggtgttcgtcaacttcgctgccgccgttctggggctcctcgcagccatcctcgggttcgtcgcggaaggcgccaagtccaatgcaagtttcaccttcatctcggtctcacttctcgattagttcttgtgtgtgtgtgtttgaatttgacgtctcgtgtttttttctgcgtggatcgatcgatggagatgcagtcgttcgtgcggttcgacgggaggtactgcgtgtaccgcgccacgccggcgctcggctgcgggatcgccgcggcgatgttcgtgctgtccggccaggccgcggtcaccgcggcgagcggctgcttcggccgctgccgcgcgcgccgcggcgaggagtcgtcggcgcccacgccgggcgagcagcgcaggcgctccgtcgccgcctggctgtccgtcatctcgtggtacgtattaattcttgacttgttgccacagcatccgcacgcgcgcgcgcggcggcgatgaccattgtcgacgtcgctgcagggtgttggtggcgacggcggtggcgatgttcctgtacggcgcgtcgcggaacgcggccgtgaggagggggctcgcggcggccgcgctgggccggcgaggcaggcgaggcaggcgccgcggcggcggccacggccgcaacgtgtacggctgcgccgtcctcgggagcgggctgttctcggcggcgtccgtcgcgtcgctcgccgcctccgcctgcgggatcgccgcctacgtctacgtcgaggcggatggtgaatcattgacactcacgccgacgacgccgccgccgcggcctggtgggttcgccggggcgccgggcgcggcgacgggtggtcagccgtatttccagccgcaggtggcgtacccggccacgggctacgtcgccaaccctgctgcggctcctcccccaccaccgtacggcggcggcggcggcggcgactacgccggctatgtcgccaagtcgcgtgaaggcacagcttgagattgccaaaaaaaaaaaaaaagcgtcgaagtaagatcgcgcgagaggttgccaagaactctgcctttgaacttgtcgaaacatgatttcggcaataataaaagggggtagcgcacgagacctaaaagtggatggatgcggagacaaaggatttagacaggttcaggccctctcgatgagaggtaataccctactcctgtttggggatttgaatccgccgagtgaattatagatctgacgatctagttgtctcatgccccttagagggcctcctgcccaccttatatagggtggggggcaggattacaaaatagaaaccttaaccaatacggtatcggtttcctaaatctactttacaatattatcaaaccaggactttaggctgttccgtaatatataaggaaacgtaatacccgagtcatgatctattacatattccatagatataagttatcccctatgactagtcggataaccatgccgtatgggtatggggtacccataatatccacagtagcccctgagaccttcgcagtcgaaaagataatcttctctcgaaccagattactccaaagccgagtgcttcaatcatctttgtcatggtctcccgagtacttttaccaaatctgaagactgtggagggctggaaaataaagtcaggtgcaccgactagatgcacctaataggtgtagcccccgacaatgtggttaattgaacaaaccaagcatatagtcaaggaataataatccaaccaaccgagtggttttgataatcgtaatcaaccaagtgacttgatatcaatatatagcatatgcggtgtgaatcctccaaataacatgatccgagtgatataccaactgctttgtaaaatatgatgagtgatatagcaaaatagctataaagaagcttgtatattgtgaataaagaaatttccaaagtattgggcatacgccatgcgcacactgctttaacagatgtgcttaagtccctagaagacacatggtttcaccacacctagaaatatatggcatatgtggtgtaaaatccgagtaaataaactcataaaggatttaccaaccgcctagaaaatgaccacaatatataatcagcctaagccataatattggtcaataaaaatgcacacttacgtggcgaaaaacaatgatattgtatccaatcaattgcttaaaaacccaaacagcaccttgacttatatataaaaaagtcagcgggacagctatataaagctttactgtttgacaccttttaagatgcattgtaccaactcctaaaaagttaagtaactgcggtataaaaggattttaaggtattgggcacttgatcacgcgcactttggcctaagcaaaaagtgcctaagtccctaaaagaacgtgacaggccacacctgaaaatatgggctgcagacatattaggactaggccaaaacatatgccttcgacaccctttaaaggatgacgcatataacatgctcccgagtaataaatcttccgggtaatatagaccaagcgtagctcatatgaatagcttctgatctgagtggttatcccttatgggatactccaaaatagatgtaacaattgaatcccgactggcgcaagtattcagttgataacccttacggggaataataaatagtctagtctttgagcatataaaatagacccatgatcatgaattcatgttgcatgtatccggagcaagtccaaattgaagatataatacttgtatttgagctagtaagcccctgagcacgtagtcacaattgttcgttgatggttgctgacgcatttggcatagagacaagacaaccaatatagagagaatattgcccaccagaggtggcaaaaatattggtggtagtgaagatagtgataccaatcaaaagtactgaagtcgcatagccatggaggcgaagaaaccagtcggcggcagtcaggtcagccagcaatgaatatgaaggcgctcagcgataaagttgtgtagttgacgacgacaaacgcaaccgacatgatgaagatgacgatgtcggtgatccagccaatagcagtgtagcaaccaatgataatgacaaagacgctcatcagcatttgcatagtaggtcaaccgtgaaggtgaaataataagtcggcgaaaacataatcatccattagcaacaacagagatgtcagggtcgatgaagcagaggtgctagtgatgatgtcagtgacaataatccatcaaattaatgttataactgttgtagatgcttcacttggaggagagttgatgtctgctccgaagcaaagatgaagataatgactcctggagttgactcgtgggttgatgaattgatttcttcagcttgacataaaatttgtcaaattttgagccttgtatttgtgtagcccccgactctttgattagttgggaaacaactgaacatagagtcgagaactgtagcctcttgtcgtcgaatagttattgcttgattgaagatatgtgttgaagatgtccaagtagaaatcatgaatgttggagagccacttgttgtagtaaaataacacggcatcgcatgccgagatgtcgagattcacaacaacgtcatggttggtgatgtagcaaaacttgtgaagtagcagcaatagagtttgcggtagtgaagacgcgcagttgtgaagataaaagcactagtcggcggcgacataacacgagtcggcggcggaagacgatgatgtccatcagtagtggtagctgtataaaccaaatgtagaggtaagggcactagtcagcaacagacgagacgaccggcgattaagatgtagatgcccaacaacggcggcataataggccagccgtgcaggcggaaacaccagtcggcgaaggacgaggcggccggtcggtgaagacgtagacgcccaacaacggcggcataataggccagccgtgcagacggaaacaccagtcggcggcgatggaggcaggccggtggtggagtcgtagacgcccaacaacgacggcataataggccagccgtgcagacggagacaccagtcggcggcggcgaaggcaagccggtcggtgaagacgtagacgcccatcaacggtggcataataggccagcgtgcaggcggaaacaccagtcggcggcgatggaggcaggccggtggtggagtcgtagacgcccaacaacgacggcataataggccagccgtgcagacggagacaccagtcggcggcggcgaaggcaagccggtcggtgaagacgtagacgcccatcaacggtggcataataggccagcgtgcaggcggaaacaccagtcggcggcggacgaggcggccggtcggtgaatacgtagacgcccaacaacggtggcataataggccagcgtgcaggcggaaacactagtcggcggcagacgaggctgccagtcggtgaagaggtagacgcccaacaacagcggcataataggccagccgtgtaggcggtgacaccagtcggcggcggcgaaagcaaaccggcggtgaaaatgtagacgcctgacaacggtgttgtgaccaaccaaccgtataggcgaagacaccagtcgacggcgacgacggcgagccggtggtgatgttctgactgatccattactggagcgtaagagataagcttaaagccatgaatcccttttatgcatatctggatttggatcctgcagaacaaacatataggatgagtagtatctgatgtaaatataatactcgagaaaaattcaagcagtttataaatacgtatttcttctcttgttaattttgatttccccgagcagatgactcattacgtttaaacactctgcccgactagccatagccaccaagcactgggagtcggcctaagcacttcccaaacatgcatatgagtgacatgagttcgtcattaatggaacaaagtttcacggatcggagtttactactcgggtacttttgcaattattaagagcagaaaataaattatcttatctctatgcttttgatttattccgaataatacttagcaccttgcgttactcggtccatccaacgagcccccgggtgctaggaatcggcccaaaggcaaccatccattggcaaaccaaacggaaagcataggaagatagaactccataactcgataggtacttttgtactcagattatgtcgcaagcaatcaagataaatattatgaaaattgtttaaaaaatacgatataacatctatagcccccgactcactagtcaacggcgaaccagttgatgtagtgaggcaaaggaaaagacaaaatatcatataaagaataaaataaatgatgacttagctttgtcgtattccctcgatgacagcagaagtagccgatgtgggaataaagcagtccatcaatggtgacaaaaacaccagtcggcgccagtggaaccaagccagtggtgtagatgatgaagcccattaacggcggcgaagtccgccaaccgtataggcgaaaacaccagtcggcggcggaagcaagccggtcggtgaaagcgaagacgtccatcaacggcaatgaagaaaccaatcggcggcgacggaggcggtcgacggtgaaagcgatgcccaccaacagcggcataataggccagccgtataggcaaaaacaccagtcggcggcggcaaaggccagccggtcggtgaagacgtggacgcccaacaacggcggcataataggccagccgtgcaggcggtgacaccagtcagcggcggatgcggcggccggtcggtgaagacgtagacgcccaacaacggcggcataaaggccagccgtgcaggcggaaacaccagtcggcggcggtcgaggcggccggtcggtgaagacgtagacgcccaacaacggcggcataataagtcagccgtgcaggcggaaacaccagtcggcggcggcgaaggcaagccggtcggtgaagacgtagacgcccaacaacggcggcataaaggccagccgtgcaggcggaacaccagtcggcggcggctaaggcaagccggtcgatgaagacgtagacgaccaacaacggcggcataataggccagccgtgcaggcggaaacaccagtggcagcggcgaaggcaagccggtcggtgaagacgtagacgcccaacaacggcggcataaaggccagccgtgcaagcggaaacaccagtcggcggcggcgaaggcaagccggtcggtgaagacgtggacgcccaacaacagcggggctgcaggaa

SEQ ID NO: 17535 - DNA, 1291 bp, Oryza sativa
aaggcaagccggtcggtgaagacgtagacgcccaacaacggcggcataaaggccagccgtgcaagcggaaacaccagtcggcggcggcgaaggcaagccggtcggtgaagacgtggacgcccaacaacagcggcataaaggccagccgtgcaggcggaaacaccagtcggcggcggcgaaggcaagccggtcggtgaagacgtagacgcccaacaacggcggcataataggccagccgtgcaggcggaaacaccagtcggcggcggtcgaggcgagccggtggtgatgttctgactgatccattcctggagcgtaagagataagcttaaagccatgaatcccttttatgcatatctggatctggatcctgcagaacaaacatataggatgagtagtatctgatataaatataatactcgagaaaaaatcaagtattttaaaatatttataaatatgtatttctcctcttgttaattttgatttctccgagcagatgactctgtacgtttaaacactctgtccgactagtcataaccatcaagcaccgggagtcggcctaggcacttcccaaacatgcatatgagtgacatgagttcgtcattaatggaacaaagtttcacgtatcagaatttactactcgggtacttttgcaattattaagagcagaaaataaatttatctcatctctatgcttttgatttattccgaataatacttagcaccttgcgttactcggtccatccaacgagcccccgggtgctaggaatcggcccaaaggcaaccatccattggcaaaccaaacggaaagcataggaagatagaactccataactcgataggtacttttgtactcagattatgtcgcaagcaattgtcacgtcctgataaattcatcccgaaataaaaatcatcttctaaaaggaataatagaattaattaaaattcgaaaagaaattggcaaacgctaaaaatacgtacaagaaaaattcaaatgtggcccggagaatttttgttaaattctccttggtctaaaaggagccctcaaattttacttgaattttcagagcaccggaaataattattaagcaacaacaacaattaacaaagtttattaaaaagaaaaaaaacctaaaaataatctctcttcctcctttgggccaagcccagcccgaagtctccctttcctccctctctttctctccctctccttctctccctccttctcttgggcccctcttcccctcccggcccactgcctccccctcctctctctcccgggccgtttcctccc

SEQ ID NO: 17536 - DNA, 10515 bp, Oryza sativa
tcctgcagcccccacgcgtcaggccgccgtcgtcttcttcctccgcccggccacctctctctctcttcccgtgaaaccctactcccttcctccctcaaatccgtgcgattcgctcatgggattccaaaattaaataggggaaattaaaccccattgaatcctcttcaattcccccttaattcccccttgaacggcgcccccaatcgccgggaacggacgcgccaagtccggccgccttcctttgccgccggccgccattcccgtcgccgttcccgctcctcccgtggccggctctctcccccatcctataaaatgggatcctcatcccccgttctctcgttttagccccctcccgagcctccccgtggtccctatccacctccccgtcgccctcctctctctcccacgctgccggccgcctccagccacctgtgccgcctcacccgcgcaccggccggccgcgccgtcgcctcctccagcgtcgccgccacctcctccaccccggcttgccctccgtttcgcgaggtgacccccggagctgccttcccgccgtcgccctcctcttttctccgcgccggccacctccagccgcacctcccgcctcacccgtgcaccctccggctgcgccgtcttctccctcggcctcgcagccacctccctctccctcggtcaaccctccgtttcgcggggaaagcaccggagacgcgtcctcgccggtgtccagtggcgtcgccaccacttctgcgtctccggccggctgctgttcgtcgccggtgcgccgaccgacgtcgccgtctcctccgttgacgtcgcagtgccgtcctctctcccggccagccacggcgtcgcccgaatttcgccggaacgccgtcgtctccgcgccggcctctccttcctcctcgtcggctcgtcgccccgctgcaccaccaccttcaccaacatcgcagcggcgtgttccacgccgtcccctcctccgctcagccgctgctgcctgccatcatcgtttcatcgtcgtctccgatcgttctcgtcgtcgacgtcccatcggtcgcccggctcgtcgtctcgcggcgccgcctccgtcatcgtcatcgcagcggcgtgttccacgtcgtcctcgtctccgtgcagccgctgccggctgtcctcgtcgcctcctcgccggccccggtcatcgtcgtcgtcgtcctctcgtcgttcccggtcgtcgtggcgttcgtccctccgtcgagccgttctcgtccgtcgtccgcgttcgtcaagcgagccgctgcagccccgtcctcgtctccgtcctcggctccgcgtcgtcaagcctcgtgccggccgcgtctcgcctttgtccaaggatcgccgccgaagtcgttccctcgccgttcgcctccgtcgtccccgagctgtcctcgccggtcccgttcgtcgttgtctttcccacgcctcgtcgcgtggtggtaaggatccgtcctctcgcttccccgccctcgtcctttcggtgtcgccccgtacccgttgtgcggtcgtcgaccccggtacccgtgtaccggtgtcggtagtcgttcacgtgtgcgggtggtgaccgtgtagtgtccgtgttagtgtgcccgctcggtagccgcgtggtttccacgtgtgcaacccgtgtggtgtctagtggagtccgtttgtcggccactcgcctcggttgacacacggggtccgcttccgtcgacccgtggaccgtctctgtgtactcggtctaccgcggtcccttttgttgacacgtggggtccgcatgtcaacggcgcagccttcctgtcttttccaggctagcgcttacacatgttttataattgcaaagcttaaatataataatccgcaaatctccatataacagcattaaacttcggatgatcatatcttggtcatacgaactccgaatcgacccgttcaagtctcttaatgtttgttataacctaaagaaccctgtgctttctttttatgtattgttattgcttctttataggtttgtagctttgcttgtgtgcttcgcgtagtcttcgtcgttccggaggttcccgaagcgtggttcgtggtcgtcgccgaaggttcggaaggccgttctctctgagcaaggcaagtcacatcatccttgagcatattgaatcccagtttataaaattattttaatttaaattaatgcattatcgttttatttaaattcccgcgttatcactgttttatttagccatgcctatttacctttgttatgaccatactattattgttattgttattattaccttgttcaccctagaataaacaaaaccccaactagtggacactctatttatggttccactagtatgaatttaggtagatgcttcgctgattaataggacaacattaggtggttttacaattttagactttgggtatattcatatcatttggtcactatggaattgttggtttatggtggaattggacatacacctctcttcccctttcaaaacccctaaaacctgttttcggtggggtttgggtgcatgccagttgtgggaagtagcaccccggccactataaggattaagctcgggcctctgttgcaaagcactaccgtacttccacatgtctagtgggtaaggcttagtttgtggctcagtccggttataaacaaaagtacacggatggaggtggatgaagtcgggggtcgatggacattctccagggcaaatgaaggctacacgagctgcggcccggtagtcgagatgtcatggcagagggttggtgccctgctgctagggggctcagtcctgcctgcctgtcccgggtgtcccggccgtagggggattgggtcggtactcttgtttatggctaggatgggttgggaactatgtcatgtcttccgtccgtataccgtggtggtatgtggcacgtggttacacgtgaggaagatgtgtcttgtgggtaaagatgtacacctctgatcagagtataatctattcgaatagccgcgccctcggttatgggcaagccgagcaatgtacccaagtcagtgttataattcttaaaatttgctcaacaactaaaatgtggaatggttggcctgggttggcttgggacgagctgggacccagggtcgggttgccagttcggtctgaatcatcgtaggccttgggttaaggcaggttcgtgagggttcacggccttgtttaataatactgcgtagctctaggatcgtctttataaaatggctttgggcaactaagtagcttttaaatgctgtttactgcaaaacttaacccgtatattattatccccttgtattcccttgcattaattatgcatctccggtgtggcttgctgagtactgtggttgtactcattcttgctcaatctttcccctcgtcagtaagagaagctttggagaagatgtcttaggtggagtcctggcttataccccagttgagcgcctgtgaagatggagccgtaggcccgctagtccgctgctgtttatttttgtttgtcaggccttaagtgcctttgtaataatgtaaatattatcgatataataaagatgtgtcttttatatcatgtttgtatggtgtaccccggcttttcctgggacggggattaatacactagcgttcgggaaaaggcaattttctcggtcgcgacagcaatcaagataaatattataaaaaatatgatataacatctgtagcccccgactcactactcaatggaagaccaattggtgtagtgaggcagaggaaaaggaaaaatatcatatagagaataaaataaatgatgacttagctttgtaatattccccttggtgatggcagaagtggccaatgtgggaacaaagtcgtccatcaataacaatgaagacaccagtcggcggcgacgaaggcggtcgacggtgaaagcgaagatgcccactaatggcggcataataggtcagccgtgtaagcggaaacaccagtcgacggcaacgaaggtgagccaacggtgaggatgtagacatccaacaacggcggcataataggccagccgtgtaggcggaggcaccgctcggcggcgacggaggcaggccggcggtgaagtcgtagacgcccaacagcggcggcataataggccagccgtgtaggcggaggcaccactcggcggcgacggaggcaggccggcggtgaagtcgtagacgcccaacagcggcggcataataggccagccgtgtaggcggaggcaccaatcggcggcgacggaggcaggccggcggtgaagatgacgatgcccatcaacggtggtgtgaccaaccgaccgtataggcggggacaccagtcggcggcgacggaggcaggccggtggtgaagtcgtagacgcccaacagcggcggcataataggccagccgtgtagacggaggcaccactggtgtgaccaaccgaccgtataggcggggacaccagtcggcggcgacggaggcaggccggtggtgaagtcgtagacgcccaacagcggcggcttaataggccagccatgcagacggaaacaccagtcggcaagagtagtgccgcggcgttacatgcaaacagcagaaaataccaagagagattaatctgacatttagagatcaatctaataaacaacaataagttgaaaaggaaaaaacccggtgaagtctgagattaaaaggaaaaaactcgccgagattgatctcttcgactgactccgagacggagaaaattggtcgtcggtgttgcaccgtgtcgctagggctaatcaagcaatcgacactgagatggtgaggcctcccggcggcagtttgatttgtccggcacaaatgcatgtttgcatcggccaggtcattattggcgatgacccagatcgcgtgattcgaaaccggccaggaggacgcgagcgccaagccccagcagggacgagatgtatgtgcggcttggtcgagatcatggcgatgtacagtacggtggccaatcccgtcgatcgtcctggcagcggatagctttccccgacgtgcggcggatagccaaatcgtcgagacatgaaaacaagaaaaataccagggcatcaatctgtgattagatttcaatctaaagacgatagattagaacgacaaacccgatatcttcctgtagattgatttgatcagaagatggcgtcgacggcggaggatctcacgctacataggcgaagacgaagccggcgactcctgaaaattgattccatcgtactttgacggaaaactcgacgcacccctacctggcgcgccaactgtcgaaacatgatttcggcaataataaaagggggtagcgcacgagacctaaaagtggatggatgcggagacaaaggatttagacaggttcaggccctctcgatgagaggtaataccctactcctgtttggggatttgaatccgccgagtgaattatagatctgacgatctagttgtcttatgccccctagagggcctcctgcccaccttatatagggtggggggcaggattacaaaatagaaaccttaaccaatacggtatcggtttcctaaatctactttacaatattatcaaaccaggactttaggctgttccgtaatatataaggaaacgtaatacccgagtcatgatctattacatattccatagatataagttatcccctatgactagtcggataaccatgccatatgggtatggggtacccataatatccacagaactggtctcgtttaatgctgatcttttcctcgcttgtgtgaaatttcattgtgttgtagaagcaaatcgtgtatgccacacaacatgacgataacaatcttcatgtcttggaataatgaaacttgtaaaaaactgataggtcaaaaatgccaaatgcgttaatgcgttattatgggtaaagagatgagtagtagatgtcgtaatggctttttattggccatgcatagtcaacgttgagtttagtttcggactccctccttttcatattagagtcgcaatcctccaggctcccgagtccgacctggttagggtttgctcgcctacaaatcgagacgccgccgccacctcccatcacgtacgatccccacccgccgtcgacgacctcgaaatcccaatcgctgcgccgcgaattagtcgaagctgcagtactgcatcgccaagctcatggcggctgagggcggcagcgcgttcgctgggcagaaggtgccgctcatcgacgccagcatggctctcaagatggaggagacgtgccccaccccggaggaggtgaagcatctctcgccggccgacgagcgcctcgcggcgaaggagtactccgacggcgagctcaacaagtcccacgccgaggtctgccgtgaagctgacaagaatagcgccgcctacctgctcgccaagcgggccaagctccaggctctgatcaaggaagaatgggctaagattgacttcagccgcgtccatgtcggtgactgggacgaagaagcaggctgctacaagtagctagcccacccagctctgctgctggaacattggacactggccttattctggatggatggatgattcgcctggcccttttttctctaattagctctactagtattagttagtatcagttatgtctagctgttcgatccatcgttcgatttgtgatgtttggtactagttactaatcaatgggtatctatgttatccaaccatccttatttacgtataaaattataagtcgttttgactttagtaaactatttaaactattttaagtttgatgtaaaattttcaatccaagacaaatatattataaaaatatattcaattgttgatccggaaaaattggaagtttgtgtgtgttggaaagtttgttgtgatggaaaagttggaagtttgaagaattattttggaactaaacacggcgataatatgaaacggagatagtatgcatatagggacagagccaagtataggcatagaacagcttaggcttaggctctaggattgtctacataattatgcttaagtactcttaaatcaccacaaaaaatttaaagaaatctattaatgcattagttggttcgctctaggctttaataattttctagctcaaccctacatacaactctaaccatcacggagaaaactcgtcatgttacctttgaggaatgttctctatgtgtgcttagtctttcatcgatctctcaaagtggctcagataggcattaagaaaaagctttcttcatttcataatgcaaatgatgctaaaatggttaaacattgttttaggtacgtacaactgaagtcgtgtattaccgaaagcccatacaagcctattgggtatttctttaacctaatattgtgacaatatcattaaccataaatgagtctataataggaatacttttaggggcgacctatttggcatctagcgaaaaacatctaaaaatcttactatagaccattggatcgcttttgggatatgtgcaacaacccttaacactaaccctcttttcttcctccctcagtcccaccgtcatcatttcgcagactcgatccaccaacctcctccaccaccaccagcctagcgtgtcgttgcttgacctcaccagcaccaacaatgttggcggggtctattagacctccctttccctttcctctccacgcctttcatccttcccggattgagcgatgtcaaggaggccccgcacgcctctcccccatctccgacaactcccttgccactagagacaccactaccgcccaccgccatcctccataatcgtggttccaacggtgctatcaccgtctcgcccttctaccaccgccaatcactaccgggttgtcgccgctctggtatccctttaaacctgaggaatccccccccccctctcctcttcccttcccctacccctttgtacccaccccctaaacctaatacctaattggtcgggggcatcgtcgttgtcaagctcgcaagagtggaaggagaaggtcacggtgcacgaatctcagagccgatcagagcatccaaattttgaaagatggggtttcgattatgtccaatggaggttagaaattctgatactagttttcatgccattgattttttttattgttgatctaccaccaaaaactatcttactttaacgttggtttaaatggatcgggaagaaagatttccaaccatgcttatagagtcgaacagtaacaggaggtcactataggacgggccaaaactttgaatctgtttgaatttaggaaaactagaggatttcccgtgtaattttgcacgaagctagattttaaatgctaaattgggtttgatataaaaaccttaactcatgtttccaaacttatataggtagaattataaaatatattgtgtacacaataggtttgtgaagtaggattatatctgatatatacttcctcagttttttaatgtataacactgttgactttttaagatatatttgatcattcgtcttgtttaaaaaaattatataattattatttttaatttattatgagttgacttatcataaaaaatctttaagcataacttaattttttatattcacataaaaattttaaataagtcaaatggtcaactttttttaaaaaaaaagtcaatgacatcatatatttaaaaaaacagaggtactatagaattctcaaaaagagccgagaaagtggtgaattacaaatatgcccctctttccccttcatctattattcctcccttcctactctactccctcgacttctcgagtctcgattctactctgtctccaatctacgcagcgaaagccggcgccgccgtctcctcgagcgcgccgacggcggagaagaccgcaggcacggcgtcgtctacggcctcctccccttccttccagaccccggccacggccgcgccgcgccccgccctagcctccgccgccgcctccccagtccggccgcctggcctctccacgcgcgcacggccggggcgagcaggtcttttgggggtgggcgacgccgcccgtgccgcggcctcctcccacctgaatccatcccagctcgcgccgaattcggaggtactcgtctcctctctctctcttctctctctctttccctccaggtgtcccgtacaattccttctggatttccatcattccatgatgcctggtggattgtagctgctcgtgtttccacgaaagaaggtttgggggtttatctccgaatccttcttctgggagggatactctaattggtccggtttgctgcggaaatctgtggagctcgggtagatgctccgtgttagtttcgccaccgcgcactgcaaattctagtggagtgaagaggaatatggtagaggggttgccggcggagttgccaatcgtggacgtggccgctcgtttggatggcaagagctcggagctgccagagaatggtgcattgctgaagggtgctgaggaatcccaggtttggaatgttttagcttactcgggaagtgccaaatatatttgcttctattcgaatgatttgtgatgctttgtttgcttgctaggatttgggaggtaatcccgtggcggagttgacgttgcacgaaggcaaagaggtgatcctcgtcgatgacaatgatagtgagcaggaagacggtgggagtggcaaggtggatgagaatgcgccccgggtcggattgagattcaaaacttatgatgacgcgctgaagtactataagcaatatgccgcggattctggcttttcagcaatcattctgaagtcgtcctacttgaagtcaggggtgtgccggaggttggtgcttggatgcagtcgagctggaagagggagggcaaacgcatgctatctgtctagagaatcaacgaagataaattgtccagctaggatttcgttgaagctaaggcaagatagatggcttcacattgatgacgctaagcttgatcacaaccatccaccgaaccaatcctcggtgtcacatatgaactgttataagaaattgacagatgccaagaatgaggaaactgcttcaagatcaaaagggcgtaggaatgttcccataggtgacaaagagcaagggagctttactgagataggaaggcttaaatttggggaaggagatgatgagtacatccacaagttttttgggagcatgcagaacaagaatccaaatttcttctacttagtagatttggacaaacaagggcgcctaaggaacttgttctggagtgatgctaggtcacaggcagcacatgattactatggtcgtgatgttatttactttgacacttcatacttgaccgaaaaatatgatctgccacttgtcttctttactggggtgaataatcatggtcagcctgttttgtttggtactggattactttcagatctaggtgttgacagttatgtgtggttatttagggcattttttgcatgcatgaagggctgctacccagatgcaataatcactgagcattacaatgctattttagatgcagtgagagatgttctcccccaagttaaacaccg

SEQ ID NO: 17537 - DNA, 1266 bp, Oryza sativa
aacctatgggtcactgaaagcctcagagtttgaagctgattggaagaagattattctggagcatggacttggagaaaatgaatgccttagttccctatatgagcatcggcagctatgggcacccgcctatctcaaaggccaattctgggcagggatgtcagtttcacagcgtggagagtctattgtttcatactatgatgggtttgtgtaccccaaaacttccctgaagcaatttttcagtaaatatgagatcatattggagaacaaatacaagaaagagttgcaagctgatgaagaatcctcccataggactcctttgactgtaacaaagttttacatggaagagcagctggccaaagaatacacaatcaacatgttcaagaaatttcaggacgagttgaaagcaacgatgtattgtgatggtatgccaactaaagttgatggacaatttgtcacctttgtggtgaaagaatgctcatacatggaagatggaaaggagaaggagggaaggaattatgaggtttacttttgcaagcaagagcttgttaattgtgaatgtgaatgtggtttctttcaattcactggaatcctatgtagacatatattatctgtgtttaagttgcaggagatgtttgagattccaataaggtttgttcttgatcgctggaaaagagactataagaaattgcatgctgatgcgctttgcaaaaatgatgaaatgctacctgatgtgctacctgatggcataatcgagcgtcatgatatcttgtttacacagtttcgtcaggtgcttaatctagggttcatatccgagggtaggtaccttgtagctctgaagttactgagacaagcagaaaagactcttctggatgatggagatagaggcaggcaggcagggcttctctcgtttgaggctgaagcacctgaaaatgatgaagggatttttagtcctgagttttcagagggtgtaaagaattctcagtcaacaaatgcaaagcgtcgaggtcgtccaacaaagaaactaattgaatctgattctgataccgtattacggccaaataaagagcaggtctatattcattcttggggcctaaagagcctaagatccatatttcactttctgttatatgaatatgccttcattgattttttttttttatttctgctgagcaggattttctacggtcatcttttgtcactgatgagtctaatatgattcaaggggcaccctcagcctcacaccttgaaagtcctcacttgggagtt

SEQ ID NO: 17538 - DNA, 711 bp, Oryza sativa
  unsure (1)..(711): unsure at all n locations
gtttcttgacacccactaccctgataagcccgagccgcctttcccgccacactgtataattggttctggcgaggaaaattttgtcncaggttgttcacgcttcaatttgttgcctcaacttaaagctcctaaccggatatgtttagcttctttcgttatgggctgaagtgatcaattgatggttttgccaacgctgacatgagaatggcaacacgttatggtcctcttttggtgcctgacaaaatttaatctctaccatttgcagctctggagtggctggaaaaggatccaaatgtaacgatcaggaggaaggattgtattgatggttatcttggtgcatttgagaaagatggctcaaatgttttttcagattgggttgcgaagtttcagatcaaaaccgtgagtgatttggttctgctactcttcgagtacttcagaagaaaaatagtgtggttgatatgaaccgtgatttggcttgatgcaggtattggttttaggaatatgcacagacttttgtgttttggattttgcaagttcagctttggctgccaggaacattggccgagtgcctccgctggaagatgttgtcatttattcagagggttgtgctacgtataacctcccagttgaagtagccaggagtatgcaaggaaccttggctcatcctcaggtattggatcactgaaaaccaattaacgaggggctgcagga

SEQ ID NO: 17539 - DNA, 8399 bp, Oryza sativa
acgagttcagccggttccacgagctcgccgacggcacgctccagcgcgccgcctacttcctggaccgctacctgtcggtgacgcccgagtcggacgacgcgctgcagctccgcctcgtcggggccacggccgtgttcctcgccgccaagtacgaggaccagtacaccctgaggaagatcgacgccagcatggtcgccgcccggtgcggctacactagcgagaccaggcacaagatggtgtcgtgcatggagaccgagatcctcaacgcgctcgactacaacctaagcggcccgacggcgtacacgttcgtggagcacttcaccaggtactacggcgacggaaaaaaagagaagctgttgaaggaggctgcgcatcggttcgccgacgggtcgctgctgacgtatggattccactgctacctgccgtccgtggtggcggcgtcggcgatcttcctggcgaggctggacgtgctggggcatgagccatggagccaggatctcgcggagctgacagggtacaaggccatcgacttgatgggctgcgtgtgcgacatgtacagtcaaatcgcatgtcctcgctttgctctcttccaagagtacttcttcgagaatccatagccaatgtatccataggaagaactgttaggaaacgataggcgaacaaacgataaaaaacaatagatcaatcacaaaagacacgagatttaacgtagaaaatcctcccaaaacaggagagaaaaaaccacgggcgccagccagcaaaatatcttcactatatctgaggtgaggttatatcgccgcacggcggcttacaagagatatatatatagtggaaccctaaaagggatgatgatccgtacggcagaagctggcctttattaaatgtaaataaatttggatcacaactcaacgagaacaagagtctgtaaaagcacatgcatgcaaagcatgatggcttcaattttgcactgttgtctgtacatcgatctgtaaaaccaaatttgtgaatttttggttgaaatacatatgattcatctcaattcaaaatttattactattttttggtactctgttctagtgttctgtgatctctgtacaacataatctatctctgtcgttccgttttttttttactgggtttgcattcgcgaactagcgatgtcccgatgtctagctagtatctgttgcgttaggatgcacgtacagaacggcaaataaccgcttagatcaaattgctcggattagtgctttcctagtgaaggaaaatattgacttactagagtcctcgcgccgggactaatgtctttggtctctccggttgttttcccttttattctgtagtactccgttgagtttctctagtctcactcagttgtcaccctgatcccccaactgtaatcttcggtactgcttttctctctctaatatattcggcagaactcctgctgccattcgtcttaaaaatattgctcggattagtatttcttccatttaaaatataagatgttgttaacttttagatataaagtttgatcatttggctcaataaagaatatataaatattatttatttgagtcccgctccggtgctttctacctggagtagaaagcaatctgagccgttgatcatatttagttggagggttgagatttagttctactcccaccagagttagtagtagtagaaatttggaagagtatattcgtccaggataataattcacgtaggggtattatcgtagtttatcagtatctaactcaccctttccctgcgccaacccgggccactacatcgcgctcgtcaccctccgcgtcgccgaggagatgcggccgccgccgccaccgccggcgcgggccgagcggcacggcacgggcacggtgcaggtgacgcgggtgaagctgctcaagccacgggacacgctgcttcttggccaggcgtaccgcctcatcaccgtcgacgaggtcaccagggtgctgcaggcgaagaaggaggagaagtcgaggagggcggcggcgcagcatcacctggaatccaagcccgccggcgccgttggagttgggatcaattccagcggcgacgaccacacgaggcctattaggcctgcacatttgtatattgtttcctgtagatgcagttggtagtaagacaagtgctagagatttgccaagttaggtgccaacacctgaactcgagttcccctgcaatgaacaaggtttggtcgttgaagaactgaaatgattgacagaacagatcatcaaagggaaactggagcatcatgccatgtttgtacatggctgcaaatatgttctgttggggataactaccctaacctgaatttattttcctttcttgatgaatcctactctctcatgtcctaaacacaactttggtgtcctaaattataatgctatcaggaaagcaagtgcttttcgagccaaacctactcatacaatttccatgtatcacccatttacaaataccaatcataaaaagtttcagaagcttggctagcacatctgtccaaaacaacatgggtttgtggctgtacaacaaagcaccagaaaaaaaaatcaaccattactggttggttgcccggtacagatttcagtagacagaatgtgtaacatcccggcctagggcttaataggattaataaaatactcatatcaacaagttacaacttcttttccggaagccagtctccaaagaactccagggttaagcatgcttggcttggagcaatttgggatgggtgaccgaccgggaaattcttcccgggtgcacacgagtgaggacaaagtatgcagaaaagatatgtgttggtctgcttggcctggagcaatttgggatgggtgaccgaccgggaaattcttcccgggtgcacacgagtgaggacaaagtgtgcagaaaagacatgtgttggtctgtgagggcagtctatgacctatgaaagctatcagatgtaagcgggcccggcctgggagagggagagaggacgttcctggcctggggttgatcgacgggggcgtcgatctctcttaagggggtgagggtgtaacatcccggcctagggcttaatagtattaatagaatactcatatcaacaagttgcaacttcttttccggaagccaatctccaaagaactccagggttaagttctcgggtgcacacgagtgaggacaaagtgtgcagaaaagacatgtgttggtctgtgatgtgaaagaaaaaggcccaaattccatggcagagagccacacaaatcaacgctgtgtggtccttctcctggagcttggagatgacggacatgtacaggtcgcgcacgcagcgaggcgctggtagggcacgccggccgcggtcaccgcgtccgcttccttcacgtcgagggacatccgatgtgtgcaaacagagcgaaacgattttccccttcaatcaacgctggcagcgccgccactgatgggagtagcgataaccctttttttaggagtagcaattgtacttgatgcgagcgatgagacagagaaatatcccatgccaaaattacccctaatctgtattaaaagattactaatataccctttaaaataaagggtcgagattaattctacttgtagtaaaatactttaagtagagagcaccggagcgtcactctatttattttattttgttgtgacttattttattattaatggtaattgtagtttagcatatttacactatttttttaataaaatgaatgatgaaatgttatgttcaaaagtacacaattatagcgaaagggcctgtagcctaatggttacaagagcctcagtagtacctgaggtcctgggttcgactccctatgggagcgaattttctagaatttaacggcgttgtgttttcagtgataggcaacgtactcatcgacaacgatgctcctgttgtgacttcgtcaatctcaaggatttgacggcccaataggggcaaggtttgcgtgcatgtgttcatagggggtgattgcgcgtgcgctgtgaatgtcttcaaggatttgccaagttacacaaaacgacaagtagccaggttacacaaaacgacaagtaataaacagatccaaacgtaaataaaacgtaaaatacttacagaagaggcacttagtcctcacaccgaaagagaacgatagcagcggaaaaaggcgatcctagcggggcttcagctccactccacaggcaaaactcaactgtggtatgagccttggtcctctaactttgagccgcggaaaaaggcgatcctagcggggcttcagctccactccacaggcaaaactcaactggggtatgagccttggtcctctaactttaagccttggtcctctaacttcatcttcagccttggtcctctaactttaagccttggtcctctaacttcatcttcagctcagaagcactacacttctgaaaagggggaaataatagcaaggctgagtacaaccaccgtactcagcaagccacaccaacgatgcattcgtgcaaggggagacaaagaggggttttgggggctatttgcgtaaaggcggttgtaaaacattttattgagcaaacagtaaacagttgagtaattaagataatattaaatctccacttatcaacgctacaccacgttgaacaggcccaaccaacccacctgaactacagtgcattgggtcgatttattaagtgtgagactaatcacggtgaatctggtcgatcgcccataaccgtgggcacggctattcgaatagttttactctggccagaggtgcacaactgtacccacaagacacaatccaccggcatgtcaccgtgtcatcatgtgcccatgatgaacacgtcaccacgtcgagtgattgtgacaagacccttcatataactctcccctaaccatccacaccacgctaaggtttcacccccactcctcgcaaggcagcgggcagtcccctcgtgcgccgcggtgaatccggcagctggacaaccggacaccccggccgacccaactccatcacgcccaccctcgccaccggtgcctaggaaagggtcgagctatacttcagatcaagcagttacccactcccgcttgtggtaagcactgtaagtcttccagggtttcccgtgaaccggtccttaattgccatggtgcgactagtaaaaccatgcacccacagcccaccattcagtcgcattttagttggataattacgaccaatgcaacatggtcgggtgtctcgagtacgcagctcgttctgatactaacaaggtctaatactgcaattatcccatcaactgagctagtggcaattaagtatggctaagcatatagttctaactaggtcacataagtaacatgagctagtcgatttattacccaatgttgacaaatgacagatatcaagtaaacatggcacaagcgagccgataggtaaaccctgatcccatgtaattagcaaaacatgcatatttatttgcaaacagtaaaacattaataaattgggatcaacatgctcaaggggaatgtgtgacttgccttgcttcttcacttggatcttctgaactcttatccttgcgaccgcggactttcgaaacaacggaatctacgcgctgtcactcaaaacgaagaaaaactctaataaacaccaaggaaacaatacataaaaagtaaacaaacatatagatctcaattttagatgaattttgcagtttgaatggctcaatttggagtttgtatgaattagatatgaattttagaagtttttgagccattaaatgaatttctataattattaccgatttattgcgcaattattaaatatatttttccaaaggaaatggttgttgctgacgtcaacaaaaaggaggggcgcggaccacgtccacaaagcacgaggcccactcgtcagcgggtcaaatgagttactccaccatggaccgagtccacggtggcggtgcacggccaaaagggcggcggcggctcacagccggatagctgagaggcggtggcgcacggccaccggccatcgacagcgagcggcggcgcgggaaacggtggaagggagaggggtgctcaccgaggacgcggcgatgagatgcggcggaaggcggggagagatggtgaatgtggcggcggcgtttcggcaatggattggggaaggggagcggtggacggggtgcggcacgacgcagcgaagctattggtggcggcggcgcagcgcgaggtggaccggagaggcggcgcggcgtggctggaggtggcgatggcaaaggtggctcgggttggcggtggaatgggagtttcggtgaggaattggggaaacgaggtggaggccggtgtgcggctgggagctgcgtagctgatggtggtggcggctcggtgcagcgactggtagggcagcggtggtggctggctggagagcgctggcgtgcggcggcaatggggaacggcatggggagagcgagggagtgcgcggcaagcacggggaaaatggggaaaaggacgagggaggtgcgggatgcatttttatagcgcggggaggcgatgaggaggccggggagtggcggatttggggtggcaatggccagcgacgtgggcgacatcgtgggcgaagtgggggctcgatttggcgccaaaaattgaggaaaagtgggggatttggtggaggaggtggaggggaaccgattttatgcggtttgggcacgagggcgtgagcgggaggacccggaattggtggcgacgtgggcggcaacggccgtccatggcggcttttgctccggggaccgaaggtagaggaagggcctgacatgtggggtcgtcgggcccacctgtcggggagggagagagggaggagaacccaggggaggggttaagcagacttaggggtagaggggagccgagctgggccggcccaagagaaagaagggggcgcgcaggccgcgggagagaaggaaggcttgggccgaaaatggcccaaagagaggaaggaggattttatttgttttctatttaatttaattggttaaataaactttgtattattataattacttcttgagctccgaaaattcgcaggaaatttcaaagggttcattagggcacagaatattacaaaatattctcggccaatgatttttaaagaaaattttcaatttccccaataattaacttgattaaattgctttaacttttattaaatttctagaaaatggattattaaatgatttttaatcccgaacgaaaatcgggccgttacattgcgcgtgcgttgtgaatgtctatgttgtactgtgtaattctaataaaaaagggccggcccagtcttcgaagatgctcatagaggtagggtttgcgtgcgtgtattcataggggtgagtatgtgtgcattgtgaatgtcagcgttgtactgtgtaagtctaaaagaaaaggtacacagttatatttagaaaacagcatgtatttaaaaacaaagggagtacttaatcaagttggcactattcatggctgatcattaatcaatagcaaatttttttattggacattatagatttatcgcagaacactctaaaaagaaggctttgttgtaggacactttggttttctggtaattagctaaaatactatgtgacaattttttaaccattttttgttcaattggagaaagacaattttggaaatgacgtttttacccatgacaaattgcacactcaaccttgttatattttcgtcccaggcaatgttttttttaaaacaaaacattttggagacaatcaacagaatggaaatttacaaaaattcaaaaaaaaatattcgaacaaaaagtttgtagtttgaaaaaaaaagggtagtgacacctctatcctcgccaacttggacaatcaggccgacttagactgggaggctaccatgcatctatgatagtagtaccagtccgagtatacataagtttgtacacacataacaacagttgatcagagtagataacttcattacattactatgatagttcttaagaaggttgccatcatggctagaccctacatgtacaaaacttcagtataaaatatggaggcgaaaagaaacaacgtcagtgcaaaagctaacggcggaaagcgtctaagcatctaagcactctaagcatccaagcaactaactttttccataggcatggtttgggaatttagcacaaaagacttcatgtttcgttggtgaactcctcgacgattgggtcaacatcttctccttcttcaaaacctaatatgtcggtgatatgggaccgggagtatcatgaccagaggcttgaggcagacgcaatcgcccacgtggcctggcaccttcggggacgtcgggcccgagggtgaggtgtccgccctcctcctgatttcccccgagggggggtcgg

SEQ ID NO: 17540 - DNA, 20359 bp, Oryza sativa
  unsure (1)..(20359): unsure at all n locations
ccaaagaacacaggagtagggtattacgcttcccagcggcccgaacctgtatacatcgtccgtgtctcgtgttttttcctgggacgcgatctttccacacacagcgagagcttgagatctcaccctaagcccccggccgaactggcaaaggggggcctgcgcggcctcccggtgaggagccacgagctccgtcatctggcgcgccaggtagggggctcagcgtgtgttttctgagctctcagactcttccgtgggcgccaagtttcccttgttcagcctaatggccgagcaagcaaaggcgcacgacctctctccgagtgtgagcggcgacgacggggagccgaatccacgccgtcgagctcgtactcccccacctcctccgcgccaaagccctaagcagggggaggcgcttgagaaggtcgacaagtccatggcatcaccagccgcaggtgatgcaggagaacggcgagatggggagcgtcgcctcctcgtctacggcgacggcagcacgcctcagggcgcgcttcangctactggcgcgctcttacgacacccgcctgtcgtccatgacccggagtctccagcccaacgatggctggaagatgtggccaacttggtcatgacggctcagcagcgcctgggtgctggtggacggtccgccaccaccaagacctccggcgccgccaccaccggttccgtgtcatcaaggcggagggcgcggcgagcggcggcggctgcacgtcgttcggctgccactccctcgtcgacacctccgactcgggaggatcagcatggagagccggatgcccgcctcgacatcgagcgccggcgtaatagccggcgtactccccgcgcaacggagggcgcctcttcgtccagagtgtcacctcgacagggacgtgaggaccagccctccgtgcccccggctggtggtgtcggctgtagagcctttgtggcgagtcttcggaatgtccgttggcccccaaggttccggcccaccatcaccgagaagtatgatgggagtgtcaaccccaccgagtttctccaggtctatacgaccgggattgaggccgctgggggtgacgacagggtcatggcgaatttctttcccatggccctgaaggggcaagcacggggttggctaatgaacctgccacccgcgtcggtccactcctgggaagatctgtgccaacagttcaccatgaacttccaaggcacatatccgcgcccaggcgaagaagcggacttgcatgcagtacagcgaggcgatgatgagtcgcttcgctcgtacattcagcggttttgccaagtccgcaatactataccatgcatccctgcacacgcggtgatctacgcgttcagggggggcgtgcggcacaaccgcatgctcgaaaagatcgcttccaaagagccccagactactgcggagctttttcagctcgcggaccgagtggctcgcaaggaggaggcctggacctggaacccctccggttccggagtggcagcttcggccgcccccggatccgccgctcagacagggcggtgtgacaggaggaggaagaagaggtcagcccataccgacgacgagggtcatgtcctcgccgtcgagggcgctccgcgggccacccgaaaggggaggcctgcgagcgacaaaaagaaggaagccgacgctccctgacctcggctacttggaagagcgaaggcggcgcgcggccctccgagccgcgcgctaccagcagagcctgcggcgctatcatcagcgccacgtccgggcccgatcactctgcgtcaacgacctcgtcctacgccgcgtccaaacgcgtgctggactgagcaaactctcaccaatgtgggagggtccgtatcgagtgatcggcgtcccccggccgggctccgttcggctggccacgggcgacggcacagagctgcctaacccgtggaacatcaaacaccttcgtcgcttctacccctagtgggggtcgggtgtcaggttttgggctcgggccaaccccgcacccccccgggcgtgcatggttggccgggggcttatctttttttctcttccgtatttcaataaaagcattttcgatttcctaaaggctgtgtctatgcttttgtttccttttgaagaatcttgacttgaaataggtcactcgtgttcaatcctgccctcgggggctcgggtcggctaaaatcgccaaacggggcccagaaccgagtcgtgccccggggcgtggtgaactccgggggggaatcggcaaaaacccacaatcgggtcacccataaccctcggtcaccacgctcccggcctggccagtctcgacatgtggatctccccaggcactagccttgacccgcgccgtttgaggctgggacctgggcacgagcccttattcaagccaagacacagaaggaccatggcacagaccatcctcgtctcatacacagaacaaatgaaattgacgcaaaaatttcctctttatttgattgcagattaaatcagcctataacaagaagggggcctgaaggcctcggaagaagaaagaaaaagctattcaagattggcgggggcctgggggctcactccgacgcgcccgggtcaccagccttgtcgtcgctgtcatccgcaccatcgtcaccgcattcctcgtcggagtcgagggcgaacgcgaaccgaggggccgtaccctcgaagctgtggacgatgtggtcggcggcgtcccggtcctgcgcgcgtgcgccgtcctcggttccggaagggaactcttccagcgctgcccacggggagaagtcagggtccgagaggcccccaagccgaacggcggcccaaggcccccgacggccggagttggccctccgcctgcttgtcctacggtgtcaggcgcccccgaccctcaggatagcctcggggccactgcgggaaggccgcgcctgtcgccctcttaccccgagggtatcggcgcagaagccgagggcgccccgcgctgcctctcggatgaagagcgccctggagatgcggcccctagcgaagaggatcggccccgccgaaaggtgcagcggcccgtctactttgttagtgaggccctccgggacgtcaaaacccgataccctcgggcccagaagatgctatacgctattctgatggctccgagaaaagcgccatcaccatatctccaggcgaagcaaatcggctcacccagattcgtacgtcgctcaagtaatgtggcagtcttgaatagaccgcccattatggacaaccaaagttaccaataccaatatgcatggattaagaccgttgggtattttgcccaactatggagaccggtcccacctgtcaccaggctttaggggtggcgtcacacctgaccgcttcccttgggaagggaaattgctctggtataacgccgggggctactgtcggtgatatgggaccgggagtatcatgaccagaggcttgaggcagacgcaatcgcccacgtggcctggcaccttcggggacgtcgggcccgagggtgaggtgtccgccctcctcctgatttcccccgagggggggtcgggttgcgtttgccccggccccgagggccgaagcaccccgaccccttaaagaagtctgcgccacgtatatgggataagtgagcacagctgtgctcacctaacagcatttattgcagtctggtcaagcgtgtcacgctgcatgcaacgcagtacagcacgctcttttatccggtctgtgaccggtcacagaccggtcagatcaagggttaggtggcgactggcggtctgacgcacgccttgccccatcccgtcaagacgaaagcctctaggcactcgtctcaagccggagctagcgtgttatttcttagagatggcacgttagccctggtaaaatgaataccaggcttcatcctaaccattacaggcaaggcgttacacgaagaagggcaaacatgcacgttgttaaaccgacgcgtggtggacaagaatgaccggtctgacactggtcgcatcagcaacgggcagccacgatcccacgttgcacctgtctccgccgggagtggaggcaggtatgggctgtcccatcaaagtgtcatttggacggcaaccataccgatctccgtccataaagagaagaaaagtccagtttggaaaggggagggtgcatgtggtatccccttgaagtaaaaaaggaggacctggcccatagagaagggttggttgattcttgagagattcagagcctagaacgagggagagtttagctcataccttgtattcccttcattcacagatccaccaaagaacacaggagtagggtattacgcttcccagcggcccgaacctgtatacatcgtccgtgtctcgtgttttttcctgggacgcgatctttccacacacagcgagagcttgagatctcaccctaagcccccggccgaactggcaaaggggggcctgcgcggcctcccggtgaggagccacgagctccgtcataatatatttgtatagagagcaagggtgagtattttttactccaaaagccaggggaaagatgacatgtttagcttagtcaaggaggctagggcttacgaatcttttaaaagagttgattcacaaaagcactagtttgtcaagttttacctattaaaaagaggctcacacataagcaaggagcggtcacccttactcctagcaacatgggaaatatagaaagagagaaaccaaagagtctttcagcaaacccaactctcaatgatgacgctcgttgcaaaaaaaaaaaaagaagaagaagggaggaagaacttaggctctggtgggagaaaaaaagactagcggagacattgccaaagtcaatcgccaatgtgtagcccttttttcctttatatctgtaaatattgttttttcctactatattcaacggtattgacacgcctcggtgctgatttgttcaaaaaaagaatcacatggctaatcattcatatgtgctaatccaatttagggtatatcaactgcttttggctcataaattagtgttcccagctcttctataggagtgcatgaaacatcaacactctagcggtactcaagccaaagctagataaaccaaaacgcagtaaaaagggttaacaattttggggaaaaaaagagagggaacccataattcaaatttttggaaatatcgggatgaaataagttgtattctaaacaagttttggtcaaatttgaatcttattttgcaaaatttcacaacattttttatgcaaattttgaacaaaatagttttcgtgtgtgtgggaatttcctttagaaacagaatttcaaacccactcaaatttgaacatgcaaaatacggataaaatgtatcttgtattcttattccacttttcatcgagtctagtacgtacttttactttacactaggttatattgaaataagtttcactagtacactaggttgcagcatataattaaagaaaaatcttgtaaaatattggtacaacttgtaaacccttttgatattaaattttatacaatttctatcaaatgaccctcaccggacctcctccttgcggtgccccgcatctccgggcaacgcgcacagtacgttccgccctcactagcaactcctgggtaggggacatccatggcgctcttacagtgccggtcatctcccaattcctactgatctaggatgcagtgcgtcctatccagctctcccggggcattgaggaacatcttgtctagtgttcgactggtgaccaatgctattaagcccactcaacctaccatgctttcttcttggggcagcgcatctttccttgcgccgatctgctctggtaggctaaaggctctgccaagtgcaagctcttcctccgacttgcgtttcagcagcgttggtggatgaccgatctcctgtagaagcgcgacatcgacagccacttggcatgtcctttttgtgcctaggagtttgaaatggcgaatcacatcctcctagacagtgtgtttgcacgtcaagtctagctcctcaaactgtgttcccctggctggcctgggctcgccccctcctagggctgctctattcaggtctggtggccatcggccagggcccgtctgccagagcatcttcgcaagggtttcgactctctcgtcctcctggtttcctggcagctatggaagaagtggaataccaaggttttcagcttctccctcttgccgtctcagcggttttagagtccatcctttaagagggtcgtctctggtctcttgctaacacagcttcttttggggatatgttgggaacataggggagttctaccccctatttccctctttataggagtagctttttttagctttgttcccatttttcagatctccttcctaaaggtctctaccctgtaccagcaagggcatgtctggccttttgcattgtgtaactaaaactctatttttttaatatactgacgtgtaattcttttgcacgttcgcaaaaaaaatatatcaaatgaccctagtgtaaagtgaaactacgtgctcaacttggtgcaaactgaaacatggtgtattttatccggtgacagaacgaagtgctatttactgttatagtgttatatgatgcaaaatcatctgaataagtaacatcttactaaaaccaaagcctacatatgccagtgtttctggcagccaaagctgaacttgcaaaatacaaaactaaataattataaaataaaaacctgcatgtctgcaccagccttttgtcctcctcgcagcaattttatcctttatgcatctcaacacttctcaacttgcagaactgaactcagcctttatttgccttatccctaaaaaagatgatgctacagacgctgatcacttccgtcccattagcctcatgcatagcttcgccaagattatcaccaaaattctggcaaatagacttgctcctcaactaaatgaaatgatctcacaaaatcaaagtgcttttgttcgtaaaagggcgattcatgacaattttctgtacgtccaaaacatggtgcagatgcttcatagatcaaaaaaacagagtctattcattaagatagacatagcaaaggcgttcgactctgtgaattggccatatctcctggaggtccttcgtcatttcggctttgggcatcgttggttaagttggatctctaatctgttttccacctcctcgtcccaagtgctcctaaatggttccccagggatgagaattaatcatgctaggggactccgtcagggagatcccctgtccccgatgctgtttattttagctatggagccttttcaccggatcattaaagcagcggagagtgccaatgtgttagccccgattggcatgagaagtggcagattcagatgttctctctacgcggatgatgtcgcagtttttgctctcccaaatcccgatgacctgaatgctctttctcgcatcctttcgtgttttgcacaaatttctggtttacattctaacatcaacaaaactgagattttccccatcagttgcaatggaatcgacttgaaacagcttcttgccggctggccagggcagatcaagaatttcccttgccgctacctaggcctcccgctccacttcaggaaattaaggaaaattgatttccttcctcttatagacaagatcggggccagactaccagcttggaaaggtcgcttctttacctctgcaggtcgtcaaaccctagttaactcggttctgagtgctatgccgatgcatcatcttacagtcattcatgcgccaaaatgggtcttcaaaagaatcgaccgtttcagaagatcttttctgtggaagggcgaagaccctgatcattcaaatccaagtgatagtctagtcaattggcagactgtttgcaaaccgaaaagcttgggagggttaggcctaccggatctggacaggttctctagagcactccgactccgctggctctggttcaagtggaaagaagttgataaaccctgggtaggcatgaatgtgccttgcgatgagatggacacaagactctttcaagcggcaacgataataacgattggtgacgaagcaaaaactagcttctggcatgataattggatccaaaaccattgtttaaaagatattgtgcccagttgttttagcctggcaaagagaaagcaaagaacagttcagatggaaatgcgagataatagatggctcacttccttcagacaattctcttccgtggaacaaattcatgatttggtacagcttggtggattactccaattggtttcgctttcccaggatcctgacgacatcacctggaattggaccgagtctggcgtctacacaacaaagagtgcttaccttttccagtttgaatgctcatttgccaccaatgagtttgattctctttggaaatccccgactgaaccaaaaataaaattctttggttggctagttctccataaaaaaattttgactgcccaaaatctgctccgcaggcattggccttgcaattggatatgttgcctttgtggttgtgcctttgaagatacaaatcatttgttcagtgactgtgtgtttgtcagacaagtgtggaccctaatttgtcaattccaaaacttgtcttcggtcggaataaatcctgtcctggatgtgtcaacatggtggtctggaaccaaatttgcaggctctaagaaggatgtgcagctggtcaggggaactcttctaactacttggtggaatatttggttggaaagaaatagaagaattttccaaaactcttcttgttcagatattgaagtagcttattttatcaagcaagctattgatatgcgctgcttggcctttaaacccccatgaattttttagctttttctgcagctgtaattctctttccattcattggcttgtaacctctgaacctatgtgctactttgtatttatttctcttctaatgttaaattccgacagatctcctgccgtcgttctccttaaaaaaagaattacttcaagagtgctagaaccaaccaatcactaacgacgattttgatctcaaatttttcaaatcaattcgcagaatcattttcaaaagtttcaatcctccctcttgttagttgttacatttgaatccttttgcagccactcgagagctagctaggagtggtcattagtaccatagaagtagttccaagttccaaatcctgagcacgtactacgcttacattttgcatgagatttaactgaattcgcttcacgcaactctctatatattgtgtttgctctagaacctgaagattttgacaggtgataccagtggttaattcgtaaatgctcagtgtctaccggaacttctctagcaatgtgcatgaatggataatattataatagtatgatatatcatctttttttaaaaaaaaacttgatatatcatctcccatgcgtaatcctctgttccagactctagtggatttaaagaatttttgtactagtggactattttctgtgtaacggtgtgtattagtgtatgtaatatcctatgatcggtgaattaagctatacattaattaatctattcatgacagagatcgagtcagggtgcaaaaaggaaaaagaaaaaaatggaaagaaacacagatgagagaactaagagaagcctaattacggttttactcctatatacgcgcgtaaggcgcaagctaaattaacgactccaaacacacgggctttacctctaatcaacatcgttaattcgatcctgattcggaaaaccgcgcgcgctctacattttgatgaattccttcacgcgtgcgcagcctgatcagagtcggatcgtgtcaggcaggttaaaaggcgagagcgcgacaccatccttcttccttcctcccgccaccaccacgagcgtccaactttcttcccgccaccgcctcctgtctcctctcgctctccatcgatctcacttccggcgagaccatgggggatttgatcttggatccctacatggaggacgcgatcttggatcatccctgcctcgccgaacttcttgcagatcaaacagctctcccattgttccatcctttctccggcggagccactccgcagatggtggataccgacaccttcctccgcgccatcggcgcgctgcctccgcttgcaccgccacaggaagctccgctcgcaccggcgccaccggattccccccgtacccctcacacctacggcagcctcctccccgtctacggtgatcatccactgctcaccggcgccgtcgtccaggagcccttgccgctgccagaaggcggcgatcaccctgtgcctcccaagaagatcaaggtcgcaccgctgctgccagagcgcgccgatcagccggtggtcaccagcaactcagcgacgacgacacggccgcagctgtgtgcgccctacgacgacgaaatcgaggccaccctacgtgccatggagacgaaccctgccgagcggccctccccgtacttcttggagacgacacagggcgggcggatgaccgcgctggtgcgcgcctcgatgatcgctttcatggacgagttcagccagttccacgagctcgccgacggcacgctccagcgcgccgcctacttcctggaccgctacctgtcggtgacgcccgagtcggacgacgcgctgcagctccgcctcgtcggggccacggccctgttcctggcggccaagtacgaggaccagtacaccctgaggaagatcgacgccagcatggtcgccgcccggtgcggctacaccagcgagacgaggcacaagatggtgtcgatcatggagaccgagatgctcgccgcgctgggcttcaaccttggcggcccgacggcgtacacgttcgtggagcacttcaccaggtactacggcgacggagaagaagaggagctgttgaaggaggcggcgcatcggttcgccgacgggtcgctgctgacgtacgggttccaccgctacctgccgtccgttgtggcggcgtcgtcgatcttcctggcgaggctggacgtgctggggcatgagccatggagccaggatctcgcggagctgacagggtacaaggccatcgacttgatgggctgcgtgtgcgacatgtacagtcaaatcgcatgtcctcgctttgctctcttccaagagtacttcttccaggattgatagccaatgtatctataggaagaacaagagtctgtaaaagcttatgtaaaaaaaaagtctgtaaaagcaaaaccatgcaatgatgcaatgcatgatggcttcaatttgtagagttcgtatgtacatcgatctataagtccaaacttgtgagttttggttgaaatatatatatgattcatcaattcaaaaaatactaacttttcgtacttggtttctgtacatcttgatcgatctgtaccgtctctcttcttcctactggcctactgcatgtacacgcattcgcgaactcgcaacttctcgtgccacctgccacgtgatatgctggtagtatctgttgcgctaggacgcacgtacacaacggctgaaccacatagccaagcttcctttttttttaacgaatcagcattcaggtgcgccaatttcattgaatatactggaggaaaaaactgtataggaacaagagatttacaaaaggaaaaggaaggggaaattattttctaaaaaaactaaggattgatatgtgcaaggcattttgttactgctagagcccaagttttggtctcctcctttattttcatagtgatggatattgtcgagagctctatgtgttcaaacactctattgtttctctccttttatatctctcatgtcgttagtagtagcagcctgcaaacacctttcctgcacaccaggtatggactgtagcgggaatctagctggtcggcttcatgtgttcttgcacattcagtttgcgagcatgcatgttccatatccttctcgtatatctacggtccacgaggaggtggaaggttgcctccaaagtgtgtctgcagtaggcattaggtgtttttttggacatcctcgaatcacttatttgtctaacgtccagtccctattatgaatcacaagccaggcgaacagcttatatttgtttgatgcccacacatagtttgtgctagtggatccaaggaacttttttttaggtggaaccaggtactcttcatgatttgtgagctgcacgctttgaactgttgcccacaggatcactagttgctccagaagctcagttgtcatggctacagtattgagaggtttaggtctcgtgaccaggtattatctgcgatgacatttctcaaggttctattcttcgttttggagattgcgtatacgtacacttgtggcatgacttccttcgggtggcgaccatgcatccaggccgagtcccgaaaacgtgatgctactccgtccccaacggttatcatcgtaatcacgaagagtattttatcggtttcatcacatggggtatccaacccaacccatgccttgtttgaggatttctatttatgacatagccatttgacatgtagtgctagtgcgaagctttctagatttagcgcgtccaggccgccatatataggcaactggtgagcatgatctttttcagtttactttgcatttcccgcccattatgttttcctgacccgctcataggaagctctttcgttgtttgtcaagcacttttatagattctttggtaaatttaaatgttattaggacatagactgactgcggggaaaacactgacttgaccaaggtggtgcgctagctagccccatgtttctttcccgccaagtggccatcgttcctgttgatttatcgaagagtggttgcaggtctgccttgcatgtgcaatctcccaacggtgaaaggtagtcccaggtattttattggtagtaatgtccgcgtcgttggtatgttctttggtacatcgtcgagatctatgttctcacacctaatgagtgccgtctgcgatttttggatgtttgtacaaagtcgagctttcggagccaaattttttacacggattgaacaaagtttcggggctaggctttctgatattgcttactcccaataatacatataatccacagtgttattagatagacaaaacaaactatgtaatttctctaactctatttttatattagatttacaccaatatttagtttgataatgatcgaattcacattcagaacaattttctctatatgctctaatcaaatccagtaaaaatctgcaggggtgcacgcacgttcatcaaattgctctgatcagacgaaagcttagcctgcattcgtttgcagggcttcccaacttccccatctcgtttggcacaattcaggactaattaatcaattaatcgttcttaagtaattttgttaatagtgtctctaccgtgttccttagagaaatagatgtattttaagaatttaagaacagtagactttttttttgtgtgttccggtgtatatggaatggagttattatcctacccaaaatggtattgatcggtgaattaatttacagcgctagaaattaattccattgcaggacagagatccagtcggagtgaagaaaaggaaagacacacatatgtgagaaacccagttgccgtttttacgcgcttctttgatggatttttcttgcgttcgtgtttgagttttgatgactccagaacgatttgaaaacattaacctgatacccaattttcttgtacccaaatttacacggacgccaaaaggaaaaagaagaaagaaacgctttcgtaagtcgacatactaattcaggactataaacaatcaactaatcatcattaagaaattacagctatccgttaatcccatcaggaatttgggacagagtcggagaccgaaataggaaaggaacacaacctaattccaggttttttacagcctagtacgggttcacaccgattcgcttggttcaaatcaaatcgatcaatacgatcccgattcggaattgcgcgcgaagcctggcctgaatcggatcgaacacccatggtggcagccaggataaaaggcgaggagcgcagcgcgacaccatcaccatcgcctcgccagtcgccaccagcgtgtgcaagtttcttcttccaccactagcctctgctctcccactgctccggcgagcgagcgagagcgaccatggattcgatcatggagccctacgtcgccgaccttctcactgacgacataacggcctcgatggtcgagctcttgtccggcgacggcggcgcggcgcagatggatgtcggggttcttgaagcgtacctccgcgccatcggcgcgctcccggcgcatccagcggcgcccggcgccgacctggccgccgccgccgaggtggagtccatggcatcgaatgatgacaccaacggcaactgggacacgaaggtggatgccaaggtgccctctgcttttcttccgccgccgccgggctttcctccgcttcccgttccagcgctggccgacgagcccgtgtacgccgctcccgtcgacgaaggcgacgctatcagggcgttcatgcagcagctggagtggagcgagcagtacaacggcgacgacgacgctccggcccccgacgactccatggcgtcgcgcccgcagctgtgcgcgccctacgacgacgacatcgacgccaacctccgtgccatggagaaggacgccgccgagcgcccgtcgccggactacctcgacacggtgcacaacggtcagatcagcgcggcgtcacgcgcctccctcgtcgcctggatggggaggctcacccaccgctacgagctcgccgccggcacgctccaccgcgccgtgtcctacttcgaccggttcctgtccgcgagagccctgccgagctacaccgagcaccagctcagcctcgtcggcgccacggccgtgtacacggcggccaagtacgaggaccaggggacggtcttcaagctggacaccagggagatcgccagctacggcgagttcgcgtcggcgcaggaggtgctcgcgatggagagggagatgatggcggcactgggctatcggctgggcggcccgaacgcggagacgttcgtggagcacttcacccggtacagcaaggggaaggaggagctgcgcgtgcagcggctggcgcgccacatcgccgaccggtcgctggagagctacggctgcctgggctacctgccgtccgtggtggcagcggcggtgatctccatcgcgaggtggacgcttaacccgccgggcgcgctgccgtggagctcggagctgcacgagctgacggggtatagctctcaggatatctccagctgcgtcctcaccgtgctcaacacgcagtgatcagccggtgatggatggataatagttacaagaatctggcaagaaatgtatttttgtaatttgtgaacacattggcaaaaaatgttacattgtgttgttcacaatcattgtctcagaaagattgcttctagatttatcaatctggattcatatggatgtacaacaaatgtaaccgtgcaatgtttcaatttaattaattcatattaatctatgttgtcaatttttttataactatttagctaacatgcaaacaacgagaggatattttctcgagggatgaaaatccatatcccttcttcgaggatccatagccaatgtatagaaagaacaagagagtctgtaaaagcacgagcatgcaatgcatgaatatgatggcttacattgatctgtaaacccaaaactctgtgtgttatttggttgaaatataggagtatgtgattcatcaattcaaatttactagattttggtagtctgatctctatatattgtatacactttcgtttctttctcctactgggcatgcattggcgaacccgcaatgtctaatgcgcacgtttggaatttcggttcgaaattcaaaccctcccctgacacaaaactatgtccgacttgtgtgtgtgtgtgtgtgaatttagcaaattttatttaaattcgatcaacattggaaatttgagcaatatttatcaaatttgaataaattttgctaacttcacaatagtttgttttgtttgaaatttatgggagggggattgcaaggtacggcgggttcacgtcggcgcaggacgtgtccctcagtccctcacggagaacgcccgtggtcgcggcgctcgactaccggctgatctgccagcgcgcccaaccgcggacgcattcgagacttcacccggtgcagccgaggagaggaagaacggccgacggcgggtgcagctcagctggcgcgcgacgtcgccgacctgtcgctgatcaactacggctgcctggctaccagctgccgtcactactacagatccgggcttcagtgacgggtcatctgtgacgggccaacgcaactcgtcaaagatgagtcatctctgacgggccgaaaaaatatcctcttcaatatatggctaccagggaggacccgtcacagatgtgaagtcatctgtgacggcttgcacttgtaacccgtcacagatcgttgtgacgggtcacaaccatggctcgtcacaaatgacatgtcatctgtgacgggtgtagtattatgaaccatcacaaaagagaccactcatctctgacgggtctttaactaacacacgtcacagataacgttatctctgacgggtggtagttatgacccgtcagtgatgagtgaaaattcaaatttttaaattttgcgaaaaacctcggattgaaacatgtcctatataaaagttgtagctctcaatgatatccacaactttataactaacaacatttctattagagatcgtttacatccccgaagatgcattacaagtgatcagatctacttttaaaaacaaaattttgagttttttttcaaatgacatggatggatacatgccccgtatcaaagtcatagaactcaatcagatctacaacattataattgaaaatattttcatttcacaaaatttacatgttataaagtgagatatattttgaaaaatgaaattttgaattcttcaaacaacatctgatgaagatattttctatgtaaaagttataaaacacgatgagatctataactatttagttgataatattttcatttgaagtcatttagggtgttaaatatatgttaaatgattcagacaagcatagacaaaataataacattggattagtagtcaatatgtgttgagtaggtgagttggtaagggagctctatatggaggttgaggtcttgagttcgaatctcacttgtagcatacaagttatattgcgtgaaaaattgtgaatttgtaggtagtgatgtgtaaccatgtataggatggctagtaaaattcaaaatatttttttgaggttttttgttgcatttaaaattcaaaaattgtatttcttgctttgtcatcagtgacgggtcgtaagttacaacccgtcagagatgagtcatcagtgacggtcaggtagttacgacacgtcactgatgactcatctgtgacgggtgacaagttttaacccgtcagagataacttatataccggtcagagatgggttatctgtgacgggtgtttcatccgtcacaggtgattttgtcatcagtgaccactaatcactgaccaagaccaaacccgtcaaaggtgagggtttgggcccgtcagagatgacctggtccggcgtagtgcgtccgcggcggcggcggcggcggcggcggcgatcttcatcgggaggtgttcgctgaacggagctgcatgctggagctgacggggtacagctgcatatctcctcgccatgtagaacgcggtggtcgatcggttgatcgaggacgagattggtaggactgtaggagcagatatcccttgtaataaacaatgttatgttaattcgttcatcatggttgccatgcaatgcaacttgagttttttttttctttttgccccctcagcaagatcctacaatctttattaacacggcccagatgttgtgtacatccatatttgaggtatgaattttaaacttagactctaaggaatatttcttctatgttatctaaatagttataaaagatattattccacaaatatataagtcaaaactcaacttctaccaggaaaaaaacaaattaaactatagcctagttaacggataaccaccattaattttgtttttttttcaacttgtataaattgaatttgatcttgcacgtatattcgtggaatgatctatattaatctattttgtttatattttcgtattcgaatgacatgtaaataactagaaggtgtcctctagtgagtgagtttagaattgtttccccatatttgtaacttgtggttttttgcccttctgaatgtgtacaacaaatgttacacatcctttgtaacatatgcattgtttcaatttactgtagttcgttttcgttggtaagtggcaacatatatacaccattatttagtcgttgcatttcattgaggggataaaattcaaacatttgtcatggcaggagcgagataatgttgtactaatccggtaatccctgtacagttttttctctggttttctctaggaagtttctctgagctccacatttcctgtaacatcttaactgggaaaattagcgcatcatgtgcaacgaaactttattgttagtgtaggataagagtgaattagtatagttcattaatcacaatttggttgcataataattggcattgaaccagcactccagcagtaataaaccatactgcgtgactcataacttgttntaagtacatgaataatatataaatcaagtgttcttttccccctttttcaactccgtgcttgcgcttttaaactgttaaataatgtttttaaaaagaatttttatagaaattttgctttaaaatctatattaatttaattaaaaattaactaatatttgattaattatgtgctaattcgtcgatctgttttatacgtctgttgtagataaagctagattcagtcctactcattataaacgggccaaatttaggcccacataggagtttaaacggtctgaatttaggcccaatacttccgcggactaaaacgagggcctgttttgtgattattgatgggcctaattctggcgcgataagcgcagcccgagtccaccagagctggaaattccccattcccatcccaccgccgctcctccacctccccacacgtcgtccacgtccggccgccgcctgccgcgccgcgccgccggcgccgccatggccggggctccctccgtctacgccaatgtctcctcctcctcctcctcctgctcctgctcctgctccacgcgccgtcgcacaccgcgtgctgccttgcaaccgccgccgccgccgctccacctcccgcatcggccaccgtcgccctcgccgacatggccgacccggattccttcttccgccgctgccgcgtgctccgatgctctcgtggcgtggcgcacagctcgggcggcgagcccgcgagcgcgaggaggcgctggcctggaccccggaggggaggggtgaggctgtggttgtgcggcggccggagcagaagacgaagggggtggagctaagcggccgacgacggcgagcccggcggcgcgtgggcctcaatgcagctcctcggggctcctccgcctgtactcccgagcggctcggcggcgccgaccaataccccggctacggcggcggcggaggaggaggaggaggaatccctcctcgaaggccacaaggcagcgcgcgagtgggcccaggtgcacgggcagcacgaggggcgcacctgggccgtcggatcaggcgcagcagccacgttgggccaatccaacggacgagatgcgcccgctcgggccgaagacggaagctttgggttggttttactactttttgtgccccacctcctcttgcatgcaaggctttggctcctcccacccacttttgcttcgcaaccacaacaattttcacaagtcacaagcgcagcggaatcgcggagaggtgagggcttgatttgatctctctcccactctctcctcctcctcctcctctgctttcctctgctccaagacaaccgtgagatttcttctcttcttcaatgtccatgtgtttgtgttggtgatgctgttgctagtagccgctgctcttctagttcttgctgtttcgtttcgttcgccgtggtcctgtggagtacttgatcgagaccattgggtgttgtgtttgtcttcgatcttgagacgattctgtgagagttttactcttggtctggaatgctgcggcctgtgttcttgcgttggtgtgtgttgatgttgttgcggttggttttgaagttggtctgtgttcttgcattggtatgtgttgggctgcaggaa

SEQ ID NO: 17541 - DNA, 1581 bp, Oryza sativa
ttccgcaaaagggggtgttgatggaaacatttttgtttctccctactttagaaaggaatcgtgggaggcaacttggcgtggtgaattgcgtggttggcgtgccgtgtgtgatttcactcgtcctcctccagggcaagccaattgggttcctgactcaaatttattagttgatactaagggtcgtcgccagtcacgcaggatcaagaaccttatggatgaagctgaagtgaaagatcgttctcgtcgtaagaaagcttgcattctttgcggggagaaccattcccgtaaagattgcagcatgtacaatgtagggcatgatgccacaggcgctgatgttcgtcgcgttccaaaggggaagtcgaaaaagaaaaataatccttagttcgctattatcctcgtggtggactccctactttgaagatcgttatcgttcaatttatgtttagtgcgtctgtaattttaatttgaactttcttgcacttttattacccgaatctatttgtaatggccttgtaattttcattttgaactgcactgcactattaatatcgtcatgtatttgtattgcaattgtaatttaaatttcgaactgcactgcacttgtaatatcgtaatatatgtgtcgtgggcttgtaattttaaattgaaatggcatgcaaatttgttaattgcattatgttgcatacatttattgtactgttaccatacgtgcattgtactaatgttgttttcgatctgcaggtatggctgatcaaaatgatgggcagctgatagacaaggagatcgataggaaccatcgatcgcgacgtcttactacaggaactttctgcaatgtgctaaagatgcgaggaccggatcaatattggcgtattgatcctcgttgggttccaaggtgtgtgaaaatatattgtttttactaatacaaggtgtttatattttcatgtattaataacttgtgctctgtcatgttgtaggctgagagcagctgggttgttgacgtttgcacggttggtcgagccttcacgtgcaaggtccgaacgaatccacattgacgcggcgcttctgagtgctcttgtcgatagatggaggcctgagacgcacactttccacctaacagttggagagatggtgcccactctgcaggatgtgtcttatttgttggggctgccgatagctgggccagcagttggcccaacaatggtgaatgctggatgggcggatgaccttctggccagttttggtggtgtgctgcctgttgcactggaggatctcacagatgggcacgggcctacgaaaagttggttgaatcagtttcgacaggatgtcttccctgatgaccaggaggagtggatcgtgcagcggcacttagtcgcttacctgttgtggttgtttggatgggtgatgttcacgggaactcacgctgactccgtggacaagcacttcatccactttgcggagcagattgcagagttacctatcgcggagattccacagtacagttgggggtcggcggtacttgcggcgacatatgccggactgtgtgatgcttgcgtgaggaacagcaagcaaagttcactccct

SEQ ID NO: 17542 - DNA, 2079 bp, Oryza sativa
tgttcggtggactccctacactcagcacgatgtcaatgatcgtgcaccgcacggtctcgcggatctttgcacgcgagatatgcaactctggaggacgacttgtcacctcgtggtggacgtgcacgtcgagccacacaatgtccacagggttctcaaacagttgggcatgtatcaggacttccctccgagagatggtcgtcctttggctgatagtcttcataggttagttcacatcacagttgtttaatcctacattttttaaaataaatcactgcacaacattttttctgatgtgtgaatttgttgttgtgcaggtactccagaaaggggctcgggctttcctacgagctagttattgtgaccacggttcagccgacggtacaagagtgggagcacgcagctgataacttggcacttcagacacctccagacgatgggagttattatggagcttaccttcgttggtaccgcagtgttacacgatggaggtgttttcctccacaaggagatagcaccgtcccccaccaggcagcgattactgacacgtttgcccctcagcctagatcagcttacaactcaatggtacgtgtttatttctggaatttgagcaactagttcaatatttttaaaaagttagcaagtagttcagtatgtctaataaatgtgcaattggttcacctagttccttttcttacataaatgtggaactagttcagtatttataaatgatgtgcaactagttcattatttctaacaaatgtgcatcttgttaaatactcttaataaatgtgcaactggttaaataattttaattgccttgattatttgtggaacaggcggaatttgttgagcacgttcacgtggagtccgacaccctgctgcaaagactagaggcgagacctccagtcgtcaggtctgacgacgtggcgagtgtccttcgcaacttccgttcacgtgctgccgcactactacgtcgtgtctcctgtcggagcgcggcagatgtggtgcagacgtcgggccgacggccatcaccaccactacaccgacgttccagcgtggatcggagtggtccatcctcttcacgtcgcgggtacgaagcggcccacacatctcacggtcgtccttcctttcagcacaccccagcaccggagtacaccagggggtcaaccggatcaggggtacccacgtcgagcacggcaccaccacgtccgcaggtattccaaactccgccttatgttcacccctcgcagggagcatctgggtcgacacacttcccttacatgccaacgggggacaacgtgttgaacacaccagcatggggacttcatatcactccgcgtgcgccagagcagggccacacacagcacacatgtaagtcattttaaacaataacacgctttagtttctaattatatgtatcgttactaactacgccatattttttggtttctccctcttgtacaaacagacgatgagtacggttcggcgtcgacgcatcacggagtgcctgcttactcccctcgcacagcattcattgaggacttcttttccactgatcctccccagggggaagtagggatggattactggcacgcagcacctcaggtcacacagccgacgcaggatacggaggccggtcaggggccagacgtgacaccacagcaggcagctagagataggcacccccctgataatttgacatatcccactgagcagattaggcgtaggaagaagggaggacctagcaagcgtgcgaagggcactgatcgtccttgacttatctatttgtattaaacttttagtcatttatgttctgtccgtactatttgagaaacactttacgattaacttagtactatcagtactatttcataaacttcttcggataattactcagtagcatacccttcgaatgaatcatgacaaattatcattcaaatatacaaataatgaaactaaataattcaaatattttaaccaacaaataaatactacaatttctgaccaaacattatcaaaaccctaaatcacatacatataacattacaaaaatattttcctttcttacacactaaaata

SEQ ID NO: 17543 - DNA, 7653 bp, Oryza sativa
agctcatctacgtggttggtcggggctgaataacacatctttgccttgtgaatagccttacaaaatttcttggctccgtcattatttgtatgtactatcactgtctttcacagtcacttcatcttccattttctttttctgaaagaactgatcactgttctaccttcactctaacgaagacaagaccagtctgatctgacggaatcttttggttgaactagaaaagagaaacgctagactatttcttcgacggcccatgcatggcaagcacgacatacacgaacatacgcgctgaacaaccggccgcttccgttgggtaggaagaaaacttccaagctggccacttggccagtggacagcaccgcatgcactacgccgacttgaccagtttatcaagttattagcaaccgtatgaaaggagcatcttttattcccttgtcccacttactaagacgcgaacgcatcttaagatttaactctttaaagagttaaatcttatttacatatttcatatttcatcaataaatagtttattataaattaaattttatttgatgaaaataatattattaattaccatttaaatttactttcatattattatgattttgttgctataaatattatagtatatgagaaatttaaagtaaaaaaattagtctcgaaggctatattaagtttgaccacgcattagtaagtgggacggagggagtactagattgactggcatccctcgatcagtccaccctccatccgtcataaaatctaacaacatgtattgtttaaatcttgtagcaaaatatatagtaacttctgcacctctatctttcatgtaattttctaacacactttttcatcttgatcaatcatagccatcctcgatcttttccatgtaactttttataaaataatagtgtactttattaattgggaatgaactgcaattgttttccgactcttaaatacttctctggaaagtacaataaaagttgtagtaggagttaagaaaaaacctactccctccatcccaaataaactaatctaggatgtgtttagttcacgccaaaattgaaagtttgactgaaattaaaatgatgtgatggaaaaattgaaaatttgtatgtaggaaatttttgatgtgatagaaaagttgaaagtagtataatgaatctggacaggtagactatgtcccatctaaatagtataggttggacttttttttacggagggagtatataacttaccaacacaacctatatggttgcaatattttcccgagcacacacaatactaaagctcatgtacacactgctataggcccaccgttctcacgcatatatacgaaaatgctcctatcacatgctcaagagctgaagagcaatggcaatcatatagttctcgaaaaagaaaaagcaagtcatatcatccgacctcatcgaaattaatcctatatactccatagatagtagtgagaggaggggaaattaaatgacaaaactaagggcccatttgaatcataggaatgaaaaaattgaggaataagaaaaatataagattctgatagaaatacaagtgtaaaacagatgattgcaaaacacaggaacgactgtttgattgatccataggaaaaacaagggaatttgaggagagataaagactcaaaaggattctttccatgaggttctacctcatgttaaatttcctccaaaacttacatgagaagagatattccatatgaatttcataggattcattcctttgattcaaagcgctatataggaaaaatttttataggaataaaatcctctataattcctatgattttcctttgaatcaaagagggcctaagaaattatacaacgagatgagttattagcgtatgattaattgaatattaaatattttgaactagaaaatgattaatacaattttttaaagcaacatttatttatttttttttaaaaaacacaccgtttattgaaaaatgggatcaagatcccattgttctcctaaggacatccataggcataatgtataggagaagtggtcattatagtttcatatggcctacctcaccattgtaggagtagcccatataacagtccttatatatactgagctacctatataatataagatcttcatttagggaaaaacataacaataatttctctcctctcccctctcctctctcacatggttgttgattgagtgagaccagtgagactcaggttaatccctcctcctactatatatattgtagcaacaatcttatctaatgtgtgaacccactttataacaaggggtattatgcattgaaagtgccctaagtacgcccatgtgtaccgttcaataaaaaaggacgatatgctactcttttcggtttcgacaaaaggacaatatggtgatagttcagcttctctccatcggggtggcggcggctggagggtcccctcacgtacgttatagctgtaagcatgacatccagagggaagaggagacgaacaggaggaggtgtggattgatctgatgtgcaaaggagcaagaggcgtcatcgtatttagatgtggttaatacggagtaccccttcgtaaaaaaaaaactaatcataactagaattgggttttttatgggacagactagtaatgcatcaaaatgtctaaaacccctcttaagagtggtatggctaccaagcgagtagcattttaacggaacccaacgcattatcttttcctccctcattcataagagactaaggttgtgttcgtttcccctagttgaaaactaatgccgtgcgcacagaaaatggagcggtccattaacatatgattaattaagtatattagctattttttttaaaaaatagatcaatatgattttttaagtaactttcttatatttttttttcaaaaaacacaccgtttagcagtttgaaaagggtgcgcgcagataacgagggatatgggttgggaaccctgactaaagaacgcagcctaaggaaagtcacgaaacactgactttatccggcgcttgccattttggacctaaacactattagcaaaagttggtaatttggcatttatcatttactagtatagggtagcaaattttgccaaaaaatgctccgggaccacgcgctctctctttttaatgctaaattggtaaaactttaggatgcatctatacaccaactccatgctaaattttttaccactaaaacttttttgccatttaccatttatttttgaaactaaaccggcaggcagaggctgccaattatattttcaataagcaggagtaaaaacctagacgagttacaagaaaaagaaaacaaaggatgctattgttgtcggccaaacaagttcacagcacgcacaacaactcaacgctacaacccactcaaaatagacaatcgacggagcccaaacacgagtcatcgttgccaagcttgcgcaaaagcgacgtagcagctccgaccttcacttgaaagcatgttatcattgccaagcttgccaaagcaaaccagctccgacttcacggcaaacttgtgtcgtcgttgccaagctcatcacagaaacgaccaagcagcttcgacttcccatggtgaacatcagccaaatccaccgtatcaccgcttcctgcttgttgttggcaccaacacacctagagagagactgcaacgtgttatcgttgccgagcttcatcacaccccatcaacaaagcagctccgactccacctagcagaaacaaacaaggccgttggccgcctgctacaaagcaagaagcagatccaataaggcaaaggcctcgccgaacattcccggcctattgagcatcagtgtgaaggtagaagctacggagctaacgccaattccacgatcgggcatgtgcatgaaaggttctccaaacatcactcccaacagagacgcgatgttaatcaccattgccgctttcccggaacgtggcaaggttttcacccggagcacagtggtaaaagaagaaagggaacacatcgtaacgatgcctcaaaggaggggaacggcgccgaaggcgtcgccattgtcaagccggccataagacacggcaaggctttcgcctacggttccctatcctctcctacacactgaaccaaatcgcatacgaccgtcgaaaaatgccgcactgccccgattcaccgaccctccgacgaggcgacgagccgacgaccgagcaccctggagctacctcaccgacgggcgcagccaaccacctccaccatcagcactgggcgccggcgccgcagagccgccccggctcctcgcccgacgccgccaccaccaagcacgccggtggcattcgtcagccgccagcctcaccgtcggccagccgtgtcgtcacccgcatctcccgcgccacctgccgccgccacacgcgccagacgccgccttcacgcgccatccgccgccgtcgcccgcgccgtcgtcggcaccggccagatccggcggcgacgggccgaaaccagccgtgggggagccaaatccggcggcggcggcgccggatccgcagccacgcgccgcaccgccgcacggccttcccagcgcgccgtgtcgcctcctcgtgccggagacaggctgtcgccggggttgtggccccgccgctgccatcccggcgggccacgcagtttccggcggcgcgctccggcggcggcgaggcgggggagaggaggagagggtggcggcggccgagtgttagggtttcgcccccggtcgcccgcgcgtggacaatagggggccgtccgctcctccacttgctgtccatttaccatttatcattccaaatggatataaagatgcctttagcgcgcgtacgtacgtgttgtgcgtgtaacaaggagttctgacgttaaattaatcgcacgggcctgcatgccactggcgagatgtccgttcatacggctaacttagtcatcacagtgcactccgtcgtcgctgcctgcaggttgacccgcctcgcggcctcgatggaccgcaactaatccccccattcccccctaccccacgtttgcccccgcacgaatttcaaagcaacctcccctcgcttctccgctgcccccgcgtctaaagtccaagccgccggggtggccttgccgtccccttatatatacccgtgccctccggcctccgcttcccgtccccctcgctctctcacccccactcccactcccaagcgccaagcacctctccgccattgatggacttgtcgagctccaaggaggcgacgcctcctcccgagtaagccctagcaaatcgatccccatgttgtacgatttgaatttgattattgcggcgcgcgcgctgatgagatcgagaaatgttttcgctcgcggggggcatgcgcgcagggcgtggtggacgggggagacggtggcggtggtgacgggggcgaaccgcgggatcgggcacgcgctggcggcgcggctggcggagcaagggctggccgtggtgctgacggcgcgggacggggcgcgcggggaggcggccgcggcggcgctccgcgcgaggggcctccgctccgtccggttccgccgcctcgacgtctccgatccggcctccgtcgccgccttcgcctcctggctccgcgacgaactcggcggcctcgacatcctggtgagtccatccatccttcagatccatccgctacccgcttttcgttgtcggtttcctccagctacgatgtttcatctttcaaatttgcggatcgatgcatagatagaatgatcgatagatttcaaaataacctgaaaattgtaggctgtggcagtgtattattggcaccaaccagtcaatcatgcatgtaccaaccaacctatctgtataattgatcggctatacgtatcattctcctagccatttcacctggtaaaaattcaaaatcaaaatttacatcccaccctggcttttacccgttctttccagagtgtggctgcctaagctacacactttttgtgtgtgcgcgcgttacactttaattaggatcgaaagtaacgtgctttacttgccaaagtatgtgacaggcaacgaaagcctggctagttttgcttgccaccacactccacacctatcgagttaactcacactgcagcaatagtgaatgtgaattcatagaacgctaaagcaaaattggccagcttcctggttgctagagtgtgatccatctgacactgttgttgtgtagtcaatgtcgccgttagctcttcggatgggatgtgttccccttttatatgtcgcaggatataaaatttttttataaaatagatcgtgacgagagcacgaagctggtccaagtcatggtcattgatgttgacttgatattacgtagtatatcacgctcttgattgttttgataattgcatcaccattttgcatttgcatatatgccgtcgctgtcctgattaaggtccagttttcttctctccttcggagaccgaccaacttaggcagtcaggtggcgtcatcattcacttgttatttggattttcgattgcataatactggccactgttgacttttgtgggagcattctaaaaattgcggtcaatttcccttacttgcatatgtgcacagcgcagatttttcttaggtgaagaatagtttgcccttttgtatgacgagctaataatgcagcaattttttcaccagaagctgaagtataatgagccaaggcaacatttttttctattaagatttaatggcctttcaaggcacttaattaagtactagtagcaagctaagctagccgtagctgaaattccagtacagttttccgtagagtcagattaaaattatttgaaagcaaaattattgcatgatctgctatagaactatttcgtctattttataaatacaattttagttcttataaaaaaaactatattggtcaatatacactattacaatactgaccaacaaatgatgtagatatttatatttttttcctcgagtagcgtgatatatagtagtttttggcctcctcttcttaagaaatagattaacacataattatctaaatgcaaagtacatgaattagctgtgtttaagcctcttgattagttcagtagcacaccaggacgaccaggtcaaacataaacaatataaagaagtataaagaactagtcctcatgctgtcattacgcatatatatacaaatacgtacatgcttccatgtctggctaggatttgatttaagctaataatatttaagcatcgaccaggcttggatccgcatgatacacgatccaattttaaaactagcacactcgaattaacaagagaaaagatccagtgctgatctatctagattggttatacatcttttccatgcgggccaatgcaagtattctacgtaaagctgataaaaactattaggaagcccatgtcttccattccatgacgatggaacagtactgcagatggagctgttctctgaagtctaaacgatataataagctagattgcaagctaagctgtggcagttgctacattgattgaatggtatccaagtttttttaaaaaaagagatattagaatccaagtcattacactaattcacactaaattattgtagatgcctagctgtgcaggtcttagttatatgtttacgttgacgtcaagaaaa

SEQ ID NO: 17544 - DNA, 6554 bp, Oryza sativa
tagtgcttgatgttaaagtactacggcagagacacggtctgtacgtgtatcataatcacggtaaccacttagatcaatttcgtctgcgtgatccactctgcccaactactttctgaatttcttttttactgaaagagaactactctctgactttcttcgagggctgatctggtcgaattccatttacatcttctctgccataaactacatcgttagcttatgccttacggaaagcactattctagtgcggtttctaactctagaactctagccaaaagctccactgaaagcaagtgtttgccaattgccactactgaaattggccggtgtcgtaactacttcagatgtgcacatttttctttgtggttttgctatctctgtaggtttgccggatctaatgttgaactctttgccgtctgctttacatttgcaggtgaacaacgctgccgtttcgttcaacaagatcgacaccaattcggtggagcacgctgagacggtgctcaggaccaacttctacggggccaagatgctcatcgaggcgctcctgccgcttttccggcgatcggctgccaacagcaggatcctgaacatcagctcccagcttggcctcctaaatgtaagtgatcatcaatttaatggttcatgtcattctaatttcaagcgaattactagtgccatttagtgacctttatggagtcagtaagttacacatatttcatcccataggagagaaattttgtatagatgatagtggcctcccttgctaattgaccttttgattctcaccggcaatggccgcacactgtgtttccgaggaaaaaaatggggacctaacactcttgtctgcacgtaagattcaggctacgttaattgtctgaaaaggctgaatagtgagttcgcaagcaaatcttgcccctacagcttctctgacgcctgcagtactacaattatcactttatgaggcactcttgaaacttcacacctgccggctgccgagtagtgagttcacattgctgccttgctggtgttgacttaaaactttgtttatttcctgagtgggcctaatcaaaccatcctctgagctcgtcagctgattgagatgccatggcccatggacttcaaagtttgaacgcactagactatttcagatgataaggttattcaagagtctctgtcgttgcacatgatatcagtcgtgccctgtctattactccctccaccttatatataagttcatttttgacttatcccatttatcctaaaataaatatatttttaagtaatcattatactgtaaatagataaagtgagaaataattgtattgggacattgagagtagataaagtggggaatatttgtattgagattaaagaaagaagaggtgttttagttttttggtgtttgtattggtaggtataggatggatgaaaaattgaagtacctactccctccgtctcaaaaaaaagacaaacattggtttccgtgcccaacgattgaccgtccgtcttatttgaaaaaattatgaataaaattaaaaagacaagtcacgtataaaatattaatcatgttttatcatctaacaacaatgaaaatacgaattataaaaaaaattcatataagacggatagttaaaggtggacacggaaacccagagtttgtcttttttttggaacggagggagtactctctatccacctcttgaactgtctgagctccaaagtcatctgaattctcaacaaacaccagtcacatgttactcagtactatgaattaggtaatcataatagctcaaatatagattgttagatcatggcagtaatgagaattaacaagactgccaaaccacgtgcatcttacagtagtgagttatagtgacatttgcaagtttcagaaatcattagttcctccgtttgactttctagcatggcatatatttatatatatatgctaatgaatctaaacgcagtcttacattatgaaatcgagggaatagtattttactccatgttgttatacgcgagagtaaaacattgttgaattaataatcagcgttttttttttgggggcatggtgcagaaggtgagggacccgtcgctgcggagcatgctgctggacgaggcgtcgctgacggaggggaagatcgagcggatggcgtcgcggttcctggccgaggtgaaggacgggacgtggtcggcgccggggcgcgggtggccggcggtgtggacggactacgcggtgtccaagctcgcgctcaacgcctactcgcgcgtcctcgccgcccgcctcgcccgcggcggcgaccgcgtcgccgtcaactgcttctgccccgggttcacgcgcaccgacatgacccgcggctggggcacccgcaccgccgaggaggccggccgcgtcgccgccggcctcgcgctgctcccgcccggcgacctccccaccggcaagttcttcaagtggtgcacgccccagctctactccaagctgtgaaactgtcagcgacatgctaggctcctgagctcctcatggtaatatgagagaaaactactgcaaatttagagaggaaaattaagcatgagttgcttaagcatcaaccctgtcagttgacagtgaaaatatatagtaccactatatggcagtatgcgtctttggtgtttagttcctcagtaacataacagtatgcacgacaacggctttaattaagctcagccacacactcgacacgttgccacgagaaaaacgacgggatagttacaatgtggcatacattttgggggtcaagtggcaggtatataatgataggatttcgcgaagaaaggtcagctggttcaatagaatacgtcaataatgttcatatgcatgcctgctgcgaaacatactacggggagtactgctcttcccggcacgcgtttcattattgaacattaatattcatctcgcacacttggaatctttggaagcaatattcaactggagatgatctgaattagcacttgtcattaatcccacaattattttacaatgttagatgtgtgttgcttttgctcaatatatatacttcactgaactctccatgctgttgttacaaccagagattgtttggaagaaaaggaaaaggtacaaattgattccctcgtatataggtcagatttgatttatatccctcaactgtaaaactgggtataataacatatcagattcaattcgccatgcttgctactagtagtgcgccgcagtggtggaggcgacaaacataggcttgtcagtggcgacgaggatggtgccaagcgcggcctccactaagaagttagccctatacgctatgtctaactcctagatgaggtcgtcgtggtagtagatggagtgggcggtgggagcgccgaagttgacgtgggacggctaaggtgagaaagaaggtggcctcaaagggggtcggatagtgaagttgttgagtgacatggtccatcagtgacctcccccttcccaccgttggttcatcgcagccttttctcccctctcccccacgctatggtggtggtctaggaggacgcggagggaacagggagatggctagcatagggagaatatgatccggccagcattgtccctaccttgccaccgccgccattggagaagacgaaggctagcactgagtcagagaatcaagaaattcccgatgggttacctcagctagcgacaggaaagaggcatgtgtccatcaaccccaagcacctttcgcttcttgttagggcaacagccttctgctatctgcgccccctgcctctgatggctctggcgccccgatattgggagagaagaggggagggctcgccaatgccctccctagcatcagctccgcgccgtcactacctccttcccggcctctctagtctctactcctaccagaagtgtgagaggagaaagaggggagagatgaaaaagagtggagagataatgaagaagatgagatgaggcaggtgcatcccattgtttctttttattactataatatgatgtagatgccatgtaggataaagattaggtcaacatgcgttgcgtaggacaaagccgatgtccaaaccacatggagaggcaaattaaacttatatatttatagttgaggaagttgttattctcggttttgcttatattttaagggacttatattgaacgttctatggaagaaacatatcggcgacctacgaaaggaaaaagtccgattaccccttgaagtattgtggtagtacgaattacccccctcaattcaaaacattcatcatcctaaactttttatattagacgaattaccccctgcccaactccggagtgttttttcctacgtagcggacacatagcagtccagtcagcattaaaaaaagatagggcctacttatcaattctgcctcttctcttggtcaccacgtgggtcctacccttatctatattttttatgctgacttgattgttacgtgtgtactacgtagggccaaacccgctccggagtctattagggagtaattcctttggtattaaaaagtaaaaggtgaagactgtttgatttttcaattaagggggcaacttgtactgccacaataattaaaggaggataaatcagacttttcccctgggaaaaggatagccaaagcccaaagggatctatggccgaaattttccagcccatgggagacccatcttcttcttttccttgagagcccgtagggatatggatatgcatggagatggaaattacggcccataccaaccgccgccgctccacctcccacgccgagcgtgctgctgctgttgcaccgccgtcgccgccatggccgggcccccttccttcttctgtgccggtggctcgtcctcctgctccacgcgccctctagccccgcatctctatgctccccaaccgcgtgctgccttgcacggctcgggcgccaaaggccgcgaggacgatcgaggagcagggggtggagagcgggctaagctagagccgagcggcagccggagcggaagacgaaggtacggagctatccgatgacgacggcggcgcggaccaaatgcagcgcccacggcgaagagaagccgcgcgggaagcgagagccgccgccgcggcgtcggcggcggcggcggagcggaggaatcccctcttcccctccccgtcgccggccggcctacgccgccgcgtgctccgcatcggtccgcacacgtggcacccatcggacggccaaggcagcgcgagcggggcccaggggcacgagctgcgcgacgggtgctcctcgaccgtcggatcaggagcaagcaagccacgtagagccgatctaacggatgagatgtggccaggtagaagaaaacagcatcttgcaatgcatgcagggctctgcgcacccacgctttttgcttccgcaagagcagcggaattgcggagaggtgaggacttgattttgatctctctcccacactctcctcctcctctgctttcctctgctccaagaaacgcgtgagattccttcacttcttccatggccggtgtgtttgtgttggtggtggtgctgttgctagccgcgctgttcttcttctcgttctgtatcgttcgtttttgttgtgattctgtgaagttatttgatcgagtagtgggtaaatgaatgatcgaacagcgggtgtttgtgttgatgttgttgctgttgcttttgatgtttgttggtgattttcttcgaggagggtgacgagcaccgagagccatggtgatctctgtccccctcttttcttctgtcttgcttgcgcttgttgttgctgttcctgctgatttcgacgttggtggcagattgcttggaggtgacgagcaccaagacctatggtgatctatgttgtctcctttgcttggagattgctttagttgtttgtttctgtttcagttggtctgtgctctgttcgaggagatcctaacgagcactacgacccccatggtgatctgtatttgcgccccttcttgcaactggatagtgttcatcagttcgtgagttcatcatcccggttctatcaatgcctttttcgtgctgcttttcctggcgttattgatgtacacatggcagctcgatgatgtgatatctctgctcgtctcgtgtatctctgcttacttcttttggtatgttgctgttccagattctttctgcatgtgggtgttcttcccttttttctacaactgtgggttttgacgctcttttgattgctcttgttctcgttaatttttgtgatgctgtgcatgcggaaaattcttgacgatgctgctgcgcacgggggaaacccattgatctcttactcaatggcgctacctgtacgtccgttttcttgctgttgggtgtaacatttattgatgtttcacttcccctgtgtatggtgtgaaaccccgtagaagatattattgaaatttgagagggggatcttagcctgtgaatttaatatttctccccttctaatgatcatgtgcactgcaggctgctgcatttgttcttgacacaaacttttagatgtgttttgggttctcaaatgttgagaagct

SEQ ID NO: 17545 - DNA, 1265 bp, Oryza sativa
ctattaaagattttaggaccacaggattttattttatttatgcttcactctctatcttataagatgaccaaactgagtttttttttaccttttctattcaggagctgaagtagcaatgtactgtgcaaaacgatttcatgttatgcttcgcgaggaagaaagctttctcaacaatctgccctatgcaattacatctgtgtgctccaggttttttttatagatatttgttccatgtactctgcatattgcgctacataagttcactcccttttcctttgtggaaaaaagagtgggacatcgttgtacccattgtcttcatagttgcaatgtcttgaaaaatctagtttcgtttgttggacaagcaaacaatgaattatgtaatcagtgttccttcttaactgcagacttgatgatgaattggaagcaccaaatgtatggagggcgtcactttatccccatcgtagtagtgagtcgagaagcgagtctagtgactgtttccagttcctcagtactggcagttgtgctaacgtgtggcgttcctcagaggtgatatatcaacttatgattgttctttacacatcctactgcacagaagttaatcaaagatttatttctagtcatatagtgtgcgtatgaagtctgtatttatctgtttcaatatacccagtcattatgtcaagtgcctgttttacacagtcagaatccaaaagcttgttaagttattgctgcactgtggttgttatctacttatactactacccgaattatgttttttttttatatgtcactatactgggctcatcatgtcttttgtacattccttcttttatgaatgccatttttttcgctagagtcatttcacactttttatagtctttttatttcaaggatctgttgaattctttgtattacacttcagttggtatttttgtccccccaggcagtttcttacaagctgccgtcatatgaaggaagcacagcatgtgtggtaatcattagaggaaatcagatcactgttggaaatgttggcgattcccgttgcgtgctttcaaagaatggtcaggtgtagtaactttttccttgtcaaatgcctcattgcttcattctgtcatacctaatggctaatgcattaaatctgtgcctaattattctgttttctgtatttttcattgcattaaaagacaattgatttatccactgatcacaaaccaaacgttccacttgaacgtcagagaattctaagagtaggaggacaagtatggagg

SEQ ID NO: 17546 - DNA, 2630 bp, Oryza sativa
cctgcagcccctgccaaaatttgataaatcagggaaagaaaagagaatgctttacagaggatagccaattagccacaaacaagaacatagctccaaatacaacaacactggtaagaaacagtgctatgcatgtttggttttaagtcttccggcgaaaaagtttggcttaagtcttggacgactaaagtagctatgttcgcccgcatttttgctttctccttggaaaattcttttattgatcctttcattccatatcgtctatgaggtttgggttaaagctgcaattattttactttcctttctccttttgatttgatggagctgaaggcaatctaacattcaattaccaattaccgagctatatatgatcaacagctacaggagtaacgaagttcattcatttgttggtagaactgttattcccgttgcatctgacatatttttgtaaattgtaatcacacagggggaggaaactctacgcaccacttgcgagaagctcgtcgagaattgcctggaatcgaggaacaatgcgacggccatactggtccagttcaagccaggcgccgaccagccgatccctgccttgcccaacatccaggagggctccgacgaagtcgccggcggcgccgaccagccgatccctgtcctgcccaacatccaggagggctccgacgaagtcgccggcggcaccgaccagccgatccctgttctgcccgacatccaggagggctccgacgaagtcgccggcgtcgccgccgaccagccgatcgctgctctgcccaacatccaggagggctccgacgaagtcgccggcggcgccgccgtggctgagcagcatcaggacaacccagagggcggtggcgagcagcaactcgacctcgatgacgcgcttgacggagaagcactggcgttgctgtttggccagccttagctagttcgtgcaaagaatctttagctagttgcacagagttttgatcgagaatagaacaggattagttcttagttagtcctcgtgttgcctctcgagtcttgaccacgttacattttttttgcctgaagattttgcttttcacgcacgtctgttattgttctgctctgtattcattcctgaagattttgatcgaattaacgatacctaattcgtaaatgatcactgcctttcatgacttctctagccatctgcatgcatgtcttgaagattagctgtgatgactgtaatttttttcaggttctctgtctaagtgtttctggaagtgttttgatgctgtgtcctgtgtgcctaggagctgaaagtggaatgtcctaggggcctgatgtttattcagatattggaaaccagagtagttttagtgtatagtgcgtcctggcagaatctgtttcttttgtttttcgttgtttgattttgaactgctgtagatgtctttggctttccagtaaaagccggatcaatatgatcaatctttttttttttgaaaaaaagctagctagctagctctagctacgtgatatatgtgctgttagtggtaacttcttcctaagctattgccatcaagataatgcataaacagtttgtcattgaaccaacttcccaacagtatttgcatacttaaacatcaatactgtgcttttgcattttttttcttgagtacatgactatttcatttcattaaactggtaaagacatatgctttacccctttttatttcattaaactctataataaaagcttgcttttatgggccggaaaactctggcccattcatatgggtaagtttttacagcccacgtgagggccattccaaccgccgccgctccacttcccaatctcccgtagcgagtgtgccgccgccgccgccatggccgcggttcggcttccttctcctgcgccggtggctcatcctcctgctctccgcgcgcgctccctatccggcatggaagtgctcgggcggcaagccccagcgaggagggaggctgtggtcgggcggcagccgtagcagaggacgaaggactggagctagccgacgacgacggcgagctcggggtgggggtggggggcggcggcggcggcgcgccgtggacctcagcgtagcgcctcgtagctcctccgaccggggaggagcagcatcagcggaagtccatggggtcctctcgagcgggacggcggcgcgaggaccaatgcggcggctacggcgaatagaaaccgctcgggagcggcggcggcggcggcggcggagcggaggaatccctcaccggcctacgcccgcgtgtgctccgcatccgaccgcacacgtggacaccatcggacggccaaggcgtcgcgaaaggggcccagggagcacgagcagcacggacgggtgcccctggaccgtcggatcaggcgctgcagccacgtagatccgatccaacggaggtgatgcgtccacgcagccttcctgtgcgaagttggtgctgcctttgcatttgcgcttttgcttcgcgaatcgcaacaactcgttgcaagagcagcggaattgcggagaggtgaggacttgatctctctcacattctctcctcgtcgtcgtcgtcgtcctcctcctctgctttcctctgctccaagacaacgcgtaagattcctccaccttctcccatgg

SEQ ID NO: 17547 - DNA, 2139 bp, Oryza sativa
actcgtccatttctacattgttttcttggtgctcttcagcagttgctttcgctattggcgtgggatcccatggtatcatggtaatctgttggattggaggaggggctaacgagcacccgcaaccccatggtgatctctgttttgtctccctctctgtacggaatggtgttgttcttcttgagttcatcttccgttgatattcctgggcctttattgatgtgtgcatggcaactctacgtgttcttcatcttctcatctctcactttattctgcttacctcttatggtatgttgttgttccagattctttctgcatgtggtgatttgggtgctttcaccttctttcacaaatgtgggttttgacgttttgttgattcctcttgttcttgttgattcttgatgatgttgtgtgtgcggaaaactcggtgatcgttatctgatgagcgcttattgctgttgagtgctaacaaacggtgcaagagtaattatcggtgtttttttcttcatgaaattacttctgattcttttgatgtcaacatgtatttccaattatagatgtaacttgtaagttgtaggtccccctagtttttactttttactgaccaagcgatctagttgtttcaaggttcgatggtgccttattattgattttttaatttccccattatggtatcaagtgctattctgtaaagtagcttaataccagcagcaggtgttattgaaatttcagagggaaatcttagcctgtgaatagttctcccctttgtaatgatcatgtgccctgctggctactgtgtttagtttcgagacacttttttggatgttcttttgggttctgaaatgtggaagagcttgtcattttggacgctctcttctttttaagacgtagtgacttggatcaatattgaacaacatttggttaaccagattgtacatcgttgtgttcactttagtctttttcaggaaagcaagtcttgcgatgggtgcatctgccagcagttcagtaacatcgaagcttactaacgatggagagaatcagaaagttaagtatgcctcatcaactatgcaaggatactgtccgacaatgcaagatgctgtgagtaatcttgcactgcctttatcaattttgttgggatcataatcctacagataaagtgttaacttgctggtaattgtggccaaacactgagcttgatttattcctttcttattgatctagcttgcagttgaactagatctagatgcattaaggaacacatcattctttggtgtttatgatggcgatggaggtttgatcttcactctcatctttttccaacaaatgtccaactattcatctgttagcataacagaccttcgtgtgttagttaaaatattgtacaattcataatcccctaaaggaaagagagtgtccatttgtgtacataatggaaatatgtcaactgccatatataggctgtgtttcctatcaaagattctagtaacacaggattgcagttgactcatcatccattctctattttataaaatatccatactgagtttttttttaatcttttctcttcaggagctgaagtagcaatgtactgtgcaaaacgatttcatgctatgctttgcgaggacgaaaactatctcaacaatctgcccaatgcaattacatctgtgtgttccaggttattttgtcgataattgtttcatgtactctgcagatggtgctacataagtccactcctatttttcgatggtggaaaaaaggggacattgttgcacccattttattcatagaatcatagttgcaatatgtcttggaaaaacgaattatgtaatcagtgttccttcttaatctcagacttgatgatgatttgcaacgatcaaatgaatggaaggagtcactttatccccgtggtaatggtgaatgtttccagttccttaagactggcgtttgtgctaacctctggcattccgaagaggtgatatatcaatttatgattgttctttacacatccaactgcacagaagttaaccaaagttatatttctagtcgtattcgtatagagtgcatattattatcttgaagaaaatcaggagtatgcatgatatgcagtccatatttttctttcccaatgatctggagttccaa

SEQ ID NO: 17548 - DNA, 690 bp, Oryza sativa
cagagtacaatgataaaggtgcgttaaacgaatccaagtgactctcaggcacaaatgtaacggactgtctcctatgctaatggactgatggcatcatactacgtacttagtggcatcccatcaacgtcgccttggacaaaaataggactctctggaccttcttttcctgatctaaccccaaaactccctgcagctagctaagatccttgcaagaactaaggtgcactaaattggagggccagtgattagtcattgtcattgttgatgtcaagtttttcatcaccgccctcggggttgtgttgatgttcatccctggcactggcaacttcatcggggtcctcaatgggcttgaacttaaccagtatggcagtcgcgttgtcatttgagtgcaagcaatgaccaacaagcttctcacaagtctcgcgtagattttcctccccctgtgttggttaacatgcatacgtcaaggcacaggccaaagggcataataacaattctagcaacaaatgaatgaacagcgaaaaacatcctacgatcttcatatgtagactttagatttcaatctcttgataacaaaacgaagcagatccatgcacatgtgttcagaactggagtaaactttcattgatttaatttaagagtgcatgcatgaaaggaacttctagagaggatgcgttttttagacaaatg

SEQ ID NO: 17549 - DNA, 1822 bp, Oryza sativa
tatttgagatattgtagatctttagccattttgtcaagtctgctgaatgtgtaacacatttggtcaccgcgttcgagtggtttgacgggcacatctcaggctgatgttgactggggggctaaagacccagcattgtctccaatattcttctctcgagacgtcggatatttcattatgtctgcctgtgacagtaattagttttttttgtctatatttaatactccatccatatgtccaaacattctatgtgatagggtgaaaagtttttacgtgggaattaaacggggccaaagttgcattcagtattgtgtctacagctgatccggattccatctaatcatagggtgctcagctgagccagcgatggttgtttgccacgtttaattctaaacatcgtcgtacaatcttaagtacataaagatgatcaccaatcagtctcaactcccagttacttcttataattgtcgtatgataatctagtgcgcaactgaacaaaatatattttttcttttttaatatgtgccaaagctattagctatttttaagtacatacagatctctatacatcccatcagcgttgggctaaataaaaatgctactaatatgtttagcattctctcttgcatttgaatccggttaggaatgcatatgctttctactggctagttttgattccaatgtcatggtgtcaggatggcatgcagcagatacaattaatgtgtccgattcaaaaatcacaatgtgtccgattcaaaaatctctctgaactttccaaattgtatgaggacgccgagtcattgtaaatcctatttgaattctattttttttattcgattaatgtgagaatttctagcctccacagcgaacgtggtgccttctttcaagtctgtcttaataatataatagatagatagatagatactccatgcatgtgtccaaacattcgatgtgatagggtgaaaagtttttgcgtgagaactataacagtgccctagtttaactacctaaatcagttgaagagttggctatctgagtatttggagagtctaatttagagatgctgttaaagatgctcttactagcagtaaattttgaccaaacaattcagtcacattactacggtgtcagttgcatgtgtagcaatttccttggaacaaagtactcgcacagcggccacgaccaccgttcggccccgtttttcttgggaacgagctacgcaaaaccctacccccttctccgctattggctcgcgatggaggccagccggccggcgcacgcgcggcatatggagagcaatgcggcacgcgccgccgccgccgccgccggcgagggagtcggagaccatgacgacgacggcgaggaggaggaggaggaggagaagtggcgggaggcgctcgccgccgcctggggccagagcagggcgaagcgggaggcgatccgggcgtgctacgccgccgtcaaggacatgatacgcggtaagtgtgcggtcgccgtcgcgcgtcgcttgctgcgtctctctctctgcttctactttgagtttctcttgatttttgtttaatctgactgatggcgatggcgattggtaccgtgtgcgaacgtgcgcgcggtaattaattaacggcagcggagaaggacggcgccgacatgcgccggctcggcgtcgccatgggcgagattaagcagcttcaccacaaaggttttggctccctgcgttcagctcatcctcctcttagcttttgctatgcgctcgtgttcattagtcattaatctagtcccctcgtgttcatgtgcccgttgtacatttcgtgtgattaatgattaa

SEQ ID NO: 17550 - DNA, 2170 bp, Oryza sativa
  unsure (1)..(2170): unsure at all n locations
attcctgcagccctgcgcatgcatgtgtggactgctcgaatttatggagaggaaaacaatcacttctttaattaattgtacacttgattaattaattgattgtcatttcatcatatttgcacctgaaaaaagaatctgatatgtccaacatgcgtaattgcgtattacaatgtactctatctacttgcttgttaaccaattaccagtgcaaaggccaaaggaacaagtcgcagatggtgaagctctgctggagctcgtcaattccctggccatcaccgccaaatccaagaagaaagatggacctaccccttcagagttcgtcacatcactgctgacgaagtttggtgtcagagcttctctcttggatgcttccatcgagtctttctcttgttctgatcttggcgccatggcgtctccattgttcatgacagcaactgggtgccaaacaatgtagggttctgtttcccctgtgacatgaaaatgttgcaagaattgatcgatcttttggtttgtgtgtttatgttcagttgctcatgaaattcttgtaggaatggtgctttgaatcttgccatcgaggaacggaggaagcgtgtcgctagaagactatttgaccggtttcctagcaaacctgcaggggtgcgtttcatcattcctgcttctgaaaactttagctattcgcttctgatttaacaaatataaaagcaaggttctcgagccatttgcttaggtgaaaagattatccttatatttagtattttagttttttttgctgacaccttattaatcagcaatggctaaagtgttcttgcagtttactgaactatttatatttgaacatgcttttgcataaatgaatgagttcaatgtgtcagatgctaactttgctcaattgcgagtaggcattggcacacctagacgtatatatgtttatcattgatcccttttcgatatgtttttttttttacttctgccatgtttaataagttttcttccaagatttgaaatcgcacttactttccagctttatgagaccacaccagatctagatgaaaggaatgatactgacaagaacatggctgtcatgttcaaactcttgaggaagaacaaatgtgtgaagctggaaaatctcatcctaaaccggcaatctttcgcacagactgtcgagaacatatttgctctctcgtttcttgtcaaggatggaagagtggagatagatgttgatgataagggaaaccattttgtcggtgagtgctcctttgatgatccaccgacacaaatttcagtttgattgttcaaattgtaaatcaaagtagtaatgctcatgaattagtagtgatttgtgtctttcatgtttgctgtgcagtgccacggaatgctccggcagctgaactgataacctcaagggaagntgatcaacangccaatatgtattccgatttgataccaaggattggaaggtaaaatacttacatatttttccctattctagatggataaatcttgagcttgatctattatttctcccatctgtatgttttctccttttctttttttttatcattttgcaatttttgctcatttacagataatggaaggcgttgtggagcctggagatgagctaatgcctcatagacaaaacaacattggagaacactacaataatgcaaaatcatattcagcttcagaaccacagagaaaacgagatgaatttgctcagggagagggaatggatgagacactcatcaagccttgcgctgaagatgtcatcctgaagaggaagaggagatcagaagcagagagcttgaaacattggttttcttcatgcaaatggcaatgatcatgtataattttagggttagttcactggtagcaaagcagattaagcacgcttttggcatctctgcaagaaattgtttaaaaaatactaaaacacaagtaggcattaacagcttctgtttcttctattattaggacttagaagtttaatttgacaatgttggaactttcaagatcctttctgcaaatgttcttgactacccgaatcacttgagctgaccgggatttggattagaattcacgatccaattctaaatgcgcaaaattcggtagcacttacaattcgtgatccaaattcgcatgggcttgataggctctaatttataatcagaac

SEQ ID NO: 17551 - DNA, 775 bp, Oryza sativa
catggtggtgttgttccggatcatgttgcatttgtaggtgttcttactgcttgcagccatgctgggatggtagacgaagcaagaaaatactttgactccatgtggaatcattatggcatcaggccaacaatcaaacattatggttgtatgattgatctcttcagtcgtgctggtcgattggcagaggctgagggaatgatgcaaatgatgcctattcaacccagtgtcaccatgtggggaagcatgatgaatggttgcaaggtacatggcagggctgatattgctgagagggtaggaaggcaggttgctgagcttaatcctcagtttggcgcaatatatgtgataatgtccaatatatatgcggagattggtaggtggcatgcagtggagcacaccaggagattgatgtggcagactggattgaagaaaattgtaggctcaagtggcactgaagtgcaaatgttgtgctcctgaatatagtttcctctagcatctgtctatggaactttttgaagtgaaaggaggagaatttgttagacgaatgttgtagaaatttgacaaccatgaatgacttaaacacagttctaccaagtgttcaattgttaactctgtatgttgcgtggaaagaaagaggtaaatataccaactgacataattcaattttgggcttatccatttcctgaatctaggcactatataattatttggtgaattggtagaatatatttgtggattattccgttgttcattagctaatgcctttcagttgcaatag

SEQ ID NO: 17552 - DNA, 860 bp, Oryza sativa
attcctgcagccagacgaagttacaagcccatagacccattacaggtgttgcaacaccttgtttcttcagttgttgccgactgagatggaatttggcaatgaggctggatccattggaaagagaactttgagagctttccatcaagtactcacgggccaaaaacggaggtcgtatgctgattcgccggccgtttgaagtcagcaatgtagtaggtggccgaatcggattccagcacttggaggacttgatcttcatatcttcttgttcatccatgatgtgagtaatggttgtatctgtagtagccatggtcacatcatcctctccttcttcacggaaaaccgtcctcggtttttccatatggtgctcttcacgtagtccatttaaaacaatctgtttcttccaatcaaaacaagccaaactcgagataattttgttagcagtaacatttctctctagttttcttgttttatgcacatgtacagaaggttctaaatccgaacatatgtaaactctatgcaccaaatatattcctctatcattatattcgccaaagatataagaaatagcattagttggacatggcaaatcagatttagcaaataatttctccttcaaattttcgagctcacaaaaatcatcaaaccaaacataggtatttaaagaagatagcaattcatgttcctctacttcatttacaatgtgaacaatatgcttaaaatcagcacacaaagaaacactagaaatagaatgttcattcactagttatggcatgtagaaatagaatgttcattcactagttatggcttggatataagtgaagcattatcacacaactcttctttatcacaaggaacagcaa

SEQ ID NO: 17553 - DNA, 4763 bp, Oryza sativa
tacagtgcaccgatactaataactattattactccgagcatgtctaaattcgtagttcttgaataagtcatatgttactatattttagaacgggggagtacccgttatgaacaggctctgatgagtcaccaattaagcgaatagacactagttgacttgcatcactcgatgatgtatatatatctcatcaatattaagtctaccttatctaattatcacaagctaccgtctgtgccgccaactgattggtggatttagcggccattcatttgctgacatagtttactgtagattgtacagtgcaccgatactaataactactattacctccgtgcatgtctaaattcgtagttcttgaataagtcatacgttactatattttaaaacggagggagtacccattatgaacaggctctgatgagtcaccaattaagcgaatagacactattgacttacatcgctcgatgatgtatatatgtcacatcaatattaactctaccttatctaattatcacaagctggtagcagcgtcgccaactgcttggtggatttagcggccatccgtttgctgataccactactacaaaaaccatctttcgtggcggccattttgggtttccgctggtggaaatcgcagccgccacaaagcaaaggccagtgaaaatgtcgatcttcgctcgtggttatttaccgccagccaaaatacatcttcgctggcggctgacaaaggaacgtccaccagcaaagacatgtcttcgctggcggtagccttaggattgctgccaaagaagacatgtctttgctggcggcagacataacacagccgccagcaaagaaatatctccgcttgcggtagccttaggtcggccgccagcgaagatagttctttgctggcggctcacattattttaggccacgtggcatgctaggaaaaatgaactaaggcttctatagatggacacgtggcccgacagcgaagatatggaccgtccttgttccgacacatggcccgccagtgaagattctattttttttaaaaaaaataaaaacaatattagatatactttttttttctattgtttgtgcgcgtatttcagagtcacacgtggatgatataactaatcaagctatcgatagagtttgttatctttcacgtattttacagccacagagtatgaagcagaataatatacatatataattcggaagcacctatatatatgtacattgacaaattaaattcgaccgacgacataacatttacaagtattttgaatgaattacaaaaccttagctatattaaacgcctgctccagttagacagggattcgttctccggcaaggccaaaactccttcgttgtcgaaaaactgcccaagctggtgtgcgcactcacggtggatgaagtagcacatgtcccgctgaatgtcttcaatggatctatcatcgagctctctttcagacttggggaattttggaagctgcatcagatcatgacagaattaaggaaattaattattcacaataatacaagttagtgactaatttaacaagtgtgtattacttacctcgtcgtaattcgcacaatatttcccattaacccttaagaactcacaacagtaatatccgcatagtattgttcccaccggttgcttgtgacactttcaacatcaaataattataaggtctattatgctattaaatggaaacacacaatcatttatgaaaattaactatcactagttggcatccatatgtacccaccgaccacttattgaagacaaatattccttctcttgagtttctgcgttatccacctcactgataatacctcttttaaatgcactgtttacacatataattaattcacattcatcatatattaaaacacgtcatgctaatatataacttacagatcgataattcttagaaattcctgataggtcttgctatctttatcgagagaatccaagacgttgacttcattgtactttggatagagaagaaagactatcaaatggtcactgcaaacgaaattgttagtcgagccatgattatatgtatatactcttagtgcatattacaacttactcaaaggcatatggggcataaacacactccttgtcctgcgtagattcaagcgccatagctatgtacatagcgacatctagcaccttttcctgatgcctttgtgctatgtaagatttcctctcatcgggagtcatcgccttgatgtgttctggtagcttcttttcgtctagcgtgtatgtgtggttcggcttacttatcctgtgtcacaccccaatccagcaccgccgtacaacggcacctgataggagcgtgtcgtaggaaaaacagcgcgagccgcttcctacgaaaccgcgatctcagtaccagtcccaggatgtagcgctggtacccacggtgacaaatatgaatcattgcaatccttaaaataaatagtggacttatttaccttaacttaggttgcagctcagacagcccgagaatgcaaccgacgacacggacgaggcaaacaccaacaacagcggcagcagcggaaccaacggtctaacacccaacaccacaggcagcagcagggaactaggacaaaccctaatctttacttcacttcaacttcatcttcagagctggcagaactatatttatatagagcaagggtgagtacttacgtactcagcaagccatgggaacttaggtggttaatgcaagcttcaagggaaggctggttaatttagcaatcaattttgttttcaagattttcaacaatttaagtgtgtgctttccacaactagagcgagacaagtctcagctcggtcggggtgagaagtaacaaatttatttatcaagatctttcaaatctggtttattttttccaaaccaaaccaacttttccaaacttcccgataatagtggtccccaaacgaccaatcacttccagggactcccggtcccgctgtcttccggacagctaattgcttcccaagcattaggtttccctaaccttaacaccttttcataaaacagggtaaaacaaaaactacgctaaggaatcacctcacatccgcccatgaccgtgggcacggctgttcgaatagtttgttaacctctgcagagaggttacactttacccacacgacattactaacccgaatcacccagcccgtgcagaatggccacgtctggtgacctaagggctttcatgacaaggcatttcgagagcatacacagggttgccatatgccgacgagaggggtcccagaccaacaacaggttaggtcccagaccatactatgccaggaagcccgggggttctccccgacaccaccccgttgaatccacatgtctctcggcatcaaggctcccccgattagcaatttactcagccaggggtgtcccattccacccgtgtggtcgcactattgtatgctcggatgtaattccgaaggaatcggtccttaaatgcgaccacacatgcattccgcccaggaatggccttgtgtcgcgagttttatttttaaaactcattttctttcacaaggcaccgactcaggcgtcgggttttccaatccttttgtaaactaagatttacccaagaagttactcaaattttaagtttgaaggcgaccgtcgatactcgcacagagtgcacgaatatcgaggcgcaactagatggttacaagggaacatgatataacaatcacaatggaaggatcaaatgcaacaagttaggtaggcccgccaatctgccttgcagacgggcaagcagattgagtgcaatcctatcaatgcataatatttttcaagcaatataattaaattcaaatataggctcaagatgttcaaaggtggcttgccttgctcagggtcttcacagagcttcgcgaatctatacgcaaacaatcaaaaacctaaacaaaagaccaagaaaaggatcctatttagactaaataatagtgccattaaatagatctcaattttacggaattattggaagtggaacggggtcaattggagttacggatcgggagatatggattttggaagtttaattgaaatttatagaaataatattctcaagaatattattgagtgtcactggtgtgcgagaccaaggaaaatgattcatgggattttggaatagagaaatgatttatggaataggggaaaaagggtttattaaatcccttgaaaaagaaaggaaggagggatgccatatagacttcctcgggcggcttaggcgcggcccgaggggtttatgcagcttggccagacctaatgggccggcgcgggcgcgggaggggcggcggctccacctcctcctccactgccttccttctgcgcggatctagccgccgctccgccccacgcgggcagatccgacaatgtcgcatcagatctagcgcgggtgacggtggaaggcgcggtggcgggcaacggttgtctcggtgctgccgccatcgaggcggtggccaggagcgggctggcgggaggcgtggctccgtcagctcgctgagcaccgacggcacgcgtgcggcgtcgtcggggaggtagaaaagggctagctcagtgatgctgccagactccttggagcagaagacggcgggctcccaggtgctgcaattggtcgatggctgcttgacagggtcgcccagctacgcggggcggcgaggacggaaagaaggaagaagaagcgagaagggcttggccggcatcggaggaggaaagaagacgggagaaaga

SEQ ID NO: 17554 - DNA, 2957 bp, Oryza sativa
ccacgcgggccggcgggaggaggaagaaaggggaagccgagatggatggcggacggcggccgagttcaccgaagccttgcgcgacggatttggtcttcggggagcacaccggagtgacgatggagtcaagagggagcgacccaacggctcggattcgccggagggaggtcggcgacgatgaatcgcggcggcgcacgccggcggcgagaaaagggggaaaatccaccggtgcaatgggagttcgattcggcggggtgggagcatctccggtgttcaaggggtgcattcccggcatcggatggggcagaggagtaccgaggagggccggtgacgagcggcggcctccgggatcggacggcaatggcagcggggctatgccgggcggcggcggggcttggggcggcatccacgcgcgttcgggagggctaccgagccactacgcaagctagaggggaagaggaaaggcggggagggagaacggggctaccgcgttgggatctcctcggcctcgggccgggaaaggggaagaagacggcgcccggaggtccccttcggctccgcgcgcttgccgactttccggcatgcgcaacggcgaggaaggtggtggcggcaaggcggcaagaacagaggaagagcggggagcagcttggcttttataggcggagaagaggcggtttaggagggggaaccgacttagatggtcaagggagctcgaatgtcgcgtgtggtcaaggtgggggtggcgaacttggcagtcacgggcggcagaggggggggtcgatggtgccggtcggggaaaaaagcaaaaaggggagggaggaaagggggctctgcccatgccattctgggagaaaggaggagggagagagagctctgcctccgggagttggacgcacatggcttggagcggccgggcatgcggcaacagggcacgggcggcgtctggacggacgcggcgacaactgagcgcggcgaccgaccgagcgtggttagccacgcgcgcgcgcgcgggaaaccgacgggcggcggcgaaaatcgaatggtggcggtttgaatcggcggggcgctggtggggagcggtttgggcgcggcgagggagagtgagagagaacgagagagagaacgtccgagagaggggagagagacggcgctctctcttggtggtcacgcgcggcgcacgtggagagagaggaggaaacggactgagagagagtgatgggccgagggagaggaattcggcccacaaaagcagagggaggcaaaatagacttttttagatggattgaatgtggagacaatttgaattggagggaatttaaccttgatacttggactctaggaacaataaggaagagtcgaagaaggattcaaaacgggaattgaatatttttgtagtcggagcgaatattcggcaaggattcaaaggaaggatcgactttctggattgaattcaaattggatatttgagctcaacaaagtttggagaagccaaggaggggattcaaagagcgaatttgatactttcggaaatgggaaggaatttcgatgaggcatgattctcgatgtcgatgggaagttggagttcaaagcgagaattgatattctagggatatatttgtatttggtggctcaaggattattgagagggggggtttaaagaaatcttgtaccatgggacaaatatttgggaaggagttcaaggatagatagatagacagagagataggttgataggtagaggaacggatagacagatggatagataaacagatagataggtatagtagatagatagatggatcgatagatagatagatcgttaggtagatcgatgtatagatagattgataggtagataggttgataggtcgagacccagagagagacgggatggaagagaaggaagaggtggaccggaaaaaggaagaaggaatccaacctatgggggaggttaactagacttttacagagagatttaattggaaggttttagggttggagtctggacttgaatttcgaagtcgatactcggtcttgggagaatagaaaggagtcaaggaagagaacaatattcggagacgagtcaaagggagatggataatttagagaaagagagtgtaacttgggagtttgagtttgactacttgacgagatatgcgggtgaggattttgaagagaagtctgaatagaagggttcggacttcgagattatttcagaacggatatcattttgggaagagctcaaggcgaaagggattgactcttggggtttagagttcaagggtggaagtgatctcgatttgcatattcaaacttgggtcagaagttcgagaaagagaactagggtagattgacgaaccaatacagagagaaagatagatgaatcaaaacctgagaagttgaattcgaatttgagaatcggtttgaaggaaccaaggagagagtttatgacgcgaaggtgaatccttggacggagttagggttcgggcattcgacaaagttcacagatggggttccaggaggggattccgaatagaaggaatcgagcttcgggactatattgggatggaaattttgaggagacgatttttgataacagggtatcgggaccagggagggatttaaattgagatctttggcacaacttagacttaacactcaaagaacaaaattttcgcaattaggattttcaataaattagcttttaacgtcccgcagaaagcggagcgttacatcctgcacgggtttaggtaggcgacaggttttttcatctcttcagcttccacgtaattcatcctgccaacaatggatgatcaaatgagctacgcatataggtgtagtgatttattaacatgttcaagtctagaacttacagacaccagatggcaattaaattggcgtccagcctcttcctacggtagaggggatgcatatcggagaaatggacttggagtaga

SEQ ID NO: 17555 - DNA, 700 bp, Oryza sativa
ttatcaggcttcattccaacagaatgcatacccggaaacacctccagaaccttatcctgtcttccatgtctactgcatacctcagccattgcattccatgacacctcatttcttcgaggcattttatcgaacacttcgaaggcagcatcaagaccgccacagcttgcatacatatggagtaccgccgtggcaagagcgacgtcgagcaagataggctcgacgccccagcgtcggagcgtcgcatgaacccacctcccgctctcgaggtcgcggctctgagcgcaagcccccatcacctgcgccacggtgatgccattgacctcctgcccgcgcgccacggcctccctgaaaagcgcgaccgcctcccgtgcctccccggccgcggcgtgccccgcgatcatcgccgtccaggtgaccacgttccggtggcgagcggcgtcgaacaccgcgcgcgcggaggcggcgtcggcgcgggagacgtaggcgtggacgagggcggaggccgcgtacacgttggcgccgtggccggatttgaccatctgcgcgtggaggcaccccaacgttgtggttgccgttgcggttgcggcggcgcacggcggcggcgagcggtggtgcgcctgggcgagcgccttgagggcgaagggaaaggtgaagtggtccgccgcgacgccctcccgcagcatggcggggctgcaggaat

SEQ ID NO: 17556 - DNA, 1062 bp, Oryza sativa
tccaccaacgaggtggacgacgccgccgccggcaagggcggcggctccacccgccggaccttcagccaggcctacaagatgaagcaccggacgccactggtaaatacgcagtccatttccgctgatttcatgcgccattcttggtgttcttctcctccttttgtcgatcgattcgatctgcggtttgtggttgatgtgatcgatcgatctgtggattgggatttggggaaaaaattgcaggagttcacgtggaggcaggtggcgttgctgagcttccagtcgctgggggtggtgtacggagacctggggacgtcgccgctgtacgtgttctcgtcgatctcgctggacgaccccggcgaggcggacttcgtcggaatcctcagcatcatcctctggaccttcaccatgatctgcctcgtcaagtacgtcttcatcgtcctcaaagctgacgaccatggagaaggtatatatctgcactatacactccgtactcgtaaaggaagttgttttggactgtgacacggtctccaaaacacaactttgacttcttttttctataaaaatatttattgaaaagtgatatatgtatacctttatgaaagtatttttcaagacaaatctactcatataatttttacattttcaaactcaacgacttgagtgttattcatgatttatattaccaaggtttgacttaaacattgccctaaacgattttctttatgagtatggtgggagtatatcactatatatagatatataattcggatctatttgccaatcacttcttttttactactagatcaacgctcaacaattcgcgtgtcaatccttttattgtcatggaataaccttttgttggaagaaaactgtattttggtgtaccttgataagtatagaagtgcatccgtcccaaaatacagaaatctaggattgaatgagacatatcccagaactatcaatctaaacatacatatgtctatattaataatcataagatatgtctcatctggttctagatttttatattttgggacgaaaagagtagtagatgaaaaacaa

SEQ ID NO: 17557 - DNA, 708 bp, Oryza sativa
tccttgcgtatgccgggcaggcagcatttttggtcaagaacccttcaaagctcagcacgacgttctacagtagtactccagagccactattttggcccatgtttatcatagcaactttggctgctattgttgcgagccaagcattgatatcagccagcttctccatcattcgacaatcaattgctttgggttgttttccaagagttaccatgaagcatacctcaggcaaacatgaaggccaagtatactctccagagatcaattactttttgatggttgcgtgcatcttaattactgttgggtttaagggtggaccagagatagggcaagcctttggtaagcaatctaatcatatatactcttgccatttctaattgttaatttctcttttactttttgtatgaaaatgttgtagttgcagagacttcaaactcatgaaaaagggctaaattgcacccaacacataacattataaatgtttttaacatacatatgtgctcgtgtgtggttggttgtcaaaacacagatgggtattgcataaaattaaaaaaaaaagtattctatagaaaagccatgtctaaccagttggaattatcaagttactagaaacaccctgctggtaccatacaaacatcaaggagagcacatctctatttggacagatgtaaatgacaatactatgtgctaaaaattaaggctgcaggaatt

SEQ ID NO: 17558 - DNA, 4741 bp, Oryza sativa
tgtagatggcagtgaacgccagcttcagttcccacggttttggtgagggtcaccacgtcgctcagcttcgtgacctcgcccgtttccttggcttctcgtgtcccgagtacacggggtactccgtggaccgtgttccccctcactgtgagctctctgtgtacctttacccccgtggaggtatacacggagctggccttcgcccacaccacttcactgtagccaggcccactctccagatcgcgtaccaggacctctcctggactgcgcttcgtcgcctggcccacgactacagccaccgtctcggaggctcctccttccggcagcttccacgccttccttctggccactcagacgccaggtacccttgtccatacagcgagtctcagccagtgctgactcgcatggttgagctttcggaggctcaggccactcagcacgacctactccttgaggcttaccgctcccttgcccgccgctacgccgccttggaggcccgtctggccgaggagggtgtcacctcagttgacactatctcctgggactcaggccgcctctgccacgccagccacctgtcctcccacagctcccgcggctctgcccgcactcccagtggcccgcgctcccccaactcgcgtgcgccgtactcaccagtgtactcgccctacccacacccagttagcccttcctacaccccaggacacaccccagttgcttcctcccgccgtggcccacgctttatccgcactgcgcggaagcgtgttgttggttctgccactgtgttccgtttccactacccagctcccctaccgccagcggcccgtgctgctgccggccctcgacaggttccgccggtcccttcgcgccagccgatcgacgtttcttcgactgaggagccgactacaggaggcagccaggccgacgaggagtagaggaggcagtcttcagcagccgtccgtgtgataggcccttttgttccgccgccaactcttttggagtcgtggcgaggtagtgcgtgcgtgtgtttgttgtgggtgttgtttggtagtctggttctcctaggtggtgtgcgcacagtcaagctcggcgtagctctgtgacttgtccacacccgttgtatcaggtgtttttatgatttgaaaaatccagtttatgcctagtgtgtgctatctgagttgctatttgctttgctccttgccctcctaagtgcttatctgactcttaccccgccctcttctgggagtttagatggctagccgcccccgccgtgcagctcgtgcaccagcccgctttggttttgaggatggtagagttgagccagaagaaaatcatggatcagctaatgagcagtctcaccacagcaaccattcgcatcgtactgtttcccgcaatgcagaggttgagcaaccccgccacagcagccgctcgcatcgcacagtttcccgtgatgcagagatgggacagtctcaccgctctcaccgcactgccagtcacaattctggagaagaacgcctcccttccccacctcatgtggaaaccaacatgcaacacttaatggcagttcagacacaaatcttgcaaggactaaacacagccatagccagttttcagcataatgcgcatggaaatggccaccctcacatgggcaacaacagatccaagctgacagactttctgaggtctcgtccgccagagttctctcagaccgtcgagcccgtcgaggctgacgattggttgaaagatgttgatagaaaactcaacttagtgcagtgtactcctgttgagaagacgctctacgcctctcaccaacaaagaggacctgccgcagattggtgggagaattactgcaatgcacaccctgaacccactaacattgcttgggatgagttcgctacggctttccgtgcagctcatgtgcctgaaagcactattgacatgaagaaagaagaattcaacagacttaagcaaggcaacagcagtatcaatgagtacctaagtcagttcaacaagttggctcggtacgcccctgaggaagtggacacagacaagaagaagatcaggaaattcttgaaaggaatcgcagttggaatgagactccagttgcttgctcatgacttccccacttttcaacatatgatcaacaaggcacttctacttgaggatgccagaaaagaggctaccgaagaatacaagaaacgcaagtctaaccatcagggaaattcttcccgaggcgcacctcgccctcgctacggtcaacccatgcaataccaccagtcggtcactcaggctaaccgccagccaggctacgcccctcgtcctcagataaaccgtccggcacctcagccacagcagcgtgcccctagtggcaatactgcgcctaacagtgttacctctttcaagtcaccgcagggaccgtcagcagttcagtgtttccggtgcaaccagatgggtcacctgcgtccaccgcggaccgcgcgcatgcaccgcgtcccttccccgcccgcgcgcgtgcgtcgcgtgctccctccgcacggtgagctgagccgctgacaagcgggtcccacccgggaccgcgcgtggtgagcccggtccaccggctctctctctcctccctcccccgcgcgcgcgagtttgggccgccttgggccagccggcccatttagctcggccggaccgctccatttctcttgggccgcgccttagccgtccgagaaaagtctatattccctccctcccttcttttctttttcttttccaaaaaggatttaattaaatccttttcctttagatcaaaaattcaataatcttagaaattcaatatcttcccaaccgtgaatccgtttgactccgttcaacttccaaaattccccaaatcttgagatctatctaatggcacgcttagaggtctttaatagggctttattttcgccgtttgttgagttgtcccgtttcgcgtgtagtttcagagcccgaagacccgcagtgcgaggatttcgaggatcaagctccagatctcgagcaaggcaagccacctttgaacatcttgagcctatatttgaaatttaattatattgcttgcgaaatattatgcattgataggatcacacttaatctgttgtcccgtctgcaaggcagattggcagacctacctaatttgttgcatttgatccttcctttgttaattgttataccatgtccccttgtaaccacccagttgcacctcgatattcgtgcactctgtgcgagtatcgacggtcgccttcaaacttaaaatctgagaaacaacttgggtaaaactggagttttacaaaagacttggaaaacccgacacctgggtcggtgcttgcgaactaaatgaatttccaaaaccgcggaccggggaacgtaccgggtgtacggtttcccgctctcgcacttaaggaccgattccttggaatttcatccaaacataagacaagtacgaccacatgggtggaatgggacacccctggctgagtaactagcttatcaggggagccttgatgccgagagacatgtggattcgccggggtggtgtcggggaggacccctgggcttcctggcacagtatggtctgggacctaacctgttgttggtctgggacccctctcgtcggcatatggtaaacctgtatcggctttcgaaatgccttgtcatgaaagcttggaggtctcccgacgtggctgatccccacgggctgggtgatccgggttagtaatgtcgtgtgggtaaagtgtaccccctctgcagaggttaacaaactgttcgaacagccgtgcccacggtcatgggcggatgtgaggtgattcctagcgtagttttgtctgactactgcttgtgaaattgctgttgtgaaactgggttcgatgtttgaaaaatcagcagctgacgggatcagctaggcccgggtggctgtttgaaatgttgttggcccgggtggccgtttgaaaagctgttggccgggtgccaaccctgtttcaagatctaaagactgatacattgcacatactccgaccggacgagacgcactgtctcatccgtgtcgtttgagaagcactcacttagactttttagaaaagagttcaaacaaaatcaattacgaaaacaacagcctttccttgaagcctgcattaaacacttatttcccctggcttgctgagtactcccgtactcacccttgctctatataaataatccccccccagttgctgaagaagatgaagtggatcctgctgacgaggagttcttctaggagcaagtcggctacgatgagttatagggtttcggcctagttcccaagtcgcgcctgtgatgattggtccaagtcctggcttccgctttccttttgtaatgcagttgtgagctcgggatctgtccgcagcccaatatgactgtacttctactctataataaagagacctctgttgctgtgatactctgtctccctgtgataccagcactatttcctgggactggtatcgattaacaggttaatttggagcgtcacgggctagttccggtcggaactagttcggggcgtgacaagagatggtatcagagcacaggcttggccctagggcgaaacccgacacttaggacaaccctaaggataccaagttcaaaactacttgcgaaaaggtaaggtttgttttgtcttctttattttcaatagtttgtttctaaaatggttactgatctttctccctctttcaaaattgtagatggc

SEQ ID NO: 17559 - DNA, 637 bp, Oryza sativa
aatcgccagaagaaattgtttaattaaacctagagctaatcctaattaataaatgcaatcaataattggaaatggcatggttgaccttttcttgagttccccatgctctaatgtgctaacaggatttttagtggaattttcagagctagaaatacttttcaccaactaaaattagcaaaccgcaatattttaatccttggaaattctttttcccttttctcctttctttttcctcctttttcctctccttcggccgtcggcccactccacccgcctcccgcctgcgctcggcctcatcttgttgggccggcccacttcctccctcctgtctccgggtcaccgacaggtggggcccacctgtcggccccttcttccacctccagctgacggcggcaacctccgccgagccacccacgccgccgcctttcccgctcctcctgcgccccactccgcgccctgcgcccgcacccacgtcgccgcccacgtctgcacctctcccgcacgcgcgcgcactcatagaggcgggattcaattcgaatccccccctctctctccccacctcccccacgtcagcgagaaatctcccccccccggccatgttcgcctccccctccgcctataaaaagccttccccaag

SEQ ID NO: 17560 - DNA, 702 bp, Oryza sativa
atttagaaacgggagataaatcacattgttcatgcttcctcgcatttgatatgatctgactctcaatgctacgagcaaacatgaataggtgcccaatatgattatatgtcacattatcaagcaaaacctgaatttcagatttaaggccattaaaaaatctacgcattgtattttcattgcactctttgagaccactgtagatgatacagaccttaaattcatgaatgtactttacaacagttctatcaccttgtttcagatgttctaatttctcccgaagagtacatttgtaataagatgtcacaaagcgttttctcatcatggttttgaattcatcccaagtttcaggtttattactaacataactccaccaaaataatgtagaagaggtaaacttattactagcagccttaatcatttgagcatcagaaaaatcatatttgtcaaattcattgtctactgctagttcccaatcaatatatgcaacaaaataatacttaccatcataaaatggtaacttagattcaactcgcgcaaaattatagtgatgtacctcgtatgcatcacgtggagatgttgtcatatcttgtagacggtgaagaagccgatgtctcgtattcgcttgctcaatcctgccatggttagtagcaaacaagaaacacacacaagaatatgcacgctcctatcagggctgcaggaatt

SEQ ID NO: 17561 - DNA, 1055 bp, Oryza sativa
taacaaaataaattacagattccgtcaggaaactgcgagacgaatttattaagcctaattaatccgatattagtaaatgtttactgtagcatcacattgtcaaatcatcgcgcaaataggcttaaaagattcgtctcgcaatttctatcagaactgtgtaattgtttttttttcatatttaatactccatgtatatgtccaaatatttaatgtgatggatgaaaagttttttttttcgactaaacaagccattagacaattatactataagtttactttactgccattgggcctaaaatacatgaccagcccacacaggacttaacccacacaaaaaaaaaaaacagtagcatcacgattcacgagcaatggatcaaaaacaagatgaaatattgaagaaagatagagcggagcttctgcaagctcaggcagagctctggtgccacacttttggctatctcaaatccatagcactcaggtgcgccgtagagcttggcatccccaacgccatccaccgcaatggaggctctgcttcactgcccgagctgcttggcactctccctctcgcggcaaacaaacgatcatgcttgcctcgcctcatgagattcctagtctctttcggaatcttcaaagaagacatctcaagggagggaacaacaacaacaacaagcgtgtatcagctcacaccggtatctcgcctccttgttgatggtattggcatgaacagcaacactgagcacacatgccaatcaacctatgtgctcgtgtgcgtctcacagcttcaagtaggggcatctttgtgcttgggaattggctcacgagcagcgatgagaacaccccatttggaatggcgcatggcatggatttctgggatttcaccggccatgatgccgagtatagcatgctgttcaacaaagggatggcgtccgacagccacttcgtggtgaacatagtcatccatgagtgcgccgaggtgtttgtgggggtaaggtcgctagttgatgtcggtggtaggaaggcgcgatggcgaaggcaattgctgatgcctttccaca

SEQ ID NO: 17562 - DNA, 2230 bp, Oryza sativa
ctcgaatacttgactgagattgttaggaaaaataaatgaatgtaaggtaaaactagcgcactgccagcttggccaatggtgaagaaggtaaattcataaaaaaactggtaccacatttaaatatttaatatgtattgttattatatattggtcctaaggaaaataaaaaggaaacaaatattgcaactgcgtcatttatttttggactcagtgagctgcaaactgcaaaccatactagtgtggcataatctggactgttgccaatcaagcgaaacctcatttcttctgcacacaggaaagagcagtcttggattctttttccttatggaatatggatgaaattgcaaagtcgttggacctaacaagacaatattcgaattcacccatcaattacatgtctctaacattctttatcttttcctaatgtacttcggcaaatgagatgtgaatttttaataaacctgctttgtacaggacaaaggcctatgttaagaaagatatgctactccgtgtgaagagacgggatgtttcgaacgaatcatttatattggttagtgttgtagcgagcattaagacatgtcctctttctttcatcatggtgaaaatctcaactagctggccgcctggataaattacttctcattgttgcaggttagtcagcgtatctgccaaataactagcgaattcagcaatcagctgtaaatgaaatgccccacgtgcaacattaaccaacgaaacctaaccgaaaccaacgaaccactacatatttctagagctcaaacgaaaaggagtaactaaatatagggaaaacaactagaccaaaaatgtcgcctcgcattctgaagcgagcaaactagccagcaacaattgacacaaagcgtgcattgacttgacgagaattcgacctctcacaattccgtggaaccacagccctaactaggggggtgagacgaacatcccgccccccactacgatctcaaaggctacaccgctacactccaccgcggctcaaccacgccgcaagggagacagcgatttcgcacgaaacatttcatagcgcgagcggcggagatcgaggggaagtttcgcttacccgtaggtgccctcgccgatcttgcggatgcgcctgaagcagtcgacggtgcgggccccggcgggggcgtagtcggccaggttgagcgctcccggcggcgcctcctccccgtccatcacgcggcgggcggcggaatcaacggcgagggcggcggcggcggcggcgacggcgaaggctaggctaggcaggcagcggagcggaggagtagcggcggacccggaggaaacgagtcaaaagcggctgactttttctttcttccgctcttgggcttgggacgcaacgccgtctcgaagaaggattgtctggttgtgggctttatttgggccgagtgggcttcatctcagaaagtcagtgggtttgggccggaggaagacttctgccctctttggatgtctttacaatctgttgtagagaaaaaaaagagagagtatattttgattccctcaactatggccgggtctgatttattccctcgacagtaagagcctgtttggctgtttggttatttggtactccatccgtcccattttaagtgtaaccataagtttctatatccaattttaatcgttcatcttatttaaatttttttctaattaacatgaataatactttatgcgtgacttatgtttttaattttttttaaataagacggatgattaaagttgggcatggaaaattatggttgcacttaaaatgggacagagggagtagaactcttaatttcaaaagttaggtgttgtgaagcagccaaaacgcagctccacctccctagtttattttgtgataacacttcagctagctccacttctattttggatggagctgaaactgtttggatgggctccagcttcagaagaggtggagctagagccagaggtctaccaaataggccctaaaaccattgtaaattggatctcaacaattttgcaacctgattttataccatactactatactatgtggcatccacaatgacccatgtggaaattgacaaggacccatgtggaattgaccacctttatttcttccttcaactatactactctatcctctctcttcttctttccaacaggctcgctatcgtcctacttggcggttaccatgccttgtggtttcatcggcaattgattgttggtt

SEQ ID NO: 17563 - DNA, 1564 bp, Oryza sativa
gagagagagagagagaagcagcggcggctctgatcaccccagagatgcggcggcggtgtcggcggcggaggcggcgcagacggcgagacgacggcgagagacgacggcggcgaaggagaaggcttatgcagtggcggcgaaggagaagccgagatcggaggaaaaacttctaagtgttggtggagaagacgagggcacatcgggaatatatatacccatagatcttttctcccggttggtgagaacaaccgggactaaagatatctttactcccagttcgtaagaacaaccgggactaaagatattttcccgctatttccaaattctttttaaacccggttagggttaagaactgggactaaagataatagcattgaatattgaatttcattacatatgtgtttctaaaatagtaaataatgcattaaaattatttaaagtcaaaaaattaatgacaaaaccttcgaaaaattattgttgtctgtagtaaattaagtggataatatataataagcacatgaatgatttaaaattgttaaaaattctaataatcatatataattagcatatgcataatattaaattgttaaaaattctaattaacatatgtaaataccacatgcatgatttaaaattaataaaaattctaataatcatatataatttgtatatgcatgatttaaaattgttaaaaattctaattaacatatgtaaataccacatgcatgatttaaaacttttaaaaattctaattagcgtatataactaagatatgcatgatttaaatttgttaaaaattctaataatcatacataattaacatatgccatacaacaattgatttatatgggtattcaatatatccaaaatagtttacatcgtgtacacaacaattacggcaatacatcggcggtaacgatttacggcacgtactttctcctcactattgttccttccttgtgatcgctacgtgagtaaggggtgtcttcatttgataggaggatgctagggtcaatcgtcaccgtgaaaggggggttgcccatcaaactgatcgtaatcctcgtcagtcttgtcctctactccgacgatttttctttttgtctaggagaaccacgtagcgcttcggctcgtcaagccctttgcccttctttcctttgctagacatgtccgtcacgtaaaaaacttgcgttacatcattggcaaggacaaaaggttcgtccgagtatccaaccttgttaaggtcaaccgttgtcatcccactgtcatcaatcattacgcctccaccagtcaacctaacccattggcaccggaacagaggaaccttgagaggtccatagtcaagttcccatatgtcctcgatggcaccgtaatgcgtgccagttgtaccatcgtgtcccatggcatcgatacgaacaacactgttctggtttgtgctcttcatgtcttgggctctcgtatagaatgtgtacccattgatttcatatccctggaatgtcacgatcgagccagatggtcccctcgccaggaaggccagttgttggttaatcgtctcgttgcccatgag

SEQ ID NO: 17564 - DNA, 637 bp, Oryza sativa
tagtagcttaagtagactccccgtagttagccggcgccgccccgaccgttgccgtcgatcgccgtgtgctcgccgccgtcgccgcccgagctccgtagcacccgctcgtcgccggcctcgctcggcgtagttccgcccaatccgatgctagcgtcgagtcccgaagccgcatagatgctctcaccgccgggaatcgacctctcgtgacctcgtcgccgtttccctcttctcccgccgccggttgtcgctgccgcaatccgccgccgtcgagcaacctctggcgaatccgagccgttggctcgcctccccttgtcacgtgcaaccgcccggtgtgcacgcttttgcccgtatcgccgtggttcgctccgccgctcgccgccgccgcccgccgtccattcgcggccgggtcgtcgtctacctcccgccagcccacgtggccgccacgtaggcgccacgtcggcgccagcttagccagaccgggtcgggccgaccccggtcggtccctccgcgtgcgcgcgatccaccgcgagccgtgaggctgcgcgtggccccgccgtacctgcgtccaccgcggaccgcgcgcatgcaccgcgtcccttccccgcccgcgcgcgtgcgtcgcgtgctccctccgcac

SEQ ID NO: 17565 - DNA, 693 bp, Oryza sativa
attttacacccatcaactaacagaagttcaaagcttccaaaatagtacatcgtaagagcagtacaacccggtttaatggtgctttcttagttttgaaattcaaatatgctttttacttgtatgacacctaattaaaaagatatgtaaaagtagttaaatgtaagtgaaacaaacatatttttggatgtcaaaattgtgaaaaccactataaaaaaggctgggttgtactgcacttatttggaccggttttggtaataagagggtgcaaaatgttcggttcccaagatgcttccttttctttatcacctacaacacatgcgcacttgcacatctaaagtttgtgtcagatgacttgtatcttcacttaaaaagatgtaataattcataggttgtttttcctctattcccctaaccatgcctccagaacaaaaaaaaaatgatgaattgacctaattttgtactttggttgtggatggcagtttgtactacatgattggagcgatgaggattgcgtaagaatcttgacacgatgcaaacaagctataactaacaaggaagaaggaggcaaagtgataattatagatacagtgattggatcaccatctcaacagatacttgaagctcaactttcaatggatatatgcatgatgacgttgacaacaggcaaagaacgagaagagagagattggcata

SEQ ID NO: 17566 - DNA, 985 bp, Oryza sativa
cgataacttgcaagatctaaaatcaaatcacaagaatacaaacacatacatcagtacccatctgatgcatgacggtggaggcatcgacacgtagtgcccacaggaggaggtggacactgtggcagccgccgcttggggatggaggaggcggctagcccttggaggtggctgctcggtgatggaggaggagccggatccggtttcccctgacctggatctggcatcccctaacttgcccttggaggaggcggctagcccttggaggagccggatccggtgttggagaggccggatctggcatcccctatctcgccgacgttcccgccgggcctcggcaccttgctcagcttgacgatggacttgacgaattgcgtgaagaaagcggccttgtcctgtgtgaaccgcctgacgaggtggctgcagcggccgctggatctcgcccttcctcgtctgtcggatctcgccacgccgacgctcggggatgagacgctgacgcccggccacatctagccacatctggccggcgcccggcggcatctagccgcatcggcgcccagtggcttggatcccggcgcacggaagaagggagaaagagggaggggcggaagaagggagagcgcgggtggaggcggaagaaaaaagaagaagaccgatgggcgtgggttcggagctgggaggagaggggagggttatgagagcgattttttttatcatctttgacgggcacacaaatatttggcccatcacaggtgactttacctcacatctgacgggttcctttttggcccgtgtcacaggtgaccttttttttttcggggaaatgggaataaattactcaggaataatattgtttcttacaagatatgaaatagaaacacgactagagaggtcctcacaccgacgcttattagcaaaaaatggctgaccatattctgctcacgccgaattttccagagaacaaattctctacttccattcaagaggt

SEQ ID NO: 17567 - DNA, 1428 bp, Oryza sativa
ttggggctgcatatggaagataaacacaatggccatggtgcatgcagagatggagatgaagtccgtcgcgttctggaatccaattcggccacctgagatagtgctgaattcaaacggtcgccaaatttccatatggtctctgttttgggcccacgagtacttgatggaaagctctcggaattctctttccaatggatccaacttcattttcaaattccatctgagtcatcggcaactgaagaaacaaggggatgcattgtctgtaatgggcctatgggcttgtaagttcgtctgggaccccggcccaagtggggcccaaggggggctgcgccccaaacagagggaggaagcccttctgacttcctccatcccttaaatagctagcaaccccttcagggttagttgggttttgttagattaaagtttagccattgctacttccttgcagcgcacgtgtcggctagaccgtccatctgcttgttattcagaacctcaacttatcatctgtatttaattcctatttgcaatatcagattgcttttatcttgttcttgcttgtttcttcgatttgcttggaggaatagggttgatttgcaccggcaagatcaataacccacggagaggtgtatcgatcgctaaggcgcaacgcaacgtcttgtacggttgtagtcagatcgtcaacgtttctctcaaatcgtagttatcttaactcacagaaagatcgggccaacaacagccttgagtatcgagtggaactcagggttcatcaggtggtatcagagctttcgttgctcggtgagtttttatctacctataaccagaaaattgccctaaaaaaattgcatccttacctagacatattgtgccattgcgttgttcttatcaatttttgctttgttgagttctgcgttacatcgtcgaatcgagttgctggtcttagcgtctagtccgtttagagttttgagttctagtcatgttttgttccacaatcgtcgccgccatcatgtctctattgtcgtcgggacctaagaaaacggaatcggcttgctgccacggttctatttttgtagttttcagaagttttttgtcggtcagttttggagttgcatctaggttttgcttaagtttctggtttgcccgtgaatagatcggccgtgcttgttgccggcgtagagaggaggaggaagaatttccaaatctgtttttggaagtacgagagtttaatttggaaagaaatagtagatcagattgattgaaaatcagtttctctttttcctagtggtgccgtatccatccacacgtcgcccaccaccaccgtgaggagtccgaccccctccctctcctctcggtttcggtttcggtttcaatgcataccgtgagttgctagacaccttggtgaatttttgtttggtgtcagtttcgtgatct

SEQ ID NO: 17568 - DNA, 708 bp, Oryza sativa
aattcctgcagccccagcgtactaagcaaagtccggattattgtcgtcttccacttcattttctttcatttcaaccccttgctctccgtgagatgccaacaattatcgcttggcattaactccgacttaaacaagtggaaatgaatagtcctgaatgcagaatactccttctggttcttacacttattgcatggataacaaataaaacccttatgcttgttagcttcggccactctcaaaaaataatgcatgccgacaataaactctttagaccgccggtcagcgtacattcattgcccatccatctacatgaaatgaaaaaaaaaatcgtacacaaataattattcgtacaataatgacagtcatacaataataataaaataatcacaaactcttccaaaggtcatacaataatgacatatcattattcatacaaaaattataaaatattccaccaaataattcttatttattatttttgaacttttaaactaatattaatgtgttgtacttcttttggttttcaatttagtttgttttctattatttaagattaactttcactatattttccttctcaactattttataaaaccttctttagcaaattaacaaaatttctatatattctttctttcccacacaaattttctctctcatcaactaacaacaaaattttggagacaaaaaagtgagcaaaacatagct

SEQ ID NO: 17569 - DNA, 3914 bp, Oryza sativa
tcgggactaaagatgatcaaatcgccaagttccggtttttattgcaaccggaactattgtggaattcgcccgaccgacgaaagatgatttctccaccagtggcgcatatcctaatacaacgaatctagacaaaattatgtccaaattcgtagtgttaggatgtgttacattaattactagctacattagtttttttaatgaaacggagggagtatgtaattatataattgttgaatgtatactcaattaataaatcctgcgtacgtcactggcatcacgggccctgcctgttgacgcatggtcagttccgaggcagccaagctgttgatcaaataaactatatgtatatcaggacttcagctgcctgtgtgaatatataaattcaggaacacgtacaaccacggggatgtgcctgcaatttgaaaccacaaaaacgcacgcgttgcacactagctataggtttgcacttatataatacacttctcatcagtaaacaagagaacggcatgggtctcctgacactttatgcttatcaacgtgtgacagtctcaaaataaaatgaaggccaactggctaattggccatccataatgtgagacaaaagtactcttataattgtcgataaggattttgttcttatttctcagataagctataagtattatttttgtctcacattaattgtaaggtcgaccatgttcccatttctctaactagctataagcacacttgttccctcccatgtgatgctccctgtggcagtgctcgagacacattcgtccctaggcatgacccccacaagcatgatccttttgtgggctatgtcagtgcacctcgggcgccccctcccccccaagcgatgctcggggcacattcgcccctcgggcatgaactctagaacttggcctccgtgggcggttctcggagcacatctgtcacctgttcccaagtatctggggtataccaacctagcctaggaccggtacaacacgcgacaagacaacacataccaaccctgcaacaagcctttatctctcctatgcgaaaaggcgtgtgctataggcggcactgttgagtactatgtcgcacgtttagttcacagtcatcgcacactttcttccgacggcaggcgcacggcctgacaaccgggcccagtcaccaagaagcaacaagaccaaaaagacaccttacccctatgcagggtccatttataaaaaacatgccaccgtgatataaaacgaggaccagggtcactgaaaaagagagaactcttattagttagattgattattttatgatgtactccatgtgtccaaaaataaaacaatctaggattgattggaacatcatctagtacataaccaatttaggtgatgtcccaccgaatcctagattagtttattttggaacggagggagtatatcctatcttaatgccaatggctatcgctatacattgtggaaatggaaacaagaagagttcacttgtgtgggtcccatttatatggactagttggtccatatacattggtgatgccctgcatgcatgtactattaagatgttaggacatactttcttcatctcataaaaaagaaatcttatactccctccatccataatataagggattttgacattttacttgcactatttgatcattcgtcttatttaaaaaaatttagaattattatttgttttatttgtgacttactttattatccatagtactttaagcacaactttttgttttttatatttgcataatttttttgaataagacgagtgctcaaacgttacaaggaaaaagtcaaaatcccttatattatagggcagagagagtacaacatgtaacatatttttagtactatgaatccgaatagcattattgattagttggttcatatatattggtgatgccctgcattcatatattgttcaaatgttactccctccatcttataaaaaataaatatagtaccaactggcactaatccgatgttttgaggtagtggataacttaccatctttcggaagaaatactctaataccccgatgctttgttctggcttctagccaccccggccccttcctctaggtctagtccatccccattaatttagacaatgatcagtagcattctttgccattattcacttccatgggatccttttgagcacctccactgattctcagtttaatttgcaggtgccatgacctagcctatccgccactgagtttcgccatgactgtaatggatggggggattcctaccagaagcaagaggttgttgttggatctaagcagcacaggcatagacatcatcttacttggccaaatcaatgttgaccatcatctagctagctaagctagaaatggagcttgcaagtgattaacttgcaagtgattaattaattcctttggactttcttaattatatatcccacggaagaatctgcaaatcgatgaatgcaacccaactttaggctccatttagtattgcagtgcagtatgatatagtctgatacaaataggggcggatccagcgtaggtgctagggggacttgagtcccccctaccccgctggatcaccactaacaaagggggagatgaaaggaaaagaataggaagaaaattaagagtaggggggactgaaaaaggaagaaggaaatgagttcccccttaaatcttgttctggatccgccactggatacaaccacacattttcatatttggaaattattttcttttggtgttcgatactatgaaaaccattttttcaggcgatcaaatcgctttacgcagacagcccgccacttagcatgtgtttacgaaaatcatattgttttgcaaccaggccgccccaactgaaaatacagtcagcctgtagttaatcagcctcgtagtagtaaattgtttttctattagtagttgtaatatcacagtttgaaaataggaaataaaaaaagttgagaactatgaaaaactggaagtatggtaacatatatattttaatttatttatctaactagtttaaaactataatttgatccgtaaaacaatgtacggcgattataagtatatcaacttaaaaataagcacaacgcagcgtatagcacagcaaatacaaatcgaaccttatacacaatgcactaattaattaatttcgtatcatgctgtatctatgctggtgagaatgctaatgtgactgcggtaaatatataggccgccgccatatttgtgttcttgggtaccagttgctagtagatttctaggatcaaaatctccaaagatctactgagaaaaatgtctgatccatgttgcaattgccgtcgatcatcacatcctccccaccgtcttcgcatggcgatggcggcattgtgtgcaagaacccgtacatgaaatcatccatggccgggaccagatcagcattggtactagccgctgacgacgacatcgccggcaacgtgtccatgaatgaccagtcaatgacatcatcaccgccgtcgtagtcggcagcgccgccgtcggtggagggcactgacgacatggccgtgtcgtcgttgctcgtcgaccgcgcaggggctgctgcttcttgccgctgcgagatcgagtacgacgacgacgacccgccggcggcggcggtgttcgccggaaacgggcggttggcgtgcctcgccgcctcggcctggatctgctcgaccgtgagagccgcgccggggaagcggcggcggacgtcgggagggggggactccgggaagttgagcgagccggcgccgcgcgagccgcggaggcagacggcggcggcgtcgaacgcccgcgccgccttctcggcggactcgtacgagcccagccatatcctctcccggctgttgggcatccggatctccgacacccaccgcccccacttccgcagc

SEQ ID NO: 17570 - DNA, 4179 bp, Oryza sativa
attcctgcagcccgaaaaagagatttcatctagaaatacaatttataaataattaaacttggtgataaaaaataaagactgttgaaagaaagaccatttaaaacacatgtcgagattaattaagtaatagccctatacaagagcagagtggtggcggttgatgggacatctaaaaactattaataaaacaccaaaaagaaaatcctaatgacgattaaaagaaatgacgacaggcaagtcgtgaagcaatctgtcaaggcggttggtgggacttctagaaagtaaaaaaataaaccacaatgataattatttttaatttttataatttcaattaaaataaaaatgaaaggcaatggcgggtcgtataggaatacaatggcagagccgccgatggttggtgtgtcttctagaaagtaaaaataatgaattctaatgatagttatgttcgacttttacaatcccaatgacaataaagtgtatgcggcggacaggtcatagaggagtatagtagcagcgtttgacgggatttctaaaattataaagaaaatgaaacccaacgagacgataaactctaaaaactataaggtccaatttttaaaagttcgggcttctgaaaagtaaaaaaataaaccccaatgataatcatgtttgattttaaaatctcaatgacaataaagaagggcaacaacggccgagccgtataggagtacagcgacaaagccgctgacgttctggcagaactgctagaaagtaaagatagctcgaacctaagcaataacgatgttcgactttaataaagcaatgacaataaagagaagatgaagtggacggtcgtagaggagtataatggcagcgtttgacgggactcctacaaatcataaacaagaagcccaacatgacaataaactttacatcgtgattggatccaaattttaaagattccaaggagaatgaatagaaacagtggtagatcgagcaatcaaataaagaataatatgacaaaagtaaagggtagcaactggtgtgacttttaaaaattataaaactagaaacaagaggatgataaggtttggactttcaaaatttgaagacaatgagaaaactatttaataaattttaagtaaaatcatattaaaaaatatataattttatatggatgctagccgcgcaattgtgcgggccacccagctagttaaatataaacaaaaagaaaaactaattatatagattgtgtgtaaattgcgagacgaatcttttaagcctaattgctccatgatttgataatgtgatgctacagtaaacatttgctaatgacagattagttaggcttaataaatttgtctcgtagtttacatgcggaatctataatatgttttgttattaaactatgtttaatacttcaaatgtgtgtccatatatccgatgtgataaccaaacccaaaacttttccacaaactaaacaaggctaaagttttattttcatactacatgttaagttgttgcttacgtttgaatagaacaagcacatttatagaaaacaatattatatttactgaaaatcgcgaaactagagatcacctggctgaaatcacaaatttagcattctatcgtacaacaaaagtttgatagggtgcatatcgaacggctgcacccatcaaacaacagttttttaacatgctctttgccaaagtgtggctgttcaatgggttgttcgctaggataaaaagaaaagtgaaagcgcatgcatgcagggtggcctacggaaccatggttgttcaatacatcttgctcgtctaccaccaattgtaaggttgattacctggcctcatgtacattttattgctccttcaagtgttggtgatattgtttcgataagctatgaacatgcatcatgtgcttttacaaccttttaccattcaaacaaccctgtcaaatgatagttgtggttgttcgatatgtactatgtcaaattttggttgtccaatagggtcttgtctagggttttctttgtattcttttcattgtttctctatttattattacctccgatggaaatattgatgtagaatgacactcttaaaaacaggaaaaaaataatatgactggtaaatataaatttgcatacctacataactagaaagagtagaagagtgataggacataccgagaatgatatgccttccatattgaaagaatggaagtcattatttatttattttctacctcaatgtttgctaccttgcatatgggccacaaatgggttgagaaattgtggcatccaaaacaaccccaactgtattgttggacatgaatcgactcaactctagatttattttttcagaaatttttaacgaccatttgtagggatcaaggatgcaagaaggttagggagacaagtgtttaaaatcttaagatatttaactatttatcactctttgatgtaattcatcacctatacttatatgttataggcatatgagggttcacatgtcattgacatatggatacaaatagttaaagctaaatttaagagtggccaatagataaattccttatcttttttttcttgcttactagttactccctccatttcaaattaatctacatatatttttttgaggttatttctaaatgatctacatatttgtgtttattcattgagtctattcgttatttatgtattggagtaaatggacattgatgcatgcaagtatgcacacaagtatttataacctacatgcaatatcttgatttgctattggctaaaaaatagtggggatggtgcatgcatcgagtttgttgctagagtgcatatagtatgagagagttattagcttttcttgattttggtgtacttataaaatatgtagatcaattaggaatggagggaatatttttttattagcaagtgagtgataaaccatgaagcgggtttttatgctgacagtgaaattgcccccttatgttgctaactatcttacttttgtccagaagtaaaaattacttctattgtcccaaaatataacaatttatatcttaagtataacaacttctacaccaatattctctttctaaccaatcacaaacctccaccatttaattttttcacctagctctacttatcatccaatcataatacttttctatttaattttatctattttcttaataactatgtttaactctaaaaatgtttatattttgggacgaaaggagttaatgtactactccctccgtcctctaatataagggattttgatattttgcttgtattgttcgaccactcgtcttattaaaaaaattgtgcaaatataaaaaatgaaaagttgtgcttaaaatactttgggtaataaagtaagtcacaaataaaataaataataattctaatttttttgaataagataaataatcaaacagtataagtaaaatgttaaaatcacttatattaggggatggagggagtagtacattaacatcttcctaagatggcaaaatcctaaaaaaatggtaaaaaaaatgggaggaaaaagaaataggagaaagaaaaatggcaaagatgaagaactcggcctgccccttcattcccttccatccacttccaatccatccagcccaagtccatctcccacccttccaccactacccacatcgtctcgccgccgtcgccgccgccggcgtgacctccgccgcaaatccgcagcccccaccaccgccacccaaagctctcatcccgcatgaaggcgtcgatcaagttccgcgacgacgaccggccgctgctgcgtgccagggtgccgatcagggtgctcgggctgccgctccactccggcctctccgccggcggcgacccgcgcgagctccgcctcgacctctccaccgccttctccttcggcccggcgatccgcctctcgtaccgccccaatgaccccgccctccccttctccgtctccgtccgcgccggcgtcgggcccctcggctcccccgcccgcgcgcccttctccctcgccgccgagttcaacctcctctccggcaaccccggatcccccgccttcttcctcctcctcaagccgcgcctcggcgacttctcgctctcccacaccctccgctcctcgccgcatcccggtaataaggtcggggaggtctccgatggcgatggccatgggcgcgaggtgaactacaagg

SEQ ID NO: 17571 - DNA, 3388 bp, Oryza sativa
aaggcctatgcaatgaaggagttgactagaaaaggctttatattatacagtgtcacacgataatccttccccctattgcacatctcatctttccaaagtcagcttcccaaaacccctatttatccatctgatcctcgtgaaatcacattcccctactgcctatctcggctacattgccctttgccaactatagggatggtgcggaataaccgaatataatttcagctacatcgcccagtgggttcccgttgatgcctggttgatttagtacaatgaaatcaacctaaagttccctccgttttaggttataagacgttttgattttggtcaaagtcaagactactctaaatttaactaattttatagaaaaaaacagtagtatttttaacccaagacaaatatattataaaaatctattcaattatagatttaatgaaactatgcttgtgttgtaaatattaatattttttctatatagttagtcaaacttagtagtttgactttgactaaagtcaaaacgtcttataaccttataacctgaaacacttataacctgaaacagatggaagtatattgtatattcagtgtattatgtaacagatgcagtaacctccccacgaaaaaggaaaacctccccacgaaaaatgaaaagcaaaaggcactagcccctgcactatctgtgcgccatggcgtggagactatcagccgaaagtgctgaacttaggggcaggaataggaaaatcgtaaggctgcataagaaaaatggaggattagtaaacaaaggaattttggctgagtttttttctctaagtttccaactcactcatctcgtttttcgcccgcacgctttttaaactgctaaacggtacattctttttttttcaaaaattctctttacgaaagttgctttaaaaaattatattgatccatgtttagaaaagagctaatacttaattaatcacgcgctaatggatcgtttagttttccatgcgtgggaggcgaagttcctaactcacctcccgatcacaaacacaacctttgtaggattagatgttccgaatatagggatagaaaaatgaggatttcatcttatggctgcctatgatgaaaaagaaagaggttggagtggtgttgacgaaaaaatagaacacagcggcctgagagatctgcttaactcctgtgcaggtccaaagattgatgagatgcgggcgtgccagtcagtttgatcctgcaactgacaagatatgcaaataatagacaaaacacccgatcggctgacaagccgatggagtagttccagccgatggccgataatagccgatgccaataccagccgatagcgatagggtttaagcaatcggctatatgtccaatatagataatgatataaaggcaatcggctgatgatgatgtaataaaataacaatataattcagtagaaatcaatcggctaacaatatgatatagtagaacaagtattgatctaaaggttaaagcacatatcggctggtggttcgatgtcattaaatccacaagattagataaaacagtgaaacctttgttgtcatcggctaaatccaacttatatgtatgtgcaatccttacgagccgatgcaacgtccagataactcaccagctgaaaccccgatgaaatccttattggcagtcaagcagcaggctagagattatggttctaagcacgacttagtaggtcaaacttaactgatgcagcactaagtatgaaaagaaacataatatctagacaatcaagccattgaccgagtttttagggtggtagatgtctaagctaatctaatctagcaacgcgatttagccgataccggcagaaaccctaaaatgagaagcagccgatagagctaaattgatatgctaagactagattaacagatatatatgataaataggtaaccagagcaatccaagaggtcgaatgtactgatgcagccttaaacgacgccgatgtagatgagacaattgcatgggccgatggaacattggatttaccccttcgccggagatcgaacatcgatgcagccccgcgttaagtgccaagtcccgccggaacgtaaaaaacaaaagtagaagtaaaaagggtggcgatgcgccgaattgtattgatcgtgaagatagattacatagaccccaggtgtacatatttatacccatgggttgatacaagttcttgtcggacaagaaagaaactatcctaaagataaaaggaaactaacaaactattcctaattaatagataaaactgccttcttcggactcgatccatacgtggcagtcatcatgaagcacgtcaactcaatctgacaatgattctaatatcaccttgccggaatcggctacatcggcttgccttgtccgattcggtaactgtcgatgcacactgtagccgatgcagttccgaagccgattcatatcctgtttctataatcgatttccctccaaatccacttcggccttagctccaaatccgatgtaaatttaccaaatttggttgttaacaagtggatgtttggaatcatttggaactcctatgttttcatgggaacattacaatattcttccaaaattcctttgtgtgtttcctacaattcaagaacacgtgaacagtagcaaattcaaaggaatcataaatcctacaaaatcctttgtaaattgtaaacccttttatttgaacaagccataaccaaagagataaaaacgttaacctccatcactagttccctaccgtactactactcctaccgtacaagtaaaatccaagaaacattatggtgcgccccacatgccagccgattttctttcttgcttaattattatccggcgtcttaaaacactgcgtaatcatggatggctaggagaacatgacaactgtataaaataataaatcgattgaacctctaaaaaaaatactacgacaaaatcgactgaataatacgacctgtacctggcagggtgggccccaccactccgtccaaaaaaaaatgttcccagttaaattcggacccatttcgcagaggcaccccacgaaacctccgaattacccgaagaggcttgcggttccattttaaaatccaaccaaataaagaaagtggaggtgaaaatcgtggatcgaaagggacgaagagaggaggccagggcaagggaccaaaacctagacgaaccacacgcagaagaagagagagaaagagagagagagagaaggcccaaacaccaccaaaccctagccctcacctcgccccgccgtccatggaggcggcgctgtgacccgccgccgccgccaccgtcgtcgtcgtcgtggcgtgcggaaccgatagggcggaggggatgacccgcagatcgggcgaccccggcgtct

SEQ ID NO: 17572 - DNA, 4105 bp, Oryza sativa
  unsure (1)..(4105): unsure at all n locations
ctgatcggtcggccacaatttttttggaataaactgcttattgcgattttttttatttttaaatggttaggtcgttgcaatcaaaagtgaaacggctcaaggaggagagggaaaagagcatctccggcgagacgaagccgccgccggcggcggcggcggtgaaggaggaggaggaggatgtacggaagggatcaccggaggaggccggcgccgtggaggacagggtctccggccacgaatccggccggtcatgcaaggagtcgaactcgtcagatctgaagcggccggagaacgaccccgcggtcgccgacgacgacgaccgggaggcggaggaggaggaggaggcggcggcggcgcccgcggccggcgacatcgccgtgaaggaggaggcgtcgggcgagtcggtggctgggtcgaaggaggcggacgtcgagaaggagagcagcgacgtgcagagctccgccagcccgtcccgccgccggcgacggaagggcggaggcggcggcgaagaggcggaggcggcgtcgccgtcggtgtccgtgcccctccccgccgccgaggccgagccgctcgtcgccttcctcgagtcggtccggaccagcaaggccggcgccgtgttcgagcggcggctcgatagccaggtaagaaaaaaaaaactcctcccattttcactcacagtaaaaaaatgaaaaaaaagagaaaacatctggtttgcttctaataacatttcaattacccgcactttaaatttttaactgcacattcttgcgatttattattaaccgtttggcgattagtgcctcaactaatcacgaaattatagcggctgatcagagtaaagtacaatcttaaaaggggtcagcctcttcgttcgtcacggtcgtcatgagcaaggaaacaacgtggaattttcgcttctcgtacggccgcgatttggtcgacgaatctgagccgttggatttaaatgtcccacgaggatgcggagataataataaaaactgagggtgaaaaacgagtggcgttgggagaggcgcggcgttgtttggttccgtggcggtgggcccgggctggctcagcatgggcccgtcatgtgccaccacatcatcgttgtgggggagatgacgtgtgggcccatcatgtcggccactcgctgccaagcccaataaaaatgatgcaacgatccttgaccgtctccaaatgcgagtcgcccaggattatgaattttaagctcgttttttgtcatttttttaaactgatttttgaatctttgttcattttgcaggatggggagaggtacagtggcacgatcaggcgccatgtggacctggagacggtcaggtcgaggctggtgggtgcaacggcggcggcggcggcggcggcgtgctacgcgtcggcgtccgagttctaccgcgacatgatgctgctctgcgccaacgcgctcgtcttcttcccgcgcggctcgccggagcacgccgccgcgctccagctgcgcgcgctcgtctccaagcaggtctccaaggaccggcagcctcacgccggggcgaaggcccccgcggcggcggcggaggaggaggagaagaagaagccggccaaggccgacgccgacatcgctgggccgctgctcgagaaggcgccgatcatcgtctgccggaagcggagctccatcgcgaaggccgcggcggcggctgccaagggggagaaggcggagaaggcagagacggacaagaaggagaaggacggcagcgaggagaagaagaaggctgcggcggcagcgacgacggcgacggcggcggccactgccaaggacaagaaggctcggggcatgaggacgaacaagagccggggacccgcgaggaatcagaagacggcgaagctctcggagaccggcgaggggaccaagaagtccgacaagaagggcggcggcggaggcggcagctcttcggcaggggcggcggcgggcgaggttgccaagaagcgaaacgccgtggatttcctgaaccggatgaaccagaacggctcgccgtcgacggagagggtgtcgttgctggagacgctgaagctctccgcggcggcgacggaacagcaagagacagtcgtagtcgtcgtcatccgggaagggcgacggccggaaggaggccggcggctcaggctccaagaagggcgccgcgcctcgacgccaccagggaggaggatcggtcggccaccgaagcgggcggccgcgccgcagacgccgccccgttccaagagggccaaggacgacaagccgaccaggaagcgcgggaagaagtgaacggtcgtcggaatggggaggtggcgggaaaggctgcgggtgtaaatgtttgtaggggttggcggtagaaaaaaaccttttgtttttgtgttttggcgccaattgttgtagcgaggaggtgggagaatttttgttgctttttggcgggagatgaacgatggaacatctggtttcactctcacctcgatacttcatgaaagattaagaactttggtgaaagaatcgtgttcaccttaaggctggttttgtaggatatgtttttgactggattctgtaacctacactgaatcaggacacattggtgtcaatatggcatgaatcgaatcaagaacatatggtgtcaatgtggcatcatcatttaaccgcaataaactcgagtgggattctgtaatctggtattgctgttggaagttgttacatgcatatctgaatgcacatgtctcagctgagctttaacattcttcacctggctggcaaaagttcgaagaaatttcacctgtgtttcagctttgctgtaacatttttctctggctggtaaaagttggaaaagggtggaggtttaacgtttttcacattgctggcaaaagttggaataaaattcatctggcttgcaagaaatggccaaaaaaaaaagaagattttaaatcatgcggtgagcgtggatcgaacacgcgaccttcagatcttcagtatgacnnnnnnnnnnnnnnnnnnnnnnnnnnnttgttcagtttattacacgagtaattctgttttcttcgcagaattcattaatgctgtgcccgccgtacaagatgcaatcactgagtcacatgccagatcgctttgcagaacgtgttgcaaatgagtttctccaaacctttttacacagattcatattagtcacaggattcataaaataattttcttgatacaggatagcgcgctgcatactgtacagtgccgcaatttctttgcaggcacggatggcacagaagcaaataatttacaacctactaatttatgtccccatttcctgaaggagaaagggggtttcatctacgctctatttttagggcagttatctctacatttgcaaagaaaataccattgcaacaatacaagatatggagatctctaacaatatatattccaaccacaaattcacaattcatgtcgaccaatatatctggccgaccttgcattcttcacatgagtttccatcttcacccaccgtctgaagtgggtatccagttagtgcctgcagttctaaagctcaagacgtcaccagcaagtgatgccatgaccaccgatgtcatgcaacggtagtacctagttggcttgcaacgagcacaatatcttctgttatataaagtataaacagcggttagtgaaattgatcaagatcataagtaatgtgcaatgcatcatgttattccacatgttcgctgagtagctagacagtatttgggtttggtctagcttaagacgtcccacctgagaccaaatcgatgatgtgcataacttagcatacccgaattgtgatttcattttacagcccttcatagcaggatatagtactagcatctattaataacagtttcatatattgttggaggtagaattggtcttcaatttgaataaaacataaaggttctatactatgtccagcgttccagacagactagtgagaggtaaggaccaaatttaactggtcatttcccacttttgctcagaataagaaggcaaggggattttgaaaggtaaatacacatattaagccatcagttaactcaaactagaacttttgatactttattttcgaaattttggggg

SEQ ID NO: 17573 - DNA, 2085 bp, Oryza sativa
cagttcagttattagactttctttctcctacaaaagtcaacataatgttttcataaaagaatggtaggaaggggacaattacaatttaggatttccattgttgaaattacccaagttatagcatcagactgcactttaaatgctctgagaacaccagtgtacgcttgttgctcgatctgacgtatttctctgtccacgttgctgtgtaggtttggttgaggaagtgatccatttccattgaaaatcactcttggtcctctaggttggtatgtcggaggaaggtcgtcatcagtgcctgcagtcaagggcatagtcaataccattgaaatactgaatacacacattgtcaagagtttgaggtttcgcaaaatcatatctagatattctctacatatgtggatgctccttttaagtaattaattgacaattctaccaaaatagccacgtcctaattcctgacaagctacaattacttgtatgtaatctccataacagcacatcctcaattcctcacctcatactactctacaacgctacgaatctccccttcttcacaatatatatttaacacaaggcattatacacatttaggtgagttaatacccttcctcaaagattcccctccctgtaaaatccacctccattaatccatcacttatcttccatactcacaacaacttacaacgcacaggaaaagcataataatttttttagaggagcaaaaaataatatttgcaatttctgtatgaccgagtttaacaatgtggacatcctttcatcagctaatatatttccaaacgaaatttcccataatctaacagtaaagtacggccgcaagccgatgaactctcctacaaagaatcacacaaaaacctactggcgccacacaagaacgagcaaagactttcctctcagcaattctctctcgcgtaaacaacaacagattgatcgaattagactgatactgaccgctgctgtcgaggggttggtactgcatggtctcccggttcttgttcttccggggcacaccaattgcccgcgtgacctccggatccggtgctctccgccgaccagagctcgaatccggcgagaccagaatccaccggaggctggagccgcagctattggagaggaattcgcgctcgatttgaggggtttcggggtggaatcgggtgggaaacgcgagggtggtggaggcgtcggcgacgagccaaggggggaggcgtgttcaacttctgtttttttttttttttttgatcatgaggcgagttcaactacttcaacgcgatcgtgaaattagagaagtaaaattttcgggtagactcgctaagaatgttttaaaagaaaaacttatcggcgaaccggtgagacgagtcttgaagtattttctattttctaaggggcaacagaaatgtatattacaaatgagacccatttatatgaacttacattattattaggaggagagaagaggcagagaaaactaatatatttaattctctatgggtagcccatatgtttatgggtagttttcgttatttctttgctatggactagttgtctagtttcacaatattgataggtggctgaaacaaatattgtattgcttatggaccacttttagactatattatggatgctctaagagtagattaatttcgaggggattacctacatatctactgacaaaatttccataaaaaatttaacagatataattataattcaatcgtcataaaattacactgtaactttcaaaaatctctccgtaacatactattttagtgaaacggggatcgtgtcaacgaatcttctcatatgtgtgtgagtgacttttttacttcctcacatacataaattttgaaacaaatctaacaatttaaaatgatgtgaagttacatataaattacaatgtaattacatataagttatagtataattacactacggttgcactgtaataacatcggttaaatttatcgataaatgtgtagcaaaattataaagggtttttagggtgcatattagagtaacatccttgtcattgacgctggatatataacacaggaatttaccagtacaccg

SEQ ID NO: 17574 - DNA, 973 bp, Oryza sativa
aattcctgcagcccaatggctttgatgcagtgtaatatatatagttctgtccttgtacacttcaggaggtgtgcactcacgattggattggcctgagatgaatgggagacacttatcaagacaaacctcacaggatcatggctcgtcgccaagcatgtatgtagacgcatgcgtgatgccaagctaaagggttcagtaattaacatttcctctgtttctggtcttaaccgtggtcatctgcctggctccactggatacgcagcttccaagtctgccatgcattatgccacaaaggtactatacttattactcaataattctcatcaggcgtttgtttaatgtgcttgtaacaaactatatttgatatgcttgtgcagctaatggctttggaattaggagcatatggcattagagtgaactcaatagcacctggaatcttcaagtcagagataaccgctcctctattgcaaaagaaatggttgagcactgttgtttcaaagatagtgccacttaagactcatggcactactgatccagcattgacgtcgctggttcgttttctgatccatgaaacatcatcatatgtgactggcaacatcttcattgtagattctggtgccaccttacctggtgttccaatattctcttctctgtaatattcatcattagaatttgctttcaaaaagtcatcggatctattgatttggcatcaaataaaaatcgaaactccagggaggtggaatttctatacaattgatttccaatatactctcaacctgtccacaagttgttttctgttattttcttattggcatgctactctgacaaatacattttttggtataaaatgacaagttatctacttttggtcctcttatattttataatctgtcaaagtatcaaccaagatgatgaacccattggcactttggcagcggtataattaagttaggaatattcttttttaggtgtt

SEQ ID NO: 17575 - DNA, 38072 bp, Oryza sativa
  unsure (1)..(38072): unsure at all n locations
ttactatgttgatatattcttgattaagacctgagctgtagtgtattttattttaaaagaactctagtgttatgtggatcctctgctttgagtgggtgaaccactgcacatgcaaccagcggtcttcatggacttttcccgttgtattacgcatgcaactgtgaacaaagacttgtacagttgtactttccattttagggtcaacgcttagtcctactgcctcattggaggcctttatcgcttgggtgtttgggccttttcaaggccgtgctatatgtagttcacaatacggccgttgtagaaatttagcccaacaaagttaaatagctcgtgtaggagtaagcactaagcagtaatcgcactgttttttaatataggatgccattggcattttaacatatgttaattaattattcatcttattttaaaaatatatgtaattattatttattttaatgtgaattgttttattgttaagagcataatctatatttctacaaatttatttttttatttgaaataatatgaacggccaaatgtatatgtccaatcttgaaaccggcaataataaaaggggtagcgcacgagacctaaaagtggatggatgcatagacaataatttagacaggtttatgccctctcgatgagagataataccgtacttctgtttggggattgtattcgttgggtgtgtatcgatctgacgatctagctgtggagttatgcccttggagggcttttgcccaccttatataggttggggacttgggggacatgattacaaagagagaacctggccggatacgacatcagtttccttaatctactttacaatattaccgaatcaaaactttaggttgttccataatacataagaaaacgcaatatctaagtcatggctcgttacatattccataaacataatctatcccctatatctggtcggataaagaagttgtgtgcgcatatggtactcataatctccatagtatatttagaagttaattgtgtcatatattagaaaaacacatgggaacattaagcagttacaatatatacagtttattcttctcaattggacacgaaccacaagtacacttgttggaggatgaccattttgggaatactttaaaaaccatatgtgatgaacaaaccgtgatagagggagtatattataattaaagaactacttatgttatgaatgaatattgacaaggaatttttcaaaagtaaaattgcttaattacgggtactgattactgacacaaatagacctttgacacggcaatgctagaactgatgaagtcatgaaggtatacgatctcacgccatatctgtctatcaacagtggttgttaggatcgttgcttatagggcacgatcggctatacttttgctccaacggtggtagcctgtggcctcctgtccagtgcggcgacggcggcggcggcagcgctatgttgcccgagccaccggcgccggaggcttgatcggcgtacgggcttgccatggccggtgaccatgacgccgacatgaccatcgtcacgaagaacatggccactgacaccttcctcatcgttggcatggcgattatgtatactgtaactcctgtactagctagatcgaagatactcgctcacagttgtgttatctgatctgctctgttttctccacaaaaattataattaactctgcagtgttttgagctgtgacacgaagaatggtcgatgttacgatcggttatttataggttgggagaagctcgtgagtcatgagacatggcctgatgccaaggccaaaccctgaaagttcttggctttttacgtgtgtgactgtctgtctgactgatcaactaattaatttgacgagtttgtgaatgaaattgcaaagcagctacgaggttttcttggtctacaagcatgcaactttgcaaagttatatcgagtgaggtctgtcggtcgatcggtcagtgcatgctttcttacgaacttgcaaaaccaagactgtaataactctcttcttcagatgtagctttctgccactgatctctctttttgccgtaagtagtctgactgtccggatagaccaggccagctagcatgaatggaagacgaactgaaagtgtccggaattcgtactgggcacatcgttccaacttcgacgtgaattgctgaaaggaatggcaagattgcgaggctagtgcttaattaagagcgattgccttgtgaacacgccatcagctgtattagagttcatgtagtgttcttcatattcaaaaagaagaaactccctataacagagcttgaagcactactagttctacttaaccggcaatttcgtgttcttaactagagcagtgatttttcatgcatcccaaaatgcagttcgatatgataagagattaagagctcgaaatgctagtgtttcgagcagttttaccagttcttagatgtaccaaaagataccactatttcacaaaactgtatacacctctacaaaactatatatgtatcgtgaaattaaactatatactaaaccataatattgtaaattcgcttaattagcacaatttctatactccttttaaaagagaacaatggtggtcaccaagtatatagtatttctttaatttatcatctactccggccatcatgttttctatcaattccccatgcatgtgctttaatgttataaaatgatctctctgcatgtatgattctatcatattcacctgtacaatatgacatttataggtacaaaattattcaaaaaacctcactaataatttgttttaatccgtaacaaagcacggttattcggcttttatcatataacaacataagcaatcgtatcgttcataataacatatagtaaaactacatatttatttaagatgttaattagttcaataaccaatcttgatcagggtacattacaatagttaatcaagtagtcatcacaggttagtggactaaatttcttgttattaaacacaacaattctgataggttgataaccacttaggttgttttctttttctaagttccaaacttcctctccttcatttttcgcacgcacagtacgctttccgaacagctaaacgatatgtttttttttaaaaaaatctacaggaatgttacttttaaaaaaacatgttaatctatttttaagttttttaactaatacataattaattatgcactaatctgtcctcttgttttgcgcgttgggaggtgtgggtttggtcataccttcgaacacaaccttaatacataatgatggccaaacattagtatggttagtggacagaatttcagattttctagacacccttatgaaatactaatatgtaatcctttaataaaattggtactaaatctagagttttacaagacatcaaaatataattgttgtcatggttatgataccacatacctaatagtagttgactaaatctcggcaggatccaccacatacaatgtcttatacggaaactgacttcggatatggagagagttccgataaggaaagacaaccagagttctacatggaaacgacaagaactactcggattgtatccatattggtttccctagttctacttggacaaggggacacctatgggtataaatacagggccccctaggaggagaggagagaacaaccatccacgatgagaagatcaacacccaccagaagccacaacatacaagcctacatacgccaagacaagccgccggatatcgacatcagagatacgcttggatcgaccctatccggtaccttcagaggccggccgtagggatctagcactgtctctgattccgtcgggcgcgagctcgaggaggaaggctaccctgttgtcgactacgagtcagaccttcagaccgccatgtcgacagcagttagataggctaccccacatattgtactggtgtgattatggtgaataaaaagcaacatcggctccagccaacaggatgtagggctattacctgacagctcaggggctcgaacctgtataaaaatcctcgtctccatctcttttatctcagtctcgcgtatatcctagcaccaacgatccccatactgtccaaataccgtagtcgagacatcaaacgtcgacagtggcgcgccaggtaggggggttttggtgctctatattttgacgagatgggttcaaaggatggattctccaacaacaagctactcgatgacttcggctgtaaggagatctaacccgactgaagtacatcttccgaccagatcggaaccatcaacgtcaacaattttgatctgttgagataatccaaccttcaaagatgacgccaccgctgcggagggcatctgtacggtatttccgaccattgacgatcttgaggatgatgccggaagggtacaagacgccgacacctctagagaccgaaaccgactactacactcatcgggtttaagtgcggttttggttagactcggagtaacaagccggatataccattgcccgacatcgccacgtactgatcgcttctgacatgtgcacatgcatatgcacagactcaatacgtgcccaggcatgcattggtttgccatcatatacatgcaccgaagacaattcaatggctactaaggctagttaaggtaattagtagattaattaatttaatcaatctactaattccgtagatatatccggcatatatctacacaggtacgcaatattttatatgcaatttatcgtacctatccagatcatgcagtattgtcagatcaataatttattatgtttacctagagcatgttttttatacaatgtccgttgtgcgagtacttccgacgataggccaactacggtctaacgctgggggctcgctctattttcttctgtataaatcatgcttgtttacggtttacataatgcctgatatttaatctgctcgttatatcctgataatactagaagatccatgcagttttttgagtacatactcgatattatctgctatatatcttgccttctagaaaatatttttcaggaataattgagcacttgagtaggttatggtcgagtacactccattatcgagaacattctcgacaaatgcggagttatcgcacccaacctaccaacaaagaccgacgacctatctcatagcaccggccatggctggactactcgagaaaaggttgttaacggataattcctcgcgaacgccgtcggcttgatcacccgacatgattgcgaacggacatccggatatgctataagttgggtacgtgagtcatgctggccacatgaaatacacttgcaataaaccaccagtacgcagcaatctctcacaccgcaacttccgttggtgttcgagagataattccgcttgctcactagttctcgcaccagtacgcagcaatctctcacaccgcaacttctattggtgttcgagagataattccgctcgctcactggttctcgcaccagtacgcagcaatctctcgcaccttaacttcagatggtcaaggtacgtctacggcagcgtagcggtcctcgtaccacgactacaaatgatcgagggacactattcaccggttctcaatcagttgatcgtagtgatctctcgtacatttgcttcaagtggtcgagttacgactactgcctggtcctcgaccagcgatgtagcgtctctcccaccacttccactttcagtggtcgagttacgactactgcctggtcctcgaccagcgatgtagcgtttctccagctacttccactttcagtggtcgagttacgactactgcctagttctcgaccagcaatgtagcgtctctccggctacttccactttaagtggtcgagttacgactaccgcctgattctcgaccagcgatgtagcgtctctccggctacttccactttaagtggtcgagttacgactactgcctggttctcgaccagcagtgtagcatttctccccctatttccacttcaagtggtcgagttacgactactccctggttcttgaccagcagtgtagcgtttctcccactattttcacttcaagtggtcgagttacgactactccctggtcctcgaccagcgatgtagcgtttctcccactatttccacttctagtggtcgagttacgactactgcctggtcctcgaccagcggtgtagcgatttctcccactacctctacttcaacaaagttggtagcaggtacacaatatcgccaagtgttttacctagagatcccttaccacgatgacacctagcgttgaaacctatcctactgtccctttacgccgtcctgacaaggcctccgaggaacctaagggatcttcggctggggacgcccagagccgataaggccttgtcggatcctgtagagacgaaataccatgtaagatctggtcgtgtaagagttcttgccatgcgtattaaccaagccgtgtaatcggaaattaactttccaacttcacggctggggctaggatcagtgcttattcaaccaaggcagattaagggtccaagagccttatcctctgagaacgattctccgacgacaaggctgggggctagggagagtgtatgactctacaaactaactgatcgaagtcggtaagacgctcatacacaaaacattggtcggtaaatttaattcattttcaatttaccatacatattataacatgtcaccctttgagcattcgctcgggggctctttctatttgatatacttttctgagtattgattttaggaaaattctattcgacatttacgaagactccatgtctctatggttctacaccaagatcgactaaaggcgagtacgacaaatgttgacaaagctccgtcgcagactctatgccttctcgatcactcgagaatggttgctggatctcgacaaggaatacggaatgaaaagatagtgtaccctccgagatagaatttcttgacttcaatacaaattctcgattacggcaagacggaagacttagtcgtacgctatgtacttccttggttgacatcggagattgactcagacaaaccctttaggtgcccgcatgaggctgacaaaggaagtctaacgttatctctaaactcaccgagaacggtcacatgagctcgataacagttactccaaggtctgcgtgcggttgagaatatgaattcgttcatttgcattgaagtcggggggctactgtcatggttatggataccacatacctaatagtagttgactaaatctcggcaggatccaccacataccatgtcttatacggaaactgacttcagatatggagggagttccaataaggaaagacaaccagagttctacatggaaacgacaaggactactcggattgtatccatattggtttccctagttctacttggacaaggggacacctatgggtataaatacagggcccctaggaggagaggagagaacaaccacccacgatgagaagatcaacacccaccagaagccacaacatacaagcctacatacgccaagacaagccgccagatatcgacatcagagatacgcctggatcaaccctatccggtaccttcagaggccggttgtagggatctagcactgtctctgattccgtcaggcgcgagctcgaggaggaaggctaccctgttgtcgactacgagttagaccttcagaccgccatgtcgacaacagttagataggctaccccatatattgtactggtgtgattatggtgaataaaaagcaacatcggctccggccaacaggatgtagggctattacctgacagctcaggggcccgaacctgtataaaaatcctcgtctccatctcttttatctcagtctcacgtatatcctagcaccaacgatccgcatactgtccaaataccgtagtcgagacatcaaacgtcgacaattgtgtgttaaattctttgcaaatttttattctgtatgatattgtgaattaaatatggactccctccatatcaaaatatacataactacctctaactaaaaaatatcttgaaatatggctacttcgcagatgagtgcttgcccagttggtatattgtaagctgttaagcaagctagtacttgtacattgagaataaaagttaccaccaaagacttccactttacattatcatttctgaggtgaaaaatggtccttgtcgatttgccaatggccgagtgaatactgtaaaaactgacgacttttaatagaggtggcactggcagtagaagtaaatttactacgtttcatttttactatgtgtttatgtctgatcttgtgaagctatgatgttgatcgattgtggcacaattgatccatttttgggggcgacatgagtaatatgcagtggtcagtgaacttgtcgcacatacgcatgctagttttatccattttttagtcagaattaggtctcgttagtttcgtggcacatttttcaaactgctaaacggtgtgtttcgtatgaaaactttctatatgaaagttgctctaaaatatcatattaatctattttcaagtttataataattaaaactcaattaataccgccttgttttgcataaaaaaactttatcttcatctctatcttcatcttcatcttcatcttcagttacattttaggatgggggaatactcacactagcaattatctggttgagttatcttacaaccttcgtggaaatctacgtggctgattggctacagattagcacttgttttgtgcaaggggaaatttatagccccatcggtcagcctaataagccaaagtaaaagtcaaaattagaattttcgaacttgattttaaagtttattttaagatattttcaacttaatttctttttagtattgacttttagatcgctacgaacaaatatataaaagttttatctataaattaatttttattttctaataaactattttggcttattagaggatatgggcaaccaataagactcttaaatcgtatgatgctgagtaagctagtgtaaataggctagtagtactagactagctacgcataatggatattagatggtttcatcaggaatggaagagtttggcgagaagatgaaatcaaaatccaattcttgtttaagatctgaactccggtctgctttgaataccctttagctacccctaaatattcaccatcaatactgctttcctattaatgagaggtattttgtttttttttctctactatctaaagctaaatattaagttatattggaaagtagggagtagattccccagctgtacaataggcatgtatgatattccactcatgttttaggcatgcaaacaagcaagcctccgcataaaacccacttagttatttatttcttttatggtagtatagtttttagaagaaaaaataaattagaagtacgattcactttattcgtcttattcgtcttgcttgcatcccgacgcctgttcttgtaccccacttatgaggtcagcaagttgatgaaacctttgtttggtgtaacaagctagctcagtcaaagttttttgttcaagtcgaagtcaaccggccagttcgtttgatacacattctcagagatagacgcctcagctcgcaaaatagagacgggaagaacagagtaatgatgcaatctgcttgactctcgggtgttccataggtgagatatttctgaccatcgatgcaatttatgtagacatttctgtggacatgcatggctgcttttccatcggtacctagtccatcaattccctttatatacatatacagtacaggtccatggaattggacgatacatacgtacatacagtacttgcaaggtttgtgagagcaaataatccatacatttctgattcaacacgaaataaaataatattatattaagtaaggacaaagaaaactagtggaggagccacgcacaaactatgggtttggctgaccccacaatttttgtactatcaccctttgtgtgtcttgatttttttttcatttaaatctattaagttttgcacaaataaccccactacaataccaaacaataaaaattgttttcacggggtaaaattactggcttcgccacttacgacaaccagaccatacaatttggtatctaccatgttagttgtggcaatctggcggcggtttattattttggtcattgctgcggcacgagggacctggttgtgaaagctgttgcagatacagattttggaggaactgtatgagaggatgatcgccggaggtggccatgccaacccatttgtcgcctcccatcggccgcgctgatcctgacacggccgacagcagaagcaccaccatcatcagtggcaaaacaaacctcttcgccacggccataatacgagctcttcctactctctcgatctgtgtctaacacaagctttaggccctgtttagatgggactaaaacttttaagtccctatcacatcggatgtttgaaaattaattataaatattaaacgtagactattaataaaacccatccataatcttggactaatttgcgagacgaatctaatgagcctaattaatccatgattagcctatgtgatgctacagtaaacattctctaattatagattaattaggcttaaaaaatttgtctcgtgaattagcttttatttatgtaattagttttgtaagtagtctatatttaatactctaaattagtgtctaaagacagagactaaagttaagtcgctgatgtaaacaccaccttcaacttgcacactcttctctcgctcgcagctagctagtttgtcctctcctgtacgcgtctcttgcagctcactgtctcaggcaagtcacaagcgagttcagttaactcgttagctagctagctaccgctgcgagctctctgcacaagacgatgtcgagtgtggttgatttgcatgcatatatatagcctactgcttcgtgggaaccccgtgttggctccgctattacgtgcgtgactcgtttgctgagtaaaactgaaaaaactgggcacgcccggactccgattctacggtctctacaagggaaaaattcacgcggccttagccgtgcatgagccgtgtgtaacatatacaccaacacacatcgatcacggccactagcaaattactccctccgtattttaatgtgtgacgccgttaactttttaacaacatttgaccatttgttttatttaaaatttttgtgaaattataaaaatatttgtgttatgcttaaagaatatttgatgataaatcaagtcacaataaaataaatgataattacataaattttttaaataagacgaatggtcaaacattggttaaaaagtcaatgacgtcatacattaaaatacggaggtagtaaatctgtagtgaaatttgcatgagtacaagagaagctagctagctttgtctacgtaaaaattccatgcttgtgctcagctctattccctccatctcataaaaaatccaatcatatatttaaatctggaagattcaaacccagaattgagtttttttatggatggaaggagtacgtgcgtgactcgatagtagacggtgtaccgtgtgcttctcactgcacttataagagaggggacaactttttcgattggaggaatatgctttcaaattagagaaaatctacacaacagtatcccgtcacaacgggataaggtctcatcaaccttatctccttcgatcccttcctctccacaatctctctctctagctcactcaggagtcaggagaagtccaagagcatggagatgaagccagctaggaggaaggggtcgtcgtcgtcgtctccggcggccgaggtggacgacgatggcacggcgtcggtgaggtcggggcggcatcgagggtgatctcgtcgcgcctcctcgacgccgtcctccgcccgctgcggcgccgcttcttctactggcgctccccgttgctgccggcgccgaggcctctcctctcctccctcgcactcctcgccaaggtctccatcgccctcacgatccactagcgccatcgtccttgcccgctgctcccgccgcgtccttgccggtgagtgcaaatggctcctcctccgccaccgcagaagaagaagaagccggtggtctcgatgcctctgtcaccgcaacgccggcgacaacctgctctagaacctctacctcctctctttcgccatcaacttcaagatgaagttgctgaagcgcatgttcctggagatggtcgtcgccgacttccggccggacctcaccatcttatgcgtccgtgccacggccttctctattaggtattaatcgcgatacctcagtatcaagcctggtacccgcctggtacccaggtacccacaagtatcaggcctggtacccaggtacccacaagtatcaggccatacataagatggttacgttgactttttaacatatatttaatttttttttgaaaaatgtaattagaagtattatttatattgttgtgacttattttaatgctagggtacttaagcatgacctatatttttacatatttaaataaaatttttaaatgataggaatggtcataggtacattggtacatatccccatgccatatattaaaaaaacaaaaggccagtattaaacagttacagtatacgcactttattcatcgtaattggccacgaaaatcacgagtacataatctactactaaaatatattaaagaactacttacgttatgaatgaacaccgaaaaataaaattaattatgggtactgacacaaatagaccctgacacggtcaatgctagaactgattaaggtaacgatctgtctatcaacaattcaacagtgggtattacttattaggatcgttggtataatggcacggtgggcgccattgcttttgctccaacggcagtagcttgtaacctctccaatgcgtcggtggcggcaacgcggtgttggcggagccaccggcggagggttgctcggcatacggcctcgccgtggccggcgaccatgaggccgacatggccatcaccacgaagaacatggccactgcaaccttcctcatcgttggcgtacgtggcgctgcttttttagaaaaaaaaaagagaactctgcagtgttttgagctgtgacacgatgatgaaatgctcgatattacgatcagttagttataagctgggagaagctcgtaagtcgtaacatggcataatgccaagaccaaaccctgaaagttcatggttttttacgtgcatgtgtgattgtctgactgatcaactaatttgacgggtttgtgaatgaaattgcaaaagcaggtacacggttttcttggttacatgcaacgactttgcaaagttatacggagtgaggtcggtctcggtcggtgcattcgttacgagcttgcaaaccaagactgcaataactctcttcttgagatgtagctttctgccactgatctctcttttcgccgtaaccagtatgactgtccggatagaccagcatgcatggaagacgaactgaaagtgtccggaatacgttcttgatgcaatgttccaagtgaacttgttgaaaggaatggcaatatttcaagactagcttttttttttctttagataatggattaaaaatccggttattcacacggatcgatgtacacagccaaagatttgcaaagctaactagtgtttaagatcgattgccttatgaacacgccacgtacagtgatgaaggttgatgtaacattcttcgtattcagggaaaaatgaactcaacaaaaggagaaagtaccgagagtgtatatttgtgttttataaattcaattttttggttaacataatgtaataatctaattgctgaatttttttaccgctaccaaaatttaaatttttgaaacttaattttaagagtaattttacggttcttaaggaggtatcatgaggtaccaaaaatttagtggtacctaggtaccaagaggtgccaaatatataatagaaaaagtggaaccttagagtatcttctcaagtaatataaaattgctctaattttaaagttgattatattttttttctcatcttggtatattttctagaattgggttttaaatcacaaataatgcatacataaaaattatatccataaatcatttctgattttttttgtttattttgtatggcttgtgagctgtaactcaaccaaccagagccgtgcgatcggccacatgtagcttccttgaaaagaaaaaaaatgaagaagttgtagcttctgccccacttatgaggtcagcaagttgatgaaacttttgtgcgtagctagctcagtcaaagttttctgttcaagtcaaagtcattccatttgatacacattaagagatagagacatcgcaaaatagagacaaaaagagaagagatagagacttcattagaggagccataatgctcgatcttgctcctagcgaggatcctttgatgttccatatgtggtattttattttttaaaaaagagtatgtggtatttattcttaccgtctaaacattatatctcgagggctgctatacaacggaatcccgttttcgaacgggatgataccgattaggtatcaggtcccgatacctctgaggtatcatgtcctgaaacataaccggtatcaagtgatacctatcaagtattagacgattcatactacgtatctggtgatactcataaggtatcatgtggtacctatcaggtatcagatgatttctaccacgcatcgggtgatacttgtgaggtattagatgatacctaccagatatcaggtgattcctactaggtatcaagagctgagcatcgaggcgtcgtcgtcggtggccccaccctctacaccccatgtcgaaggtcgtcgccggtggccatgttctctgtcgtccacgcctcacgtcggaggtcgtcgccggcggccgcgttctccgtcgttcacgccctatgtcggaggtcgtcaccggcagcctcgtccttcactgccacgccccacactagacttgttgctggcggtcgcggcctccgccgccacgccccacaccacgtccttcgctatccatgctctgcaccacgccggagcttgtcccggaggctgcatcctccgtcgtccatagccatgccacgccgggaactcgtcaccggtgaccgcgtcctccaccatccacaccccatgccacaccggagcttgtgcagcaatatgcatgctttgagagagatgtggtagaatggataaggtagaaggagatagaatcggtggattagttggttgctgccctatcatgtctatcacgattgggacgggatcccgtcagatactcagatagcatttctgttatatctctactggtctactgcgtgggatatatattcagactagcttccagtttcacccatatatatcaaatccattatatatctcacataacactggatggattcatcgaattaattggacaacatttacattaacacttgggcaaggtagtacgaagaacagaagttacaaacaaaaaactgccattttattaattcatatacttgcagtttatcacaatctaacaagaaacagagcaatccaaaaagactaaattgcattttttttcaaagatcatatacagtacattgtcttttcttgaaagatcttatatatatacactacattgtctcctatagagaaatatcacaaccaaactttagaatttggtgttagcatgcaagtgatggcaatatatatacatggtgggatatttaatttggcgtctaccctgttttttagtggtggttggccgaggcagtacatgatgggttatttgggtcattggtttggcacgagtgacctggacctgctagctgctgcaggtacagatgtttgaggaactgtatgacagatgatcgccggaggtggccactccaacccgtttgtcgccgcccaactgccgcgccgatcctgacacgaccaacaccagaagcaccgccatcattagtggcaaaacaaacctcttcaccaaggccattatatgagctcttcctctctctgtgtgtgtgtctaacacaagttctacgattgcacactggtgtttctctcgctcagagcttgcacaagtatctacttccttgcagctcactgcttagttaagccaaaggcgagttcagagctaactcgttagctaatagctacctgcgagctctctgcacaagacgaggtgtcgagtgtggtcgatctgcatgcatattatatagcctcccctgcttcgtgggaactccgtgttggctccgctattacgtgcgtgactcgtttggtgtgggttaaactgaaaaaacccggcacgggccggactccgattctacggtctttcacaagggaaaactcacgcggccttcaccgtgcatgggccgtgtaacagatacaccacaccaacacatcgatcacggctactgctagctagctagcaaagcttgtgtatgtagtatgtgaaaaattccatgctcatgctcagctcaagttacgtgcgtgactcgacagaagacggtgtgcattgaattagccgtgtgcttctcactacgtactactacgcggcgggtttcccattattccacggtcgtcgctccgaaaggaaagagaaaacgactggtttgtcgcgcgccgacgtgaccaattaaccaaaccggtgccggtgccctgtgccgtgggtcgtaaatcgtaatgcgcatgtcaacctgtggccgtacgtggtgcgtgcatggcgtgtgcgcgcggcgtcagcgacccgcgcgccagcagccgcgcgccggccactgcacgcaccggcgtacgtacgtaagctagctttgctctcttcccacttgctttcgctttgaggtaggcatgtgcacagcagcacagcggatgtttggcgcaaagctagctagcctctccttggttggtcgggaactcgccgacacgctttcccgtctgcgcgcgagagagagagaggtcgatccaccgagtccgaatcaaccccaccatctgatcgatctcccgtgcgaatcgtgcgtgcgccgcggagacgcggactcaagtaggctaacacccgagagatcgaacagaacggccgggtcatgcgtgcccctgcgcgtttcgttcaccttcaccacgagtcttgtcacgaaacagcacgcaacgacgccggccgcgggcggtcaacatgcattctacagtactcctacgttgtttgcgttgcaggttgagaaattaacggagaaagcaagctgcgcaggttcatgctcttcggccttaatttggatctctcctccttgatcagtaaacaatgtgctatttcttcatcaggtcgtcttttatcgacgatcgataggttcagatagagaccagtgtacttgggcaaagtggggagggggacagaaagaaggaaaagacagagatcctgggtgttggcacgagggtgcttttcggtttcatttgacttgcagctctgctccgtttctggtcaggcattgcgctctactccatccgtctaaaaaaaatcaaatcatagatttacgtgtcaatgtttgactgtccgttttatatgaaatttttttataattagtattttcattattgttagatgataaaacatgattaatactttatgcgtgacttatatttttaatttttttcataattttttcaaataagacggatggtcaaacgttggacacggaaaccagcgtttgtcttttttttttttttgggacggagggagtacgactttacggcagcatctcatggtcttaaattttgtaatttcctttttttagtacaaatcaaaatgctcatagcgtcggtcagatgtgctagctgccagcacgaggaagccgaatagtatttacctaggactgaatttatcttttttttaatcaggcaattttcattacccagcttgaaaaccaagccaaacacaaacaggaacagagtcaaatgaatttatcttttttcgccgggccagtagcgaagaagtgcccctgcggattttattatatatttgaccctcggtggaaactagcaaaactgaagagaatttctgttcgatcccatcaatagaagtgaaaaatatcaaaatgatactacctccatattttaatgtatgacgccgttgactttttgtctaacgattgaccattcgtcttattcaaaaatttatgtaattatcatttattttaatgtgacttgatttatcatcaaatgttctttaagcatgacataaatatttttatatttacataaaatttttttaataaaatgaatggtcaaacgttgttcgaaaagtcaacggcgtcatacattaaaatacagagggagtatatatgaagtacagaagtaggcaaggtgtatgcaaacaaaacggtattaatcactgtctttttctattttatataagcttttctatacacagctgcagggttatccactgaaatttctacaccacaaagatcgtttcaacaagaaaatttcaatccctatcgaaacaacaacacgatataatctacttagccggaaaaaatcaccggggaaaaataatatctctagtttacaaccgaataaatctacaaattgaactgttgtatatattagcaaaaagaaaaaaaaagaattgctgtatatatgtctgtgtcacaaattagctagctagcttccaagccatcttcaccatcgatcctatcagcatccgccgttagggctgtaggtcttgcaggagtgacctggaccagcaagcttgtgcagatacagctgccggagaaacctgacgacgacggagtcgtcgccggcggtgtcttctccggcccattcctgtcccgccaatggccgcgccgccgccgtgccagacacgaccaagaacaccatcaccatcacgatcagtgacagaacaagcttcctgatcaacacggccatgatcttttacttccctttcgccgttcttctccctgatctccttctgtcttttctactcactttcactaagaaaaaagctaagaaactttactgaactttactatgttcttctcaaaattctgatatgttcatcactgaattggagcaagactatagagtggcaggcggcggttgcttgctcggtacgatggccacttgaatcggcgttagtatttggaattaatttaagggatttttttttgcggggaattaatttaagggattgacgccgtcagtgggaaatttagactgaaaatgaagaactaggaaccaagtctaagctcctgaattttcaacacatcagatgcaatattgcaatgtctaatgttaggctgctggtacgtactggggaaatctgaaattcgcgctaccgcgttttcccctggcacgcgtaacagaaacctagcaaagattcctcagtcaaggaaacattttaatttggccaatttgccgtgatctcgctgcctgaacaggaagaaggatgtaatgcagaaataagtccattacgtgttctgaatgcgttgctgtaagggagggggtggcggtggtgcggtgccggagccagaggagggagtggcagcggaccggcgttggccgaagctagggaggaagggtcgctggggcggcagtggtcgtcggcatcgatgtcggggtatgtatagtgtgatacttggcaggtatcgcacgatacctttatcacctgatacattgcaagtatcacctagtaggtatcgcgtgatacctgataggtatcacctgatacctcgtaagtgtcatcttctatgtggcaagaatcgcatgatacctgatatgtatcacacctgatacttcgcaggtaccacctatcacctgaaacgtggtagaatcacttgatacctgataggtatcacccgataccggacctgatacctaactggtgtcatcccgttcgaaaacgggattccgttatatagtagccctcatatttaaaccggcacatttatagggataaaagtgctcctttttcaattttttttagaaaggaactttgggatgagctagcggagccgaacacatgagcatgtggtcttttagttctcggccttttctcctcctcctcctctcctctctcttgtgttttctcaattcgtcctctccccaaattaattgagcggcgcccctctctcccctccaacaacgatggcagcctcttcgatccgcgcctctccatccaacggaaacagtgacctactccccttggcccgttgttgacgcgaaaaacatgaaggcctggaagatctacttaggttcagtgcaggtcatagatcttgatgaggtgcaggcatgcaagttagtttaattctacaactaacaagatgtcaatgtagcagtaattagccgataggttgaacaattggctgctggagaattggatcgattggaagtctgatacaaatagacttaaatagttggataaacaatgaagtgtttgctacattcggttaaaaccaacttgtatataatccttataagccgatacaacacttaaacaatatatatccagataacgcattggttgaaacccccgatgatataattattgatgcctacttacttaaataaatctaatttacaaccacaacccccataggtcgaaaccaaccgatgcagcataaggttgataattgcctgatagatttaaacaagctaatatgacagtgatcaaaatggttatgtattgaatttaaccaagccaggaaaaccatcaaagagaaatttaacacattggataaggtcggctaaccctccgacgaacctatcaacttaacatgactttgattatcaatattaatctagaagatcgaacctaactgagagttcaagattgtgtttaatatctgatcccaatgagttgataaatctgtctaatgtgatggatatatataacaaatcgatctagagtaacattatgtttaaagaaacatcaacttgatcagaatatcggacctgaccgaggaagtcctaactaagtcaatataactataaacaataatggaactaaaaatagatatgatatacctgataggcaacacttgcatcagctcgattggaatatcatactcaactgaggaagtcctagccacaccagcataagcgaagatgactaaactcacttcttgccagaggtcaaactcaatcgatgcagcccatgagccaaaactagaactcatcaagataaaatctcatgggatggtggcgatgtgccgaaatttaatatattgatatgtggagatagattatagggacaccgggtgtacatatttatacccataggtcgataagagtcctaattggacacgactcaaactttataatgataaaagaaaaaatacaagtcttgatcggataataaacacactttcctaaaactaaaaaggaaaccaactgactctatctaattaatagataaattgtcatatcgcatcattcttgaactcgacctcttctggataaactttttttaattgattaatttccttaaccgaatccatcaagaatctaactgttggtgaataatagttagcatcggtctattctaggactctgaaaccgatactacctctaggccgatgacaactttgaagtataccaaacacccgtccaacaacgatggcggtgcaccaacaccacttacgagttacgacttggagatcgtcggatctatcaatgcctcggtctccaatgagcaacggcagtgatggtttttgttaaaatttttattcagtttttgtatgtgttcttggatcgaagcatcgactcgatttgaaccgatgtgagcagtttttttttattactagagcctcaaaggtgccggtttgttcgtatcacctgaggggtgccggctagaaaatccggcacctatgagggtttttcaaccgataccattgacgttttcttgtggcaatgtatcttgcacgattgcaccgaccaattccgttttacgtatcattcgtccatcatcgaatggacgataccacatacagtacttgcaggattgtgagaacaaaagtttacaaacaaagactggcactttattaattcatacatttgtgactaattgcaattgaacaagaagtaaactatattgcattcatctctacccttctaggaagtacacggcgagaaataccataaaccagactatagagtttgccaatttggtgcctaacatgttagtgggggtgggaagggcaacctggtggcggtggaatatttgggtcattgctcgtgcacgagggccttgatggtagctgctgcaggtacagctgtttgaggaactgtatgagaggatgatcgccggaggtggccgctccaacccatttgtcgccgcccagcggccgcgccgatcccgacacgaccaacagcataagcaccgccatcatcagcggcaaaacaaacctcttcatcatggccatactatgagctcgatcggacttgcgcgcgcgctggtgtttctctcgctcagagcttctctcctctcctgtacgtgcagtgtgtctgctctcttgcagctcactgtcccgggcaagtcacgactcacaactcacaagcgcgagttcagtgtctgatctgtgcgagctctgtgcatgcacaagatgatgtcttttttttttaaactaactgcacaagacgatgtcgagttggtcgatttgcatgcatatatatagcccccctgcttcgtgggaactccgtgttggctccgctattacgtgcgtgactcgtcggtgagctaaactgaaaaaaactcggcacgggctgaactccgattctacggtcttcagaagggaaaattcacgcggccttcgcgtgcatgggccgtgtacagatacacccacacacatcgatcacggccactagcaaaactgtagtgaaatctgcatgggcacaagagaagcttacctttatttgcctatgtaaaaattccatgctcatgctcagctcgagttacgtgcgtgactcgacagaagacgctgtgccgtgcgcttctccctactacatacgccgatacgcgggttccaattccacggtcatcgcttcggaaggaaaaaattgcagggtgcggagctaaagaaaacgaccggtttgtcgcgcgccgaggtgaccaacgcgcgcgccggtgccctgtgccgcgggtcgtaaatcgtaatgcgcatgtcaacctgttacgtaggtgacactgggacccggggcctggtgtgcgtgcatggcgtgtgcgcgcggcgtcagcgacccggccgcgcgccgccggcaactgcacgcaccggcgtacgtataagctcggcttacatagctcttgcttttgctttgagctagaggtaggcatgcagagagatgtgtttggcgcaaagctagcaaagcgagattgaccgagttgcctctcgttggtcggcaactccccgacacgcgctcccgtctgccggtctgcgcgcgcgagagaggtcgatccaccgtgttcgaatcaacatgtgatcgatcttcccgtgcgaatcgtgcgcgcgcgccgcggagttcgtagcctaacatccgagagatcgaacggccggtcacatgcgtgtctacgcgtttcattctcgccacgagtcgcgtcatgaaacaggcacgccgcaacgccgccggcgcgggcggtcaacatgcatgctacagtacgcttctgtttgtagattgagaaattaacggagaaatcagtaagggttcatgctctttgggccacttcttcttttcggtaaacaatgtgctattttcttcaggaatcaggtattctttattttatcagcgatcgatcgataggttcagatagagcagtgtacttgggcaaagtgggacagaaagaaggaaaagaagacagatcctggatgttggcacgagggagcttttcggtttcatttgacttgcagctctgctccgtgaaatatgcagtttctggtcaggcattgcggtctacgactttacggcagcatctcatggtcttaaactttgcattttctttttttctttagtacaaatcaaaacgttcatagcgtcggtcagatgtgctatatagttgccaacacgaggaagccgcatagtatttaccgaggactgaattaatcttttttcgccgggccagtagcgaagaattgcctctgcggattttattatctatgactgaattttaccctcggttgtaagttcaagccaaggaactagcaaaactcaagagaatttctgttcgatcccatcattagaagtgaaaaatatcgaaaggatcgaacagaaattcttcattagaagtaggcaaggtgtatgcaaacaaaacggtattaatcaatgtctttttctatttgatataagcttttctatacacagctgcagggttatccactgaaatttctacaccacaagatcgtttcaacaagaaaatttcaatccctatcgaaacaacaacacgttataatctacttagccggaaaaaaaatcaccggggaaaaataatatctctagtttacaagcgaaataaatctacaaattgaactgttgtatatattagcaaaaagaaaaaaagaattgctgtatatatgtctgtgttacaaattagctactagctagcttccaagccatcttcaccaaatcaccatcgatccnnnnnnnnnnnnnnnnnnnngctgtaggtcttgcaggagtgacctggaccagcaagcttgtgcagatacagctgccggagaaacctgacgacgacggagtcgtcgccggcggtgtcttctccggtccattcctgtcccaccaatggccgcgccgccgcggtgccagacacgaccaagaacaccatcaccatcacgatcagtgacagaacaagcttcctgatcaacacggccatgatcttttacttccctttcgccgctcttctccctgatctccttctgtcttttctactcgctttcactaagaaaaaagctaagaaactttactgaactttacaatgttcttctcaaaattctgatatgttcatcactgaattggagcaagcctatatatagatattagagtggcaggcggcggttgcttgctcggtacggtggccacttgaatcggcgttagtaattggaattaatttaagggattgacgccgtcagtgggaaattcagactgaaaatgaagaactaggtaccaagtctaagctcctgaattttcaactcatcagatgcaatgtctcatgttaggctgctggtacgtactggggaaatctgaaattcgcgctaccgcgttttcccctggcacgcgtaacagaaacctagcagagattcctcagtcaaggaaacattttaatttggccaatttgcagtgatccgctgcctgaacaggaagaagaatgtaatgtactaatgcagaaataagtgcattacgtgttctgaatgcgttgctgtaagcgagacctagcttgttgggtcttccctgacttaggacctcatggcaacttggcaagtgtttggtatgataatgcagtgtatgtatgtactctatttgacaactcggtgttgtatggtcaaaacttgatttcttgtgaactacgacagtgtacttgcctgagatgttgctcagtcagacctcctattgttcaaatatattattcaagtcaaagtcctgcaaattttccaagaaaatgcccccaatattgtgtgtttatctgcattctgtgggaagaatgatcagaattacattttcctagctcaatatggtccacattctgaaatattggttattttgttttcctatgctatgttgagatagattacagaaatcccgttctaatcccaaaggcataattttggaattaaggcttggcatataaattttgtaggattcaacttcctaacgaatctttcctactccctctatttcaaattatatcattataattttgtcctaagtcaattattattataaatatttcaccattttttaaattcatatagtttaacaacatgcaaaccgtatattataaaagtattccccatggtaaaacaagaaacataaatcttatgatgataaactttttctttttgaaattaattgtcaaagatactaatatttgacttatagaaaaactagaacgaggaaaataagcaagaggtataatattttgaacactttaatttgctttcaccatgtttggactgaagccaattctaccatttttttggcaactttagtgccatatggatgtttgttttgctaccttttcttcacatagtacaaattaatggcatcagatttgagcgtgccaaaacttgtctatattaaagggtttatcttatattttcctctttttttctatagaattaaacaaacatgtcatttcaatttttttacacttttttctgccctacgcattctaaaagaataaatttattattattgagaatgtatcgagaaataccacatcatgtatgcaagttctaatgtaaaatttggtatcttcatggtactaaatatttagagctaccaaaatttttagtgtaaatttggagctaccaaaatttttagtgtaaatttatatatatactagtatactttcttaagagacataaaatttctcttccaaaagggtctggttatgcaatttattcctacaacatttttccaaacaaattcaattttgcttgagcacattgtgcacgcaagtgttcctaatttcctactgttccactgcacgagacaggacatctctcacttttctaacagtctcgcgatcatggtgtccatttctagtttgaaaacacgacaggatatctgaacttagttccagcatgaaacttgacctgctagtcactactcgcgactgcaaactaaaagcaggttcattcattcttccattgctgacatggtaactcgtaaggcgtaagagacacatatagcaagtttcttgattacgagtaccgcacggtataggtaacttgacttgtgactcggtagttaaggtaagagtatttactgagtcaatactcaagattatgctcatctgatacagaactcactgtgaagtcagtatgaaaatcttgcgattgacgtctagcggatctgtccctgttatactcgaccgggatcattccaaatttcagcgacgacggacactttgggttataaattcagtgatcttttcactttaattaatttccaaggaccgaggttaatcatgatggactaaattaagaatgttgtttggttttgctggcttagctttaaaattcttggagtaactcacttcagtgtgatttgtgaagtactatatactattctctttgtccctaaaagatctttatttttttaactatgtaactggacaagtattcctacgccacatacaattttgttttaaagatttgcgttcgcgaaaagcaggactagaaaagggcatcactactgcaatagcaactagcatgcagcaacatgtcaacacctaatgcacatctctcttcttttatttccgtgtttgattgattggttcatctacgaaataaccaaattaagctgctacagcgtgagattgaagtagtatacactgaaaccttcggtaccgggccgtgaccaggcgaatttaacgggccgcaggttcgtctgtatcccgttcagagcccactactcgaatctgcggagatggcgctctcgtaacagggccgtgaagatctcggcccataggaggcctgctgttctgcacaaactggaggcgataacgtcgtcaggccatcccgcacgtacttgggaatcctgttccgagcccacgttacaaattggcggaatgggcgcgctccaagaaggccatggagtttccggcctatatgaagtccttcctttccccgtttgcggaataagttcactttgggtccctctatttgtcgcccattccgattttcatcccttaccgcaaaaccaggtatgacccgtcccccaacttatgaaaactaggcaaacgtggtcccttggcgattttgaaggcggttttggctgacgtgacgcatacgtggcttgtttgactaggtctccgtcctacgtggcattgacgtggcgcttacgtggcaactatatctcggaaaaataataaaaagtgtggcccacatgtcagctgaaaaaaaaatggtgggggccccacatgtcagcctcattcctctcttcttccctctcccttctctctcttcttccctttcccccctctctctccttcccgggcagaggacggcacgggtgggcgacggagcaggcgagctccggcggcggcggcgggcgtggtcggcgccgccccccgaccggagcgccgccggtccgcgtgaaggcgagcaacgcggcggcgccctaaaagatgccatcgacgtcgccacccgtgtcgctgccgccgaccacccagacgccctccgcgcgcaccgggacagcatcaccgagcgcctctacaccgcgctcatcctcccgccgccgctccacaagccgcctacgccgcgctctcccctccctcctctctcgtcgtcctccctcctctctcgccgctgacgccgccgcgcgccgctccctcttctcccgccggcggccatcgaggagaagggcggcggacggctagacgagcggcgcaagagaaagatggccgccgccgccccacgccgtcatggggctagcagccgacgctgcaatcctccttcccccgctccaagaaacgctcctcctcctcctcccacaggctacgctccctcgcgctggccgtccttgctaccgacgcctcggcgaggtggggaggaggcggaggggagcgcggtaaacgatgacagacggcctcatccattgcgccgcccttgtcgccaacgccaccgatggctcgcttgctcgcatgcggagagggagaggaggcggagaggccgacggcgagcacgcggagagagggaggaggcggcgcgggagcacgccggggctccgagtctgccatgtccacctccgcggccggcgggagggccgaagagtagtggcagttcgccagccgccaccgctccacttccacctgcgacccctctgctccgcccaccgaccgccgtccttccgcccaccacccgccgcccctctgcccgccgtccttgcgtccaccgcccactgcccgccgcccgccgccgctctgcctgccaccccctatgcgccggcaacgccactgctcgcccttctacttgccatgtgtcacgcccagaaattcccgaatagaattccaagcagaatgtgcattaaaacccccgtccaggaccggccggggtacacaaacgataaagttgacgtacagatccacgtcttacaaacattataaaagtcttacataaatgcagcggaaaattaaaagataaatggagctaagccttgacttggactgcagcgggaacgccacttcacaggcatcctcgacggcacggatgaagcctactcctcggagaagccaccatctgacacgtactcaaactctggggtttgggggaaaatagagcaagactaagtacaaccaccgtactcagcaagtcataccggaatagagggtatgatgcaggatataaccaaaggatagctagagtggttcatttgcataaagcgagcatttaaaggcagtagttaaaagcagtaaaacagttataataattcatcaatattaaccatccactgttcaacgctaccccacgttgcaacaggcctaaccatccacctgaactaatcgattccattagactaagctagggtgagactaatcacggtgaatctggttgaccgcccgtaaccgcgggcacggctattcgaatagttttactctgattagaggtgtacaactgtacccacaagacaaagccccacgacacgttttcgtgcgccgacatgccaccacgacataccggatagaggccgtgacaggacccttcgcataaccccctctaaccaagcacaccacacctcaggtttcacccccactactcgcaaggcagcgggcagtcccctctcgtgcctaagtgaatccggaagccgcataggccatcgcagggcccatccaaactccatcacacccacccttgcctagatgcgtcagctagaggaaagctaccctacaagcccagccgttgcgcacgctggcttgttgtaagtacgataagttcttccagggcataccgcaaaccggtccttatgtgccatgggcgcgaccatcaaaaccatgcacccacagcccaccatttaatatattttaattaaccaacaccggagcggtggcattaaccaacatcattactagaatctgatatctatgcattaatgtaattcccccattgtgtgctagttgaactaagcatggctaagcaatccctagtccaatatctcgtcatgttatatcctaagctaacaaaggagcatggtacaaaaatagcatggctgtaacagtaggtaaatatcacatagtaacattataaaacaatgcagtatttaagggaaaacgatagaacatttgcaatataggatcaacatgttcaagtgacaagcatgacttgccttgctttgctgctggatgaacctcggcgactatttcaaagtacaccggagcgtcgggagagccggaatctaagcgacatacaaagcaaacaatacaaacaggccataagactactgaaacagagaataaaaccatttttaatggattctttgcatttttcttgatttactgagacttgaatgggcttaaacggagctcggatgaattttctatgaattttagaagattcattgtgtttttactataaacagaaaaacccttaaatgatttattgcgcaataattaaaaccctgggagagagagggggcggcaccgacatgcgggccccacatggcagtgactcgggtggcggtccgcggtggaccgggtccacgaaccggggaaggggctgcgtaccacgtggcgctgacgtggggccgacaccacggccacgtggcagccacgtgggcgcccgaaccgacggccctgatctaccctcggcggcgggagcgcgcggccggcgcgcacaggtggctcaagccggcccggcggccatggcgtacggcaacgctaccgcgagcggcggtggcaaacggcggcgaccgacggtgagcggcggcgcacggcgggtgacggcggcgcgatgcgacgactaggcggcggcgctaccggaggaaaagagagggggaagaaggagggggtgtcctcaccgaggaggtttgactggcgtggagggagacgacggtgaacggcggcgagactcgacggagagaagtcgacgagcggcggacggggttcgggatgacctaggaaacaaagtgggagaagttagaggggaagagaaagatcaccgagggcgggaacgccggccaaaggcggcggccatggccgaactcaccggcgcacggtgcgggatgggttccggcggcggaatccgacgggagaggggtggatggggtggcccgctcgacggcgaacgcgacggcgtcaacggcgcggctcggcacggcagctagcggcggtcggagcaacggcggaggcggcggagaggtgggcgacggcgctagtgctaaagagagcacgggagcgggtgattgcaaaacgaaaaagagagaggggagaatgggaatgctttatataggctcacaagggtcgatcgtggccgggatggctgcgatttcgccggcggagtggggagaggtggagaggagagagaggcgggattcaaaaattaaatcccggccgtctcgagcgtggacgcgggcgagagagagagggagtgggcgcggggaacgcgggggaaggcggcgacgtgggcgacgtggcccgggaggtgcgggagcgagcggggcggcggttgcgggatgcggcggcggcgaccggaggttagggacgggcccgacaggtggggcccacctgttggtgaccctaggggagaggggcgtgggcggccggcttggctgggccgtggccttcggccggcccggcgggcagggggaggggaagagaatgggccggcggcccattcgaaaagaaaaaggagggaaaaagaaaagaaaaggaaagaaaggattttccagggattaaataatgcttgtgctcatttttaaatggttaaaattatttctagagctctgaaaattccactaaaaatcttgttagcatatttcgacatgtagaactcacgaaaatcctacatgccaattccgattattatttgcattaatttattagggtttcactcctgctcttacaccggtatttttttgagaccatttataaattcaatttagacttgggagaagaacttcagggtgtgacaccatgtaggggagagagaggggcatagagagaagagggagcctgacatgtgagaccacatgggtcccaccctttttatatttttttagctgacatgtgggtcccactgttttttattattttcccgggatccaaatgccaagtaagcgctacgtaaatgccacgtgggtcgacgacctagttaaagggagccacgtaggcgctacgtcatctaaaaccaggcacaatactgccgagagatctcttttacacggttttgtaagttgggggacccgttgtatccggttttgtgatcaagggacgaaaatcggactgggcgacaaatagagagacccagagtgaacttattccccattttgcgcatactcaattatgggccctaaatgcgtaggcccattcagcacgtaggcggcaatcctgttctgggcccacgacatcacggcctgtctagttacgctggtttctaacgtgggctcggaacgggattggcccaaaatggtctacgctgaattcggattagtccatccgcagcaagaatgccacgcttggtatttttcagatggaataagtgtatttacatccctaaactcatccttgattgaatagcatccctcaaccataaaaacgggtataatacctcttcaatttttgaaaactggttcaaatcgatcaactccataggtggtttgggaagcggtttaccgtaggatccacatgtaagcgcctactctagttaacacttttttttcaaatgaacgacatatgtacatcgtcgttcaatctggtgcactctcgccgctcgaccgactggtgaccacgacggtggcaaagatggcttcgtcgacctaggaggccgagtacaaggcttcctcggccacaactggtatttatgctcattcattatcattactttcgctattgcatatttatctacatcaatcgactctctctccatcaaaacaaattggatacatgttaattgacgtacggtagacatgggagcttctctgacagcgcgatgctcaacaacatcattgggctcctcctgcatagcacgaagccactggcacgcctatccgtccacgcgacatcctatgcctcgcaatgcgcattgacggctcgtgcttaccatcgtcgtgccttgctacctcagtgggaacctccgcatgtcctgcatcctcccggcgctcttcccctctctcgccgcacatggccgccacgcctgttcgcctccacacccgcgaggccgtgctagacgtgagttcgccgagtagtgagtactagtccacctatgcgatgaagttgccccgggttaggccaggcatccaccgctaccgtcgtgatttgctcgcctctgcaatttcgcccaccgaccgggagcccgggatgagacaaagagcaagagggaggtaggagaggaaggagtgggccctactatgttctttttattttttttactataatgccacacatgcaacacgtcagtaccaaagtaagtcagcctactaagtaggcaccacatagaatgaaaccattatctaaaccgttgaaggatgcgattcaatcaggtgtaaggtaagagggagattcacaaataggcttaaataaatgtgttctccttattttggcttttcctatttaaatgtttgatgtgttctattttatttgaactacactcttatctcgagtgttactttgtaataattggttgtagcttttcttgagcaaaggttgagatattatattccattattaaaaaagagagagagagaaaaatagacttattcctttttattcctttttagattcttaagccgaactatcatccgttgatgtttgcattggacttttctctatataagccgcgtaacatgaggcccagtaaccgaaagttggctgatgttgtttcgttgaacagctcagcccactccaacctaaacggccgctccctccactgctgttgaaagcgccacgacgcgccgcgccgcgccccgccccgctggcgactgcttctgtcgcgctcgcgcgcagagtcgcctccccggagcaagcgttgatcggctcaaacctccgccgaggcgagagggcagcaaagcgaaaccccgaacattttcaaacgcggcgccaaagcgaggaccgtttcggatcccgacccgatgcggtgcacgcgccgtggtcaccggtacaatcgtactgtagtacagccggtccaccgatcccgatgctctcagcctcaccagtcaccaccaccaacccttccacggctagaaattttgcagtctactactgccaccaccagctgtccagttcaccaccacgacccggtcgcctcctcccgcccgtttaaatacgcagcagctcaagctgcctcccccgcacgcttcatccacagatccctctctgtctctcaactcccaagcagcagagagagcagcagctaaagctaagccgagttctgtcgccgacgccgtcccgatcaagaggaggatacactcgtacaaggagcggaggaggcatcaccagcttacaatgcggagctcgttcggcggcaaagctcgcggcgctgcagcaccggcaccggcgacgcacccgcgctacgtgccgcagagaggagtcgtgctgaagagcgtgctgggctggttcttcggctgcttccgccccgccaagacccggcctcttccggccggccggtgaaagcccgtgcgtggctgaggcccggtgtaccgaccgaactgccaatgtcggttagcgcctcgctttcccgtcccttaggttcttgctgggcgagcttcttcacacgagacacggcaaccgatcacgatggaccgcgcgtgtgtttcattaggattgtttgtacttagctttgtgaattgtatgttgccttcttggcaacccgtgatttcatttgtgttcctcagggccttatcgcattctgaaatctggattcagcttcagccttttcaggtgttctttttcttaacgagacggtgcgaagttctattgatagagcaggacttttcaggtgttctgtttcagatgtttagttatcatttgatgctgcgtctctgaataatcgtagactaaacagcagaaagcgcagaaccagtcaggtgcaaagaattgtttgcgagttgtgatttctttataacagaaaaagactacgtaggacaaaaataaataatggggaaaagtcagaagtccaagtcagcttttagactttgactttttcttgctttgtttagttcttgctctgttgcaatggttggttggtggccggatctgcagccatgttgggctcttggctgcatccagtggcttcaaccagattgattacctttttgtttctggaaaggaatcattagtatttggtaataattccattagcccaattgtacagcgttgcatcagctgcatcatcaataaacttgattacttctgctcaacgcatctcaacattgaccagagtccacatttcctacacttgtcctactatacatcaacatcatcttacttactgtaaacagaaggaaaggatttgttccgaagcagaatggtgacatcgtattccatttcctttattcagaagtgattttgatggatatgtatgaactatgaactaggggacctgtattacatttttttgaagggaaaatagcgcataattgtgacttttcattgaatatagcgtgagagaacactgcatcacattaacttattctgtacttcgagctattacccatttactcatatgaaagttcatccaaactagtactaagacttaagcacgtactccatccgttccaaaataaagaaatttaatatgggatgtgatatataatattactacgataaatctgaataagtctattttggaatggagtactagcttgtggctaaacacatttctgaaattcaaatatccgttcagtacttcagtagtatagtacattctccaacaatttggtacgatccatgccttttatagtcagtacattcagaacgaagaaaacctgccactgggatgaacatgggcaagaactaatgttgcctgcacaagacagaattcgccagctcaaattttgtgagagaagtcagaagtcaaggtcaggttttcagactgaccttttacagttcctcttctctcattagttggctcgatcagagtcattcattaaatccgatcactggacgcgaccagtttctctccgggacactgaccctgacccgaagtcaatctttcaatgtttcttcacttggtcactgccctcatcttcagtgtacctactggacatagaatcaccgctaaattttgcacaccgaaaaaaaatgctttggtaactaaatttccaaagaacatagagtaaggataatctttttttttcctctctccttctttttccaggattccagtgctgttcttgcccagttgccctccctttctcatagttccagtgttatttttattctctccatcctgccgtctgcactatcgtttccatgtaaaatctgccccccagttcgccacttgcggtttgccgatgtgaaacgaacagaaagccatcacctggtagaacaaagtgaccagcgtcctttcatgccagctacaaacaagctcgccaataaactgtagcactcttgagtcttgcctgaccgtgtttgcggcgagagttgagttgaggcatcattgtattcggttttcaccgacctccacacacggccacacacactgctcctgcagatgcttccttcgtcccacagtgcacgaagaggaagaaaagatgatgaatttgatggcgagtgcagcagaaaggcgacgtcttgaacggtttagccgcaaatcggaggggcccgttgagcttttcccacggccatgggcgacggccatggcgccacatggccgatggctactcgctaacttccacctgcggaaaccgcccccaaaaaagttcagacgtagtcgtgcgctcatcatctcgcttacgctctcacgctgtcgccatctcgcgccacttccgctccagttcccgccatcttccccagcctttccttcgctgctcctctgtggagtgccaccatgagttcataaatacgaggttggtatggtatggccgtttgctcactatcaccacgaatccggtgtaaagctcacctcacctcacctctcgttatgctcggcggcggcggagtaggaggggggaagaagccgcctccgccgggagtccaccctcgctacgtcccgaagaggggctcggtgctgaaggggatcgtgcgccgcatgctcggcctcttcgtcttcctcctcccgcagcagggcgggggcggagcggcgaatggcagcggcggcggcggccgcgtgcgcccggcggcgcctccggtggatgatggcggcgagcaggggaagtaggtcacccacggtatatatcgatcgttagaccgggttatcatgtcccatccttttatctgggccgttcgttaatggtttgaatagtagctgttatgtttttcctcctattattgcagggattcatgtcacagattaatacggtcttacatattcgtactactactatgctttccctcgtattattgcagggattatgtaacacgtgcttgatatttctacagtttggaaaagttcagtttttctttttcattctgttgtgtttgtttctgcagaagtgcagaggatttttacaggaatactcaattcttcatcttcaggtgctgtgaacaaacaaaca

SEQ ID NO: 17576 - DNA, 7859 bp, Oryza sativa
attactgtagaacaatcatgctgtggtaactggttactgccatctgtatctgcaactgctagagagaaaactgcacatggtcaaagagactcgttcatatggtgaggtaaaatgaatcattacccatccgacgaatgtctacaatatccttccacggcactatctatcaaagattacatgctatccctgtttctttgtttctgctactgaaatattagtggtcaatcccatgattgcatatttgcagtcaatgccaatatgtcatggctgcactgataccagttggcgaacttggcgaagccatcatctatttctcaggtttccaggatttgggcacagaggttctcagcttaagtggatgctgcagtggagaaggcaagatcagaaacaactttccacacaggctgcattatattggcagtgaccaagaatactacagcgatgatgaaacgaatgaaattccagtttacatcaacatctacacgagccagagcttcttgatatcactatattactacccaattgtactcatcactatgagctattttaaccttactgaattgatatatacatctacttcaatatagaggttccacaatgtcagatgagtcatttgcaaaggttacctgtcaaagatgtctccacctagtaagaagcttctgtcaagcaattgcactgtaatcttctagaattgattacctttaactttcttgtacctctttgggaaaagttcatcgccctcaagaactacttctttatgcatttgttcccatattgctccaaaatggctatgaaatttatcttgaatccatgcttttatctcaggataaagaaaatctggattaaaattccacacatctcttaatgctgcccggctatctattaactttgaaccaatcttcatcctgtcaagaagatcaccaactcttctttggctaacaggccctaggagaacagatggtgacagtgccaggaacttctgaataaccttaagacatggcaagacatctcctttaagcaaagcacatgcaaatacctgcaaccgattggtgccatcctgtataggtaaactatgcaatggaagctgccaattatgccgagaaaagatggggctaacataacagtagacttggtccttttgaggttcgtaataaggttttggatcttccaatggtgcagagaatgtacaaagagaactagcatatttcaaaatccatcctggctttacactggttacaccatgcatatatgatctctttgtatgaagtagttccgagtaaactacaaattctggtgcaattcgtgcaacagaagatgatcggtgtagatatattgtatcattgaaagcacaagattgataatgaacagcccgaacctttttatcatcttttgatggtccaggaaaggcacgaatcctctttgcaaccctatcagcccacccagcacatattccttgtcctagaagctcctcttcatttaattgcattggttttttatcagactcatgcctccaggcctcttctacatcttcagaaaccccaaatttccaagaaaattcttcacaaaatttgctatggtgaaatattaatcgaagaagttgcttcctcaattttgacatctcttccattgttttgagatgaagtgagttgactctgcaaaattccactgggttttctgacaactcaaacaactgcaaggcacgagagatggataaagcatcactgctaggattggaaaattttgtgtgggcctctctaaccatcgccttgagcttcttctgtctcttcctttcctgcctatccttatcttctgaatcagggttatcttgttttgattcaccactaaattcattctgcgtgagaaaaggattcgtaaagctcaatgctgatgcagcagctgctgcatatcccaatatgaagttaggtctggaaaagcaccgctgactgttcaaaattttaactattgtcagaagaagtcgagaatgtcgggggctcatggggtattgtgccatagccttccccatcaatgtaggttcacccttgctatcaagcgcttccaatacttttaagcaacgctcagcttcaaccaaactttccttgtcaggaggtgtagggaaaggaaagttttcaacctgtaattatcatgaattgcatgaaacaacagagaaaagaaagataataagtcaaaagaacctataatctcataaggatgagtaacttgcaagcacattaccttattaatattcataaacttgagcataagcacaacaccatcgactggaatattcttgatctcaggctcagagaactcagggaataattcatctttaccatatgctgcagccgagtagagatggtaacagtgcccaggccccgttcttccagctctcccagaacgctgggatgcagatgccttgcttatccactggatttcataacttgccatcccagtagcatggttgtagttcttaactttttgtttcccagtatcaactacatactttatgccaggaattgttaaagaggtttctgcaacatttgttgcaacaacaactaatctttcaccgtcaggaatatcctgaaacactcgaagctgctgtgaagctggtaacatagcataaagtggtaacacacgaagtttaccatgcgaaacagacctaggttctgtgcatttactggtacaaggaacatgacttgactcttctaaaattgtagcattgcttggtacatcagtgctttccggttctcctgacactcttgatatagccttaaatgatgccttcaatccagatgaaccctcagcacctttcaaaaatgctaatactggtccatcctcttctgtggtttcataaacagaatcatcatcctcactgtcggtatccatctcaggttccatttcaatgtctgaagaatctacacctgggccagcattactctcatcctcatcatattgggaaaacatgtcatcttggtgctcagactcatctctatcaatatcatatgcttcactgatttccctctcgaccacttcttggctcgagccattctcatcaccctcaactttttcagtcttcttgtcagtttgctgctttgatgctctttgcagtttcttacataagtaatcgacttctcgttgtccagtaacaaagacaaggattccaccttgtggaagtttcttgtggatggacataacctttttataagcttgccccaaataatcgtcatgtgtactctttgagaagtgaactgttactgggaattgtcgtacaggtacctttatagctggtgggatcacatcaaacaatcttctgtttgaaatgaagtccttcaattgcaaggtagcactcattagcaccactttcaactgactaatcttatcttctggattaatgctcagaccacaacgtattttttcctgttgctctatgtacaatgactgtcatgtgcataaatgttaacaatggttatatatatatattttctttcattctaatgaaaacgatgaaaagtatttagtttcaaccttgcgaatctttataattctagatagcatcccgataagtatatctgtgttcaagctcctttcgtgcgcctcatccaagatgattacagaatagcgtttcagcagaaagtcactctgcggatgattagtaaaccatgtgattagcaggattctgatatacgtctaaaaataacttcaaactaaaaggaaaataaatacatagacatttcaggatgatcaatcacatgctgtaccattttataaagcaattatggaagccatgattgagtggttatagaaaaatatggatggcgattaatcaagtgtcaaacagaatagctggtaggaaaactaaaccttattagggcagttatgctgtccagggaacaagggagacttgcagtatcgacagttatgaccttgaatgttttcccttaggtgcattttctaatcatgcttaactgttaacctttttctttcacaagttaatcatggtaactaataagtagagtgaagaaaacatgtctcttcaataaatagacaatataggagtagccaagacaagtaatcagattgttacctggacctctcgaagcaaaatgccgtctgtcataaactttattgagcatttacttcctaccattttatcatgcctaacttgaaaaccgacctcctttcctagcttaagacctagctcataggacaccctcctagctgtggcaagtacggcaacacgtcgtggttgagtgataccaattattccttttctgtcagaccggttacttgtgccaaagccagcttcatacaagaactgcagacaacaagaagcatataatgagcaatgaatacaagcagatggtatctgaaggtgcacacacttacctgtggaacttgagtagttttaccacagcctgtttctccacatagaattaccacagaattttcataaatagcttccattatttcctgctccatcattattattggaagatccctccttgttttctcaacctcatgtggccttgacacaggtacaacaattggaggattgaaacactcttgtacagtacgttcttcttgtcctggctctttatcctaacaaaaacaggattacaataactctgaaatgaaccaaacagcttctgactgcaataccactaaagcaacaggtgaatccaacattttttacaaaaaaaaacatgtagaaattgatgaacaggtgaaaaaaaacacagtacagctgtagactgatcacctgtaatatctcttcaccagaacaactaggaacacatgattgaattgcctgatttgctgaaatattcggaacaccatcactaccttcagtttttggttcttgatcgctcagtccaacatctataaccagtttgcattccacaggtttcattgcaacattatctatgtgattgttacattttctttgaggatcctcgttttttgctgaatcgacaatcttgtccaggtaatcttcctctgcagcctcgctgttttcagaagctttctgatcgccgtctttctttaatagtgagagttcttcagggacgttcaaaccagccttggagaagtgcacagcacgcctacgtttttctttcaaggtctcagcctgcagtagaataaatgtctattgaagctttgttttgtacattgagaaaacagcgaatccaagaattatggctatatctactatacttgaccgatagtcccagaagcatggagcagagaatacgcatcatctgaaatcttgtgcttcctgtcatgcaggacaaccatcagaatacactatactatcagtccagacagagtaagtaaagactaacataccgcaaaatctcaatactttgagcttgcagtaacttcttttgcttttcctcctggagataagaaaaaaatgattggcattaacataaacactatgaccaatgatcaacaaaaggaatgtcaagaagggaggcgcacctccaaattctgcagctttttcagcttactcttgctcatcttcgggtcttccttgattttcttaccatcctggcaattcaggtagcataagtcacacatcacacccccaaacagtaggtggaaataaaaatggcagcaccttgtctttcccttgtcctttgttcttcctcttgcacggcagaatcagcgtgttgctgtcctccatgctcgaactacaagcagagcaaagcagaaaaatctcacaaccgatgcagacgagggacatccgagccagtgagcccgggaaggaactcaccctgtaagctggtgctcaccgacgtcggcagcgtccgcgagggggcaagccggcggtgctggcccgcgtggtgaaattggacacctccctccctcaagggacaactcgctggagcaagctgatgctccggcagagagaagccggtgcgccgccgacgccgcagccgccgccgagcctgcagccctcggaggtgcaagcgatgggagaggcggcggcggcggcgatggacctaatcgaagagtagaggggatccagtttgggccgggcttgtttgtgacgcctaatgggccgaaggagaaaggcccataaaagcccaacgacatttcgtcatttcccctgcttgttcatccggctaccgggtcgcggccgtcgacgagacacgagaaaggcgacgaccactgcctcctccactcctccagatcgccgccgccgccgccatggggggcggctccacggcgcccctcctcgcggccttcgcctgcgtcttcctcgccgtcttccctcccgtcgcctccggtgagttggtcctctactgaccatcgccgagtctatatcgctttgtttgctctggactctggggtgtaacaaattctaccgaatcgagatggtctcatgcttcgttgggtatcttctgttatgtgatgcgtttctagggtgaaattgtgtagggggtaggtctcagcgtagccttgaggtgaattaggtagtggactgctaaacctagttagttctgaagcttgggcgaacacctccgttgttgtgctgataggcctctagttgtgctcatggagctttgacatgcgactataattttttttctagtatctcattctaggaagttttgtgattgctaaagtattgtgatgtcttaggtgtaggtttgtttaggttcatttgaattataaaatcgtgatactgcttactgtcttaatatatttatatatgggacacaggtttgcaaagcaacgtaagatatcccaacttatgactgctgtaacattgatgtaccataacttaaggatcctcttacctttctttttaggagatgctgcaacgttggagtcagttccggatcttgtgaaggcaatgtacataaacgttgaaagcttcccttgtgtgaggctgttgaatcactctggtcaagtcggttgttctagtgagtattcggtttactcttattctgtatgcttaaattaagatggctgtcattttctatcatcattgtcaaaggctagccaactctgccttgttaagagtacatggttattggggtctccattatgtaatcagatcctgggcatgacaaggttattgcaccgattgtaagatttggaaacagaaatgatcagttggttcagccgtcggcggttcttcttcccttaaatcagatgacagatttctttctgaggtataattgcttagatagtctaaatctcacaaatgatgttacatatgatcgtctttcaaagttatgtttccttgaggtgctaagagatgagaatatttgctacattgtttgctcttgtgcagggtatccaatgatccagaactttatcgtaagatagctggcgtactagttgaggcaaatggcgttgataacatgctaggtttgtggatttgttttttttatgtattttattgccttttaattccaaaaataatgtactgttctgactttgtagagttttcaccggatagaaaatttccacaacaggcttttgcaccatactcaaatctcagccatcattggaatcccacggtaagttatgcggttgattaaaatggtaccaccctgttgagagacaaacgtgatcagctgatcacatgcattgaatatcactctgttaccctgacatttacttttgtagggatcaggtattatgtggaacaaatatgactttcctgtgtttcttctctcagaggagagcacacagactctgcaaaacgtattctgcctgctcttatatatttattatagttctcatttcttctttacaaactccagctacacaatgcaatgactctaaaaagagattatcaataacagcttgcggacaagaatgagaagagtgccatggatatctagcaa

SEQ ID NO: 17577 - DNA, 8140 bp, Oryza sativa
agcatcagaaaccaataataatggtcactgcatcccaagactctgcatcattctttcgggaccgtagtcttggtgctgattctcccatctctgtaagttcctactaatttgtgggtatgataactgcatcttacattatagttctatgaaataactatggagttatgcacagggattgattgccttgctcactgctgttgatgctctctctcaccttcatgatataagtaatcttaagaaacaggtaagattattactactagaaattattctgtaagttgtgtgcatgttattgcattgggttcttttgcatctgtcatctgctagagcagtgttgcaggtctactctagctactttgtgtttcttttgtgaattatgatactcattttgaacttgcagcccttgacatctcaatcattgtcctttatctaagcatggcgtggtagatttaatatggctattcatatctggtttagtatggatttgtggtgattgattcctaaattgttgtgttcttattctcacatcataccacatgatatgcagcttgtttttgctgttttcaatggtgaagcctggggttatcttggtagccggaaattcttacaggaattagatcaaggggctgactctgttaatggcattagcagcttattgattgaccaggtgagtgcttgataggataacgcttgcaattgcagcactaaatcatttgcaaatgctttcaaacatatagttttccttggatgtcccttgcttcagggtattgtccttctgcagttttttaggttgtggacttaatgaatttaaacctgtgaaatttaccatatagtcctgagtcttcaggcgatacatatatctgtctctacacagttccataacctaattatatgattatttaggcaagtatctgtctacattgttccataacttaattatatgattatttaagcaagtgctttggacacgattcaggtcttggagattggttccgttggcaaggccataagtcagggatatccactattttatgcgcatgctgcaggggtaagccttttttgtggttatttcccctgcctgttcttggtgaatgtaattgcttattcaaaatgttttttttttcagttcctgttagtgtcatagtggttgataccccactctgtacaggctattttagttattggagatggataaacagaaagaatttaggcacagtagatgggggcctgtggacatccatatgtatagtttaggtttcagtgttgcatcagaatattcctttttgtcgaatatctcagtgaactattttttatcatgactttatatgaagatattttattctggagagatttatcaaaatatttgttctcaaattcttgagtaaagcacactgggtgtccaaaaaatagctgtacattggaatttaaaacaccataggcattgttccatattgttcatatttatcttctgctttgacagaattcgtcaatttcgatgaaaatggtagatgcactccaaagtgccagtgaatcacttggttctgataatgttaaagtaaaaccagcagcttcatcaaatcctggtgttccaccatcttcattaatgtcgttcctaggaaaggtaaaacctcaaatatccataaacataaccatttgcttgatagtattgcactcaatatgcaacacattaatttagtgatgttccatctttttttttcttttttcattagaaacattgatttttccaaacaaatatttctctttgaaatctgagtgccatgacctgttcactgttaacccatcaataatgcagaattcatcaactcctggacttgtcttggaggattttgattcccaattttctaatagattttaccacagcactttggatggccctggtaagttcaccatgcagagatctgatgatttcttttgtagaaacccaggattaaacctgtaatgtcttttttttacagcaaacgtcaattcttcgtcaatagcagctgctgctgctttgattgccagatcattatacattcttgctagcgcagacttgcccattgatctcatcacactgaacactattaaagtgaatgtttcactggtagaagaattgattggatgtctactgaaatgtgatcctggtctttcttgcggaattgtgaagagcttcatttctccaagcaactcatgtccaagtcactatgttggtgtttttcaggatttgcctgctggcacacagtttccttcatatgcagatgatatctctcggtttatatggaactttttggcagacagaacttctagtttggcaggtaacagtagctcttgtactggacagtgccatgatgaaggcgaaatatgtgtaggggcagaagtggaaggtggaggcagatgtgttgtatctacaactaggtatcttcttttcttgagacgcatactcccttctagaactaggtaacatttttctatgggcccttttagaacgttgaaatcaaatccctactgtgcgttacttatttgggtgacaggcattagcggtttaattatgaactaggcaattataagtgtatgcttagggatgcaagtgggcaatccctctactcatataaaaacccgcttaatagttcattttcttgcttctagtacaaaatttggaagaaaaaattaactagaattgtgataagggcacacttgcatccctatgtatgctggagcatccataatccagttagtttttgtatatagaaagaaataaaatttgctgacactaaagtaattttgactcgcactcttttttgtgttgattaactaacatgtactggtgttgattaactaacatgtactgaattttgttatcatgcttgtatttttgtggtgattggttgctgttgtactctctatttctacttggagatttactgattgctttattaactttcttgacaacttagatatgtccctgcctattcaacgcggctgaagtttgaggacaatgtatggcatgttcttccagtaaactcttcagacccttttagtgctgcagatcctgtgtggaccgaaagcttctggaatacaattggcctcagggtgtatgcagtgcaagctacatcttatgattggcttgttcttctgatcgggatcattattacggtggcatcatactttgcagtgatcgttggcagatcatacatttcaaagatcataaagcgggactaaaacatcatccattccctccattatttctgagaccttggtccatcagatcctaccaccaaagccatctctgtaaggtgctctgggaattttgagagttggaacagaactaatagtctaacacatgaattaagtcggcaaatcttagatgcaatgtggcacatggcgatagggagaggatttgtaaaactacaaaagccatgtggagccttccagctagaaggagatgtgatcctactacatgatacatgacaccgacctacaggctgttgtgatttgtactgatgtttctggatctgcttggctgattggctctgcattggtaggtataggtagatggatgatgcccctctgggaggatgtatgctgtggattagtgctggttatgcacgtatcatctttgagttttggctgtgtacgtctctccagtcctattttcctactgtgttgggaccagttgagtattgtgctggtttacggaaccttatcgatatcatgtcaagaactgtccctatacaattttaaataactgaaaagctcagattcgccatgtgcaacatgctgtttgtacactctatccaactcgatcctctatccatttggtccgtcacctagagttttttttccccagttttcgacgattagtttttcatcaaatacgacagaattccagtgtataggtattactgtattagtggctgaaaggttaaaattctccagttaataaggctgtgtttagttcacacttccatggatgaaccaacgtcaactgacgaacaaaaagaagggacggatgggggattccgccatgtgcgccaggtcgggacaacggaaccaccagtgaccgggcgtgacgtgttcgcagctaaaactaattctaaaatcatgatgctgatctcggcgtgacgtgttggcagctaaaactattccaaaatcaaggattaggactaccgaatggcactagctgccgtggagaatctctatgcattgtttctccagtgttaacatcgtttctccttggcacgctaagctttccaattcctgctaaaattttattacctttttggacgaaaggtggtgattaccccaagtacaaggaactaaaaacaaattgtcatactccaatatagcaataatagtctgaaacaacttgtagtgtctgtttccatgttgcttcttgttaatgtagggtgacagctaggataattgagagttgacacgtaaggcagcttcgttacgatgcttgcttttagatgccttataaaacaatttacgatttgctaaaaatccgatctaattatgataacatttgccattttttccttaaatcaagcgatgtttatcttcccataaatggttgaatgagcaaggtgtgggaaaaaaaaaggaagctttgatcagtttttttttatcgagctatctttaaaattatttttcataatttattatattttctccatcatttgagactatttcccttaacgagctgggaagccgaaccgaggcaggatgaaaacaacttccattcaaaattaaatagtaaattttattttgaaagaaaaaatagattaatgagagcaagtttgtaccaagctaactaaacgagcttttatttttttttctccaaatccagaatgctgcaatccaattgataatcacatttaccaccggataacctcatgttttagataactcaaatggcgaagcatgcgtgcgattaaaaaagttcgttaaaaacgctataaaaggcggcggtgcctttctccttcatccgtgatactcccaaagattcttatcgattgaagaaaaaaaaaagccggagaaaaggatagagagggaaagcaaccagccatggagtcgctgactctccgggcatcgccgtcgacggccgcgccgttgcgccgcgtccccgggcggcggcacgcggcggtgtccgtccgcgcctccgccggcgccggcgagccggacctctccgtgcgcgtgaacgggctgaagatgcccaacccgttcgtgatcgggtcggggcccccgggcaccaactacaccgtcatgaagcgcgcgttcgacgaggggtggggcggcgtcatcgccaaaaccgtaatcctctcaaccctcgcaaccgcaattctcctggatggatgacttttcctgctctaattttccgttgaaacagcgcacaaggataggatctatgtgatgtagttagcatttcagtgtttgagataagttcgcgtattaacgagagtgccttttggctgtatgatttgattccgatctgggttgggtttggagtgggagtgggagtgggagtggaggtgggggccaattcaagctcacttgaaaacaggtagctgctaacatgatgtcaggaaaggtggcggtgtgagtttgctattttggttgcggcaaaatcgaatcatggagtcgtggctacgttagatttggtggtggatcttatgataggttttgatgggtggccatacgagaattgatagattgatgggtgccggatgagaattcagttagttatatatatggctggttagagttaggatctttgcatattctaggagaatttggtctgtatgtactacttgtgttcactatgactgactactgacaaacgtcttgcttgaagatgagatggcctaatttttgtgagatgagcattgcatcctcagtattaaacatgagaaattagtttcaatttcttttgttctgcattaaccctttgcaatcatcatttccacctttttcacatacacattgttgtttccattgtgcatagtgcctttgcagtcatcactttcacctatcacttccaacggttgaatcatcaactttgtggctaattgttggtatgattatgaatggtaggtatccttggatgctgagaaagttatcaacgtaacccctcgctatgcccggctcagggcggaccccaatggatctactaagagtcctatcatcggatggcagaacattgaacttatcagtgatcggcctctagaaactatgctgaatgaattcaagcaactgaagaaagagtatcctgacaggatactcattggctcaataatggaggagtacaacaaagctgcatggcatgagcttattgaacgcgttgaagagagcggagtggtaaccttcccttatgtgcattttggtgcattcttggtcgaacttatcatgttggaatgttaatgatctgtttctatcaggatgctcttgagattaatttctcatgcccacatggcatgccagagcgaaaaatgggtgctgccgtgggacaagactgtgacttgttagaggaggtctgcggttggataaatgagaaggctacagtgcctgtttgggcaaagatgactcctaacattacagatattacaaaggttagtcaaacatatacatcttcgcagcacttaatgagatcctaaattagtttttatcccacccggttttcacattgttttggacatcgtgttcgcgaattattatttagcgttcgtgtaacatgttttggacatctcttgaagccctagcatcaccatctatggaattaccactacattagaataccaagatttaggtgctttttaagatctaccaagaattagttttttttatgggtcaatgttttcattccttacttgcattgtgcagcctgcaagaatttctcttaagtcaggatgtgaaggagtttctgctattaacacaatcatgagtgtgatgggaattaacctcaaaactttgcgaccagaaccttgtgtggaggggttagattcaattccctgagttctttttttccctatggaacatattcctttactgttaccattttttttcttataaaaaccacttgattccacagttattccacgcctggaggctattctgcgagagccgtgcaccctatagcacttgcgaaagtcatgcagatagcaaggatgatgaaagaagaatttgctgatggacagtcactctctgctattggaggcgtggagactggcaatgatgctgctgagtttattctacttggcgcagatacagtacaggtaagctctaacatggtactaatgttagtattatgcatgtttatattctacttgatgctgctgttattacacatgtttccaatctggcaacctatgtggctccctttactatggattttgaagatcataatgtgtgctgctcgtgtacagttgatgttgaattatattctagattttttcaggcatcatttttgcaattaattgattagctccatgcttatcttgaacagcataataataagacttgactaatggccattcattgtaggtatgtacgggcgtaatgatgcatggttatggccttgtaaagaagctttgtgcagagctgcaggattttatgagacaacacaacttttcctcaatagaagatttccgggggtatgttatcaccacttcccttcttctgactcttgttgatttgttgttggaaatcatctggagaaatcaccttagtttagagtactgtactatgatatgttgcctacgaatgaacttaggaagaaatggaaaatcaccaacatgagtgttcatgaaacttttcttgtaaaagaacatgctcaggggggttacacatcttttcttgcagttttattttccacatttctaagtagaagcaaggacgggacactctattgttaaaaacagacttgaggtaatgattgaaggcagacttataggttgttagcggtagtcattatgggcttgaaccttcattatgacatgtttaggcaagccttccaatggctctgccttgcacgcctgaccctactatgtgtgaatggtgtagattaaagtcttgtgtaccttatgattaattctgggtcactttggccttgttttactcattctcaaggaagcctttcagagct

SEQ ID NO: 17578 - DNA, 22122 bp, Oryza sativa
tttcaaattgtcgaaaagcataatgttgttttattgaactaaaatatggtttatttttttcctttgttaacaaattatcactaatccaagctcttcacatcatctcagggcctctctcccgtatttcaccacacacaccgatttggtacatcggcaaagggaggcgatcaaccagaggaaggctattaggaagggcctggaatcagacaaggactggaccggtgatggattcgtcaaggagacagaaagcatggtgtccaactgattcgactctgaactcacacccccttccaccatacttccaacttgtgattaaacagggaccatgttcagcccaaaacagcagaaacttttgcatcatctcgttcaaataaaaagcataccaaattacttccatcatgttgtcctgtgcttgtccattgcaatcctaatctgtgcatttttgagtcataaacttcgggtcctgaatctggaccaggtcagtagttcagaagtcgttttctacacttgatgatttgtagcaaacatgccgtgctcataaactgttccatgtgaacataaagtcagggtcactgagctttgggatatctggacttgaccttgtaaagcctcaagacttcaagtctctgctggaccgtgtgcctgagtaaagtgtgagcaaacgatggcatcagcatctggtcagattgagccgtacatgtctctaatccttcacacctgccgttttgtacctgagattcatgctacaattatctgtggcgcacactgtcagaaatttcagcatcgatcaatcagaaatccgctgatgaagaaggactttttcttattacttcttctatcctaaaatagaaatttcagcatcgatcaatcagaaatccgctgatggaggactttttcttattacttcttctgtcctaaaatataaagtttctaaataaatatatcaaaatataagcatttttaactactactatgaatctaaacataaacatgtttatataagtatgtctaggtaaataaaccagaagttatattttaaaacaaagtgagtattacaagaaaaacattttagtatgtctgacgggggaagttggaagtttagaccatggtattcatgggagaacatgaactcaatttttctccgtttacataaaactgcattgaagtggtaagtagtagcataattcggatacgttaaattgtaatcgcatggtttcaatttcacaaattttaatggtatttttcaaaacggacaaatttatagtgacatggatccaattaatatatatatatatatatatatatatatatatatatatatatatatatatatatatatatatatatatatatatatatatatataggacactcatatggggcaccatggtgcccgggcaacatggtatctaatgcacaaaattactcaaatttttcaaaattttcaaattgtgagtatatacctagttataataatttgattcatacctatacttatcaacaaaacaactcaaatttaactttatttcacaatccatgattacatacctaactaattatatgtatggatgctatatacctagaatcaaaatctaacaaaaacaagttcaaattcagttcaaacttgctttaaactagttagtaaagtagttaatggtaatgcctaagtaattgaaaaagtttcatactcatttgaattgggtatatactcaatttcaacaatggtgcccgggcaccatggagcaccaaacaaatttactatatatatatatatatatatatatatatatatatatatatatatatatatatatatatatatatatatatatatatatatatatatatatataaggcttgtcttctgcctagtactgttaaggtatgaattagtcgatctaggttcgagtttcgcccctttctcaataaattttgatacgagagccccctaacgtacacaccgaagataaaaggatcttgtaccttataaattcctattaaaatcgcacacctataatcttgactacgacaagatggtctatcattttcgcacatgacacatgtatactaatgagttcacattaagtcgagataattttggggtgccaaaaacaatggatgaaactattcaaattacctccgagggatccaaaataaggtaacttttttcccctggaagagcccagagtaaaaaaatacaagaaaaactacgagtcaaccactgaaacgttggttgccaccaccattccactaagtccgttcccatgcccatttctccctgcatattatacatacaatcaactacccgctgatctgatgaagtcgccattcaaacatcaagaagcagccttgttatctcaactaaaaaaatacagattcattcttgcttgatttcatgattgatagctacatatcttagtttcacaccaggaaaccaaaaaaaaaaaaagatccttgacatccttattatatatagcctctgcctaaaaccatcatgctccttcagtttcctggacatgaagctgcaatggcagcatgtctggtcgtagtcaactagccagccaccaaagagagagctatcatccatggccgccgtggcggcggccgagaaggcggtgaggtgcctcggccgcggcttcgacatggccggcgacctgaggctcaagtactgcaagggcggcggcgccggctgcctggtcgagaggcgcggcgagacgacgccgctcaccgtgccgggagtcggggtgatcgccgacgtgccggccgacgtgaggtgcgacaagggcgaccgcgtccggttcaagtccgacgtgctcgagttcaacaaggttagcaccttaccttgtattgagatcatctactttcaaagttatcatacctttgtcactgtcatgggttcatggtttatcaagcccacatatcattgaaaaagtcacgtgatttcaagggtagaggattttcatccagtgccgctatgccaccattaattcaccctacatgatgataatatatatgggtatggctatgaatatatatatcatacgttggttttattctatatttgcttagttttttaaagatagttcaaagttttagatatttttgagtttttaaatatgagatagaaaatgggcaaagctgaagataacttgctcgaagctgctctatttaggtttttgaacaaaaggttgcattaattgaggaagatattcgggttattcataatttcagttgtcagtattcaccaaactgcagaagcaccgtattaacagaaaattactgttccaagaaaaaagaaaattactgtggttggttattggatgctaacagagttttcgcttattaatatttttagatattgacacgacatttgcggttctacgtgtttctcacgaactgtacttatcatcaaccatatcggcactgccaacatttttgcgacagaaaataaacacttgtcctaattttggtgtcccatcagtgtcaaatattcagtatctcaataaaagccgataaaatcaactttacaggaaaaaaatcctctttttttttctgaaagaagactttacagaaaatctgaaaaaagtgattatgtttgcttggttcgttggtattaagttgcatgcacctaaaagcctaagctgatagggaaaggcggacaattcactttatacactccaacactccccctcaagtctcaagcgtggaatattggagtgggctgtaattattttatttaattgcgcgccagccaggattcgaactcaagacctcttactctaataccatattaagctgcatgcaccagccagttacatctaaaaacctaagctaatagggaaaggcagataattcactttatacactccaacagttaggagtagtggtcctgctctaagttcaagtcaaatttgcctcattatctagttttttttaaaaacaagagagtcaaatttgcctgtaaaatagctacacttgtacttgtaaaaaacaggacagtggcacaccttgaactgcgacagggcctttgtttgactttcaccaaaagagatccgtcaaatgtacatcactgaacagaatcttgccaaaatttcagccttcctgaatgtgatcagttcaacaataatcaaaatcaaatagcattgtttctttttaaaaaagtttaaccaaatttgacgcattcacgcatgcacgcagatgtcggagctgttcaaccagaggagttcggtggaagggaagatcccgtcggggcagttcaacgcgtcattcgacctggacagcgggtcgtgggcccacgacgcgccgcacaccaggtgcctcgctatggacgggtacttcatctccctctttgacctccgtctcgaccaccgccacctcgccctcgatgcaggtgtcctcgccgacgtgccacccgcctgggacccctctgccatcgcaaggttagtggctagcttgtgagtactcctttctttaaaaaaaagtctaattctagctattagtttgaacacgcatgatttatagttagaattaagctttttatgtgacgaatggtgtagctagcttgttgcacgtacacaaataattgcattgcaactttacaagcgcatgcatgcatctgaaagctacctgcaaattgctcccttttctgaattctgagtggtcttgactgtcccttttctgaattctgagtggccttgactgacccaagagtggtcgattggccctgctgcgatttgagtgctgcaaatgcgcgctcgtgttaggatcatgatcttgataggcaacaacaacgcaacactcgctagaaatgtcaggtcccaaccagagacaagtagacaaaaacaatgggcagctgaaaaatcaaagcgtcgcatgcatgcaccagctttattcagttcaacccaaaagtttaagctgatcagtaaggatggacaattcacaagggtggctgttcgaagccacacatctgaccatttcatatcgaaaggtacaaatatagagtatgccatttggcatggctgcgacatgtggatggagattgaaaattctggattcctgtgggagttgggacaacaacgacggggactttctgtcgcacgatccagaaggatttaaattaacctgcaaattgcagccatgaagatgtacggaaaatcacttgcagatttgagagttgcagttgctggacttggactaattccaggtctggggatctcaagtcggtggctgaagaaagcagctcgattagatgtccaagtttgctgcaaaaaaaactgggtactgactgaatctatgacaagacaatgcgttacccagagaaacgaataattcagtcatgtccaaatcagggtgcttcatttcagatgattaaatatgatccaataatgcattgacatatacttctacacacatacatattctatctttttttcgtattatatatttgtccgtcttcgttgaaccgattacagatggtatgaactctgcacatgccgtcatttgactagcgtacacatgatttgtattactaggcagagccgtagctttcagagagagttctgaactgacgatgctgccgacaccatgtcacaatgtagtcgatcatgtagcaatcaatcgttagaacgctaatgacttgttcacgcaacacatccaagattaacctgatcctgattgattgatgcataattgcgtatgcagattcatcgagaagtatgggacgcatgtgatcgtggggctgagcatgggcggccaggacgtcgtctacgtgaagcaggataagtcgtcttctctgtcgccgtcggagatcaaggagcatcttgacaggctcggcgatcagctcttcaccgggacatgcgccatgccacctctgcactgcaggtccaaggacaagttcaaggttaaacatgtcaagtattgttaatgtacagtaattactctagaaattcagttgtcattctcatcagaagttgaaggtttttgtgctgaaattcagtgtctgtgtggtgaattgtgatagataccggaggccttcaacgtgttcgatgcacaagtagctcagcagaggcttcacgggatcaccactcttgtatcaagcaaggaggtaattaactgaatcactgtactctattttctagaacaaaaatggctaagggttctggcattctcaactcttgaatctttcgatcaattatgagataaactttgcattgcttgtgacataaatttctactatatctgtttctttttcttcgttggtttggacaacgagtcaatggcacagtcttcaatacatatatctcatctttacttttttttttccaacaccgtggctgtgtttagtgtatagttccctttaaatttctaaaaattccgtcacatcaaatgtttagacacatgcatggagtattaaatatgaacgaaaaaaatcaattacacagtttgcatgtaaattacgagacgaatcttttaagcctaattacgccatgatttgataatgtggtgctacagtaaacatttgctaatgaagaattaattaggcttaataaatttgttttgcagtttacatgcgaatctgtaatttattttggtattagtctacgtttaatacttcaaatgtgtgtccgtatactttaaaaaaaattggacagggaactaaacacggcctgtatttatgaaacttataaaaaaattgaccatatgaaatgtttttcatgaaaatatcttttaatatcaattttcacatattaaatcctactccctctagtttttttaccgataataccgttgacttttaaacatacgtttgaccaatagtcttattgaaaaataagtaattatatttattttactgtgacttaaatctattattaaagttactctaagtatgactttcattttggcatatttgtacaatattttcaagacaaatgattaaatatatattcaaaagtcagtatcgttatttattaaaacccaacgggaataatacttttttatttttaatgatcgaagatgtcacgacttgactgcgtgtatttgaggataatattttctttttgataacggaggtttgaccatatcttatattatggaatagagggaggactagctaattatatgagtttgctcatcgtgtgcagggtgtgacggtgatatactccaagaggggagggaacacgacggtgagcagccactcggagtggctcctgaccgtgccggcgatgcccgacgtgatcaacgtcaagctcgtccccatcacctccctcatcaggggcgtgcctggcactggcttcctctctcacgccatcaacctctacctcagatgtaacaacagaacagagcttaatgatttttcttttttagacgagtttatttactgttgattagtttaaaataacaaattaagcatgtgattggattgttacagataagcctcctgtcgctgacctgaggtacttcctggatttccagcatcactgcgtgtgggccccggtgctcggcgagctgcctctgggcccttgctcacaccggcaaggctccagcccggcgctgcatttcagcctgctgggctccaagctctatgtcagctcaactgaggtcagactctgaaacagcctctcactctgtcactgaaccagataaattccattctgtggttcactttccatggcgtgtgtgatccttcaaaataaaaaaattgcaggtggttgttccgaagctgccggttactggcatgaggctgcatctagagggcaagaaaaacaaccggtaagatttcacaggtttatttaaatataattaaatacacatgaaaacttgaaaataggtttttcttttttatagatgcacacccacgcactgagacacacatactactacacatgcacacctcacaaaatgtggctccccacgcgctcaatgaaattagtttgggggagcttatgtcagctctgcagctgcaagaaactcctcgaaacaaactagatgatcttcattcagataccaagaagttttagttgtagaatccagaaaataaactaaaagctagaagctagatttcccagattctttagattctcactagctaacttttcaccagctgcttctcagaattttaagtttccaaaatagaacataaaaccagcgacaactcagttatcagtccatcatgacataggcacctctgcattatctacaaacattttattattgtccaaggcatcaaacatcttccaggaaaaaacattttattatttgtcacccttatctcaatgacacgtgggtccatatgtgtcataacatttgggcccactaataaatggttaattgccacatttaatagtggcgaatagttaaatttctaaaaaaaaacaaagactacgatgaaaaagaaaaccttaaaactaacttttaagtaagttttaaactttgattggggccgatcagaaagagcatagaatgaaattgcatgttaacaagtttaggtatgcacagtacatatgttttgcgtcggatggtgtgtgactaaagtggatttcattgtgtcgtgcgtcaggctgggcatccacctgcagcacctgtcgacgacgccgacgttcgtcgccgccgccagggccgacaagccgccggtgtggcgtggcacggaggcggtcaccgacgaccggtactacgagccggtgcagtggcggatgctggcgcgcgtctgcaccgcgccggtgaagtacgacccgcggtggtgcgccggcgaccgccgccgccgccccgccgcctgcgtcgtcgccggcgcgcagctccacgtcgtggcgcacgacgccgccaacaacgtgctccacctcaggctgctctactcccagctccccggctacgccgtcgtgcagtccaagtgggcgcgcggcgcggcgcggccgccgtcggggaggtcgtcgagtttcctgtccatacccttctcggggtcgccgtcgacatccagtggcgccgccgagaagggaggccggccggagcagggcgcctcgccggtgggcgtcgccaacgtcaactccggcgtgttcgccggcgggccgccggtgcccgtcggcgcgcagaagctgctcaagttcgtggacacgtcgcaggtgaccatgggaccgcaggatagccccggttactggctcgtcaccggcgcaaggctggacgtcgacaaggggaagatcatgctgcatgtcaagttctcactgctagcccaagtttcttgacgacgagtcgacgagggtgtcaagatgttcatgaccatcccgtgatccagagtttgtacagttttcagctgccaaatgcagatatgctaacaactgaaaaaacagaatattccaaaaaaatttgatttttgattttttttttttggtttggaccctgaagatgttgcaacgatctgtaaatgaaaaaagatagtaggaaccagaggtatcattctaacactgcaagaaaaaaaggattcgttgatctcagatcacacattcatatatgggactcgcatacgattcacagcaacttgtcttacattactactactgcagttcgtcttacgcaaaaggcgggaacaataccaaatttcattacaataaaccgaaggcaccaagtgaacgactgaatccaaaggtttgtggaaacacatatatacatcacaagctagatagcagttcgcccgcattcagtaagcattcaagcaccagaatagacatgttcaatgcaaaagttcagatatatgtataagagcaaacatgctggccacactcaaattctcaagttgtggagagagaacaactcgggctgcatcttcctgacgaacttcctcctttgcttaatgcgcaaaagcttctcatagatacaccatggaaagctgataaagtgtggtcgctcatatccttcattgtagcaaccccagaattcagggtggtaagtgacatggtaccaggcggatgccttggcttcggaggcatcatggccatgcccattatcatctaagctcatctcactgaaccttgaccttgcttccttacgcaaagatctcaccgccaatctgatagcatcagcatcgcttttctttgtgaaattctttgccatcttaagaatgcatccacttattatctcggcctcactttttattccatagtgatccataagattacccaatttgaagtcgtactcgtccttcaatgccatagcttcagtgatgtaatcttcatagccatcaacaatcatatcggtgtcataagaccgccttgccacctcccttgtgaagtgctttatgtgaggggtgtgcttctttatttccctgtagagcttcccgattactccttttgattcataggtgactttgtcaagcttctccatgaaatcaggatactccttcacatgtagttcaggaggaatcagggctggcactccagttttgggaaagtcaacagcaatggagaagagcttggccagctcaatgcatggtgaactctctgccttgaggtcttccttatccgcaaatactacatgtgcattggcaatcattcctaaactctcattgactatgtaatttgtgaagtactcttctacttcctgcatggtgcaataatgaagttacagggcagtgtataagatttgctaaaactcagttctaacaaagataaatttatgacatttattttcttaattatgtgatttccgtgctgttttattgcaagaaaaacaagtgactgctatgtagacaaattcagaaacatgaagctggtaataattttattccaacaggcaacataatagtattatcaatttgaacagcaactgtccaaccaaatgcagactacccctagacttgaatcagactgcatggtttccaaatacatttttttttcaaaaaaaaaaagaacacagaatttgctactcttataagtgagcacagtacgtgtttacacaagataaccagggaaacaaaaaaaacaactagcttaagacaaattctctcagttgacagtagtatcctcattatgaggcaccaattacaaacgtatctctagaagttaaatattctaacaagaaagaggcagcatatcttccttctaatattcaagatttattacagaaaatagggaaatagatgtgtaatattattaaatgaaggattttgaataaaaaccatatatgctgtgcactaggattagtttgtttcctcctgcaaataaatatacccaaatcttgcagtgccagaaaataggagtaaatgataatcttaaaaaatacaagagctggactcgtgagtccaaagaacagcataacactagccagccaacaattgaataaaattgctagcatgagtggcaagaaagagtggacaattctggttgaaaactgagcttacctcaattgtaacatcatggtctaatgtttctgttggtgctggagtatagtccataggtgtcaccatacgaggcggaatgagagatgggtcccaagaaacaaaatatatgtccccgtcaagatcactccctgaacactcattaggatgcggcctgcacaaacaatcatgttcaaaataattactgcctcatgttttaaatatggcaccattgactttttatttcatttgactatttgtcttctctataaatatttgtacaacagacaaatatgacaaatctagtggtactctttgcactttacttaacaaagtcaatggtggcatatatttaaaaccaaatgtagataacaaaatcgaacagacaagaacatgcatgcatgggaatttaacaagaaaaaaaaaggatcaaatatcgcatatccatgaaatcgcaggtggctaagcttcacaaacaacgaagttcttcaacctaaaatatatgaaattggagaataagcttttctccaatgaatatgtggtttcattaaaatgtgaaacccagacagaatttgtttccagaaaagtggggttttgcagtaaaaagcatactactagaaaacataggagtatgtaatacttgccttggtccttgctgtggaaagacgacacagttaaacatgtggtgcaaaacaggaacatcaacagcatggagaatccgtatatcacctgggtggaggcaagggtttttggcaatcacaacttttcctgtcacggtgaacctgtcattgtcatttacacccgaagtagctcgaatgaacacttgcccatacttcagcgtacgtgtttcatccaagcatcccatcattgctcgtccttttgggattaatatccttgacttggttttcagctctagtaatttggatgccctaaaagtttgtagcagcatagaaagatatggttcatcatcaggctggtagccacacaacaacagctctttaactgcatttgttatttctcccatgggcataagttcaattgcttcgatagcagcttgaggatcagtaaccattttgttcaactgattcactgcttcttcttgcttctgttcaaagacactatctctaactccaagtgtcgaaagaagagtaattagctgccgattaaggaagcctggctggtacttgctgtatgcaaggacatctactgtgatattgtctgactgaaactttagcatgctttttcttaaggaaagcttccagcgtgatgtagggtcaacagcaacaacacctttataaccaccataccttatttgaaaagcagaaggagcaaagcgtttcaggttgcacttcatggccacttcattagcaaaagcagatgatatctttccaatcccatcagagaacacatgctgtgtaccattttttatatctgagatttcttccacctcatacttctgaacctttaatgtttcggttgaggaactaaaagactgaccaagtcttgcagcatattttgctacatttctgatgttacggaaatcccccatccatgtcctaatgtcgctagcagctaatccctggcgagaagcaaacatccatgcagagttatctcggagctggcttgaagaaaaagcaagaaactcaaagttcttgccaccaatagtgatgccatctgaaaggactgacagaactctcttatacagagcagttctgtttgcatcatgtcctgaagcagaacggggggataaatcagttgcacggagcttctcgcagtcctcgtcaacaaatgaaatgcgaaggaaattctctatgtcagaagaaaaattccgcaccacacgattggagacattaatctcaggtccataaaaatacactgtagacataaaccaatccatcatccagagatatgttaggtgatggttggacgtagcgtgatctccggaattttgagtattgttcagatagccaacttgttggattcaagcaggtctttttcaaatatgacatcatttcaagtgcacgctttatatggtcaataggtacaaaagctgggctgaccagacgaaagaagctgtcatcaactgtcggtccgctaagtgtcccattctgaaccaaatggttgatcttgaagagtatctcataggggacataaccacgagatttcacaatcggaacaaagcgagtatcacttgaatatggataccccccactccggcactcgaagtcatgattgtactcatgatagtaaaagaagtagtcacgaatgtttgggagatcacatcgacgtggtacctcaagacataaaatatatgattgcccaatgctagaagatgaagtaaaatccgttgtcctggtccattgatcatctgtatgatccctaaaatagttgaataatggatcttcgtacataacaccagaacggcgtggtgtctgttcataaatcttaggtgcagcttgaacctgaaacatgaaacgatttataaatttaaggttatctaaactttaaatcaagagataacaactagaattggtgactggggtggatcaacattttgaagtggaaatataaaggaaaatactggataaaagaattcagtgcttcagcatgatcatatttttttttacataagaacacgatcatattttcactccagataagtaatactcaagtagcatatctttatacaacttcattgccgcatattttgaaatgaaagggacaggcgagttagagagcactcataaattcattagcatgaagaattaaagaaacacaaagattagaaatgcaatttcattatccagtaatttatgattgaacagtataatgtcgttcaaccatgctaaagtgcaggttgtgagccacagcaaagcaggtaggggaacaagaatactaacagaagaaattcaaatgattcttttaaaccatcacagtaagctcctaaacacattaacattgtccatttgtatatcaaataaggaccatatgatacatacattctaacagaactcccatgtaactttcaccttccgaaaacagcaaaatcaccattgaccaaaattccaaaagtcatcaccatgaactgttgtgactaaaccgttcttcgtcaagccttaatagcagaacaaaacacagtacaggcgaaccactttaatatttactaaagaaactatctcaacagcaagattagtcaatgtgaacatgtggtcatacaataattgtacaatttactgaaaagaaatcagcaagtgctgtagagctcaagatacctggatcaaaagaaacttcgtttgtgacttgggtgggcgttgaagctggatctcccatatgctctcatgggaaagttcaagtttatattcgattgagctgttgggtagctgcaggtaaaagtaaatctttttcagattgaaaccaaactcaacagaaactccttttcgactccacagagcagataaaattgtttccttaagcaggcaaccaaaatgcagtgttacatcctctagcttgaacattgaaactcttggtcttggaacaatgtcacgatctgaaggatggactttcagataataatgcccacggcggagtatctttctttgagccgcattttttacaagtgaagcatgttcctcggtctgaaactgaactatagcatatgctcttgaggtagcagtgacgttctttggatgcctgagctttactgcatacacattcccacagccaacaattcgctccaacaaatccttgacgtaatcagcactgtcatctagagcaaaccctgatacctgtaaagtcttgacacccatggcgcatatcacaactgcaggaactcatcaatataaacaattattgttaagaattacgcacagctctttagatttacggcagaatggtaagtatcgtctacagaaagaacttaaaagctaaattttatcctgtttctatcataatcttaaagtagtgaagtaaacaaggtactgtaatgtatcaaagaatacaagcaaaacaatgatcatgcgaaccatctccatgcttcctttgtaaactattccctgatactaactattgcacatgccagattcctttttgtaaatcaggtatccccaagggcggagctgcagtaatatcgtcagggtcaggtgaccccgatggtattcaatcgatcaagtgaatcgtgcaggattttgcagctaatgaccccagcagcaaaagcttcatgaccccgatcaggtcgctaaactactggagctcatgaaagctgaaatagtacagcttcttctttggaagcacaatttgttagctaggttatgctactgtcaacccactactaatgcggcaattagacctatttcatccattaaccaactctttgttttagctatgtgttgtgtatatcaatgcattaggcctgtagttttgctaatcaactactagatgttagctgtgttttttaagctactaactccgtctcaaaatatgttacatttaatgttcaaaattatcttaaaatacaactaattttctatgtaccgttccatctcaaccaatcacaattttcccaattcaattttttcacctactttcttttttcaaccaatcataactatttcacaccctaacattaatcttttaaaaaagagagtaggtagttgtattttgagatagaggaagtaataaacaactttcagaacaaacttttatgtctgaaaaaacgcatggttgttatgcctggttttatagtcttaacttttaaatttttggaccttaaaaaacctcctgcattcttataaaataattataaaatatagagtttaaacatttatttttaacaaaatgaaacgatcccaacttcctcattgctctagctccaaaataattttgatctaaagatatctagcttcgagaacaattagagttttaaacacgacattagtacaagtaaaagccatgacccagtggctcaaaatcctggctccgccctgggtatccctatcatctatccatttctatactctggactatacatatttaccacatgttcttgattccccaaaattagagcattcctttttcccccctttcaaaagccaaattatcatgcaatgcagtgacagaagcatggagaaaaaaactaaaaggatcgatcaaattagacgagcacaatttccacaaaaacacatcatgaacgtacattaccagacttcctcatctttctccaccacctgcccttctccacgcttgccaattccactcccccaaccaccaaaaagtgtaaaagagcatgacaacaaccgaatcgatctcaaattcacatcctccactaaaacctccctcaaaacccttcatattccccccaccaacgaacaccaccgaaaaacccaagagtataaaaaaaaacccgacacatcaacactaaatcgcccgcacataatacgcatccgatcgaacacacaggttcgccgagcaccgacgccaaactggggaaagcacagcactctagagcgctagtacagctagtaaagcgaacgatcgcacgcaccgagcagtggcggagatggggctcggcggcgactgcgtgggcggcgagtcgacggcggctggatcgcggcttcccttcccttcccttcgctccgccgctgctgcgccgacgggtgctcggtggttttcgtcgccgactcccgcaatataagcgagcgcgacggtagtgagcagagggattcgaggacgaggagtcgcccggtcaatgtgcacgtagcatttaaaggaattaaagcgaagacggataaatgaaggggcgcaggaggccagggccggaggtgtcacgtaccgttgatgttgcttcgagattcgtgcaaagcatggaaaagaatggaacgtgaaggcctatatatatgtgtggcttttattatcatagcagcagtattgcacaagatctattgccacggataaggttacatttttatttcttctttaaaagatatactactatataagtggcttttactaggatccggttgccaaaaaaaaaatgaaatgcccctcttggtaaatgtttatcccaaaacaagcccaacacattactactagtacacatgatgatacggtagaattgatattgtgttgaccaattttagaaggggttgttttgtcattctgatcattttcaaaattccttttgaaagaaatcattttaaatttcaagtgtacatgtgtgcgtatataagttgtcccaatattgtgagtatagcatgtaagggtgtgcgtgctcgattatatgctcatccgagaatgaagatactttaactatagttagaaggaaatattgtcacataatttccaacggagcctcacatagtcacattggtctcatttgaaaatggcaaaaacaaaaacaacgtgaactgtaccggttcaactcgaatataggaaatgcacatggtttgaacttatgtttcataatatagaaagacttctagcatcatcggttacccatatttcttagtaaaccaaaacagtttattagaaaataaaatttaatttgtaggtaaaacttttatatatttatccttaacgacttaaaaaccaatataaaaaagaaactacgttgaaaatattttaaaacgaactttaaaattaaatttaaaaaatcaaattttagctttggttaattagggcacatcggccattctttgctcttggctttcttgcaaagctgaatcaatgcaatttgatcccattattttttataaaaaaaaagctacagttagaatggagccttaccgatgaagctaaatcgtgtacgactctgaagatgcatactccctccgtcaaaaaaaaaaaaaagacaaacattgatttccgtgcctaacgtttgaccgtccgtcttatttgaaaaaattatgaaaaaaattaaaaagacaagtcacgcataaaatattaatcatgttttatcatctaataacaataaaaatatgaattataaaaaaaattcataaaagacgaacagttaaaattggacacggaaattcatggtttgccttttttgggacggagggagtagtctggtctgtaaatatactgatgcaataggcaatggcaatgccccatactagtactccctccgtcccaaaatatagctatttctagcacagtgtcttgtcccaaaataaagttatttcttcacctacctcctcctctcaaccaatcacaaccattcttcttcacctactttctcttttcaaccaatcacacacttcctccaatcattctcacctactttcttaatacccatgccaacctcagaaatggcttcattttggaacggaggaagtagcaagataccacaggctgggaagaaaccgcaccatcttttgcatctcctttttttttcttgcggccccagttctacggttactgaacctccttttctagttttttcccccaaataatcagttgatgatcagcccaagaaccgaatgaacagtcgttgcccatgtttactcagtacattcagcgaatagaagatcgacagcgaaaaaaggaagtggataaaggcaaaagagaatatatatttttagaggaaaactaaatgagaactatagaccatatagataacaccctaggcccatgtaagcaaagtgacgcaaccgagtacatagccccatggccatagcatcgctttgcagattccttcctccactcgcggccacggagagaggaaaggaaagtctcactggctgggtcattgacttgactcacactcacagagtcacagggccacagcctcacggcgaagcaaccgcggcctattggcttcgtatactgttgcgaagtagtacgtccacaactccatcgggagaaaaggatgtgaaaccgtcgtggaaagcggatcctgcgagagaaagttgtcgggagaaaaggatgtgaaagttggccggcgagacagagaaatgcaacgcagaaagatgcttcctgctcccctgcctcagtcccacgcaggataaaaatatatacactaccacgaatgctgcatgtttacgaattttacataaacgagtagcgtcatattgcagtttgcaaagtagcaaaaggtaccagtgaggccaaaaagaaaagcatagacattttccaagacgtaaagaacacaacagcacaacacattcacccggagggaagtgaaaccgaatggggaagtagtagttccagacttgcagttccgtggcatatcatacagcccattccaaacaagatccaaaacatggaccgtcggcccagacaaccatactaccttgctcgttggcaagtggctagtagcctagtactagttagttcattgcaagcaagaaaccaccattctgattcagctcgaggttgaaacaaaatatcaagagttaattgtgctacatcagttaaacacgagaaatcaattacagcccaaccaagctcaaatagagcgggagagggtgaccctaatatattgcgataataatatattcacaaccctgacaagcaaaagcaaacacactatctaaattacagaagggaagaagacaaggtcctccagcctatacaaccacaacgtgcactgccttgacaaaatgggagcgtgccgcaaggttaaaccttaccgaaggattaccttcactacattacagcaaagccgatgtcagatgcaagcctactctttccccaatctaggtgtcgcagggtcatctgtgctatctcaatcacaaaattaatacgaacagaggaacaaatacaaagggaaatccgaaactatcgaagaaattcatgctgactggtgttagaggtatgttattgaaggttccgagtcaacccaccccgtggtgcatttctgctgcaaaagaagacagttcaagatgatttagccaggcattaattaataaatagaggctcaatatcaaacagatagtacaaattcaagaactactgatgccaaaaagagaataaaatcttaattatatggatgtgtcatgtatcatctaacgcctaaagtaactactattgctactcaggaatctgtaaactcaatccaagggaaaagtcaaaaggttgctgtaatgctgtgtctaagaaaagcaactcgcagccaatctaatgagatcaggcagagggaaatgaagtagggaaagtcagcagtcttataagtagttaagcacaactgtgataaaatatctcaagggcaaatgaagtatgaatctcgagaattgaaatggatgacaacatggcatatttaagtttacaaaactttccggtatcagaggtatatgcatttgaatatccctatagctgaaatatcagcttctcaaaatatagaaggcattcatagatataccttccatgaggcgcctgagaagtggttccaggtcctttgaaatttccaggccgcttagccttgttttcttgatccttgtcaagacgcatagcagcaacttccttctccatagcagctacctctcgcctcatctttttagcctccacttccatagccttggttaatgtatctaccttttttgccaacatctgtaaacaagaggcagttagcaaaggcatgacccacagcattggtcccattaaatccataataaacaggaattctagtgccatacctcaattgcatcatccttgtcttttagactttgatctttctcatggcatgcctttctcaatgaaatgacctccttttgcagcatgtcatagagtacaccagatactgtgtcagttgaactactatttgtggcctcgctacctttttcttctgtgttagccgccttccaatcatcagttgtctcacaatctctaacagcatccgtagatctattgagcaaatgaggtccattcccaaggacttttccacggtctaatgacctggtaccaccatcaaatgaccttgaagttccctttgcatgcttgagaccaagctgctgctagtagaaagagaggatcttgaattaaatgatggagatctccttgccaacatgccattcggggagatttttgacatattatctgcccacctagagacaaccgacgggatggtccattaccgatactctttccttctgtaggacgactagaaccactaggtggccccctcaatccatcttctagaacttttaggcgcagctggtacttttcctgagtagaaggattttgaaacagtgcacaattaagtaacttgcttccataaaagtttagcttaagatgaatgccagctttctcacctttagttgagcttcagatcgagctgttcgttctgcaatagcaagtttatcacgaagttgctgcatctcaccctgaagaaacatttgtcatgccataaaaattgaatatatgatgtgaagtgtgactttgcatggacaaccgtagatgagcttcaaaaaacaaacagaagtatatcatctttacctgcagaaacctgcgctcttcaagccactgtttgacaggcattactttgtcattagcatctttccactcatttgcaactacaacagcaactctgtttgctgtaacttttgcccgcgcaagctcacggtcaagaatttttctttcctcctaagtgtgccatggttagagattagcatgggtcaacttttttgcgtacagaacagtgaagattatccgaaagcaacagtaaaggatgttacattcatttcttgaactttccgctggtaatctctgacagcattagcagctgcaccaccagcaagaacagcctcttccagctctcttacagtttgact

SEQ ID NO: 17579 - DNA, 1996 bp, Oryza sativa
tcactcagaagaatgctcaagggaactgggggcaggctccttgatagcgcatagacaattggaacctagaaaatgtcaacctgaatagaattttgcgcatatgaatataattatctaattatggaggatgtttctttctggagaatcaatcaatgcctacatgtatttttgtaatggttgatctgcctttatcatgactaaggaccaattagatcttagggatgggcatggattactccttgagtacacaccaagtgacccgcgttcatccttactagaattgtaaatatgcttgaggaactttcatggccattccagattggtgttgtctaagcattgtgtttgcactagtttgatagtttgaggacagtattttgatatcttgatgctgttaaattacatatatataatgcgttgacgatgctttgatcttcagatagcatgtgagaaaatattttcatttggctgttcccttccccagaatctattggaagaggacaaggacctagcaaagcagcaacaggagttacttgatggaatttacaagaagtactgcatactagacagtgacgtgatgaatgatatcaagaacctctctcgccgttatggagtcaacctggccggtgactgatcagttttgaccatccaagagacggactgcttcaaaaggtccagatcagtcccccaggcgagcaacatgcattggtgtgacccaataactgcatcttctatgtaaatattttttttgagaactttctatgcaaagattctgtagtgttactgttgttcccgcatcctgacccacccagcaacagtatgctcgttttgtgatgtgtataggagtaacttcttgcgctgcgcggagatgattcgctgctgtcggatgctgtctattatgcatgtctgaaattaacttgctgttgattaatcggaggttacattcataatgcctagtcttgccttgtttacattcattgtttcggttcagttgagagttcagagatgtcctgatggggttgcggatattgttgtatcaatctctcactgagcaagtttaataataggatataaccaaccacaaacttttgtgaaagaaagggagaaacaatgttagttctcgtactagcagtaaatgcactacttatataataagtaagagtaagacaaagagatagggaaaaaaaatagagacaaccttatagtaactaatactccctctatctacttttgatagtcgtattttatcttggcacacagaccaaggataagtaattctacttatcatccatttaaacatgttaccagtcattcctcgtaaacaagcgattcattaatatttacatttctcgatgcccatatagccaatcttgtgtggaagaatgaagagtcatgcattacaaccaagaaagtcattaagatgatagattgttgaattgaaatatgcctatcaaaaatatttttttcagatttagaaatatgactatcaaaagtagatggagggagtatgctatacatgttagctttagttttttgccgggatggccaacctaattttattaaggctgaaaggaattgttacaaattttacaaaattgacattaaactgtaggggggtggggggttgggggtagagaaaataaaacgaaaaacaaatagggccggctgacagggaggttctcagccaacttctctaaaaataccggcctccctccacaccaaatctcatctctaatttctctataaatctctgagcgtgacttttgctcaaagatcctagcattcctctctttccacacaaactaacataccatcatattagttttagtttgagcttgctaagggcaaccgcaatggttatctataggctatctacaagagatccatatcagcatatttttctacatggaagagattaaatgaagagagagagagagagtaaagctatctactaacctggagatagtctatagagaaaaacgaggcaatggattagaga

SEQ ID NO: 17580 - DNA, 1763 bp, Oryza sativa
aaataacactgtttactacccatgttcccagctcgaaatagctgagcattcctccagagtccatacaaatatggaatatggccttggcgagcacggacaagtaaaatatacaagcagctggtgtaataaacaagctgtgacacactgtggaagcagcctgtggacaaccaaggtacagccgtcgactgcactgttcctaggaaacgagaaggcaacggctttgcgctggagagagtcaccgtagtccgcggccaggggaacagggggcacgcatcctgtcgggcacccagccaaccagcgctccttctgcacgctcgcgtggtcgtattccagcgccaccaccgcgtggcagcttggcagcttccttccgcctaaaataagcgccacggggactcccgggcttggacctccagaaggtcgcgagatctcgaatccgcacggtcgcggccctcgctccgcgcgaaagcgcgtcgaagcagaccgcgactgcaagcgatcgaactcgataccgtacatggccacgtccggggatccaggaacttcgggttcgcaaacgcaaagcgtggaaactggaaacccaaaggatttgccatacggaacggaatccgatccagccgagcgcacgggcgcgctcgttcgccgtgccgagccgtgcgccgcgcggctagtagccgtggcttctcgttctccgcgcgcgtccgtggcaagcaagtcccacggaatcgggggcgagttgcaaggcttgcagctgtcgagccgtggagcgtacgtgcgttcatcaaagttggacaaggcccttttgcttgccaagtttcgagtcatcaccagttaagcatgccccaggtggccaggtatggaatggatcaaatgaggtagaaatagcaggagctgggatacgaacacatgcgtgtgatctggccatgacaactactcccttcaatagcatctcccaaatactcctttgatcacaaatttttgtaaattttatagaatgtattaaaatgcaatatgacgaaagttgtcaatgaaacaagtctgagtggtaggaccagcaccgcccatttcgaccataattgacggcacctctaagctgaagtcatgattctaaggatagaggggatgacatagtagtagggtagtagttgtagtacatacgcatgctacatgcaatgctggggtttttttcttaggttgtgttgagttcacactgaagtttgaaagtttggttgaaattgatacgatgtgatagaaaagttgtgtgtattaaaggttcgatgtgatgaaaagttgaaagtttagaaaaaaaaactttgtaactaaactgggccttagtcaggcttctcaccgtctaacgctgatcaattcaacgatatatgatttttcggatcctttttcgttgcaaccaacaaaccaaggacatgtttactttgatgccaaaaaaaccttactaaattttagcatttggcaggatttcttatatagttaccaaaatttggcaagaaactaaatgtagccacttttttttgtaactttaccaaaatttgataaggttgaaaatgatatcaaagtgaacaggcgtcaataattgtggatgtcagatcaagcagctctatacgtcccgattgcatttcgaagccaaggagataaaaccagtagtcctctacctgcctgacactggcacacaggttaggtggtcgtgtgatcgattagagaagcaaacgaagatatgccgatcctaagtcaaaagattcgggctgcaggaa

SEQ ID NO: 17581 - DNA, 556 bp, Oryza sativa
ctccgccaccattgatctcacccacccatcgatggtaggcaagatgcgacaagcgcgcagctatgcccgttggtgatgaagggaaacgatatgggctgagtcggtgcagagacggcctcaaggttgccgagaggcactgtgatggcccagaataattagagggaaaatagaaggaaaaaaatccactttgactctcttaattgtacgccgaatctaattcgtacccctcaactagaaaaccggataggacgactcccaaactattgaaaccagtgcaatttgacttcctcagcagttttggagggtagttttgctgatgtgtcgctgacgtggcagtgttgacccggtcttcgtcccacgtggcgcttacgtggcattagaatttaaaaaatatatgtgggacccatctatcattcacacacaaatatatattgtggggcccgacgtcgacggcggtggccttggcgagcatggaaatggagcatctcatagcccgcttcaacgatgcccacgctgtgcatagcaacaactatctgctgctggacgccgtcgccac

SEQ ID NO: 17582 - DNA, 2358 bp, Oryza sativa
cccgtgacatcaacgacggtatcgtggggcgaccgcacgaccgcgcgctgtcgcaggaatgacgagcggtctcgctcatgcagagagcgacaccatcccaaactccatttggttagtgactaatgatctaattaactatttaactaataataattaatgattacttaataattgctaatcataataattaatcactaattaaccattttgaaatctggtatcgttctttcatttcgcaagaccgcgcagtctcgcgcgataccgcccgcgaagtcgcaccacctcacattcgcataatgattgtgcaagatcaacggtataatttttttaaaaaataaatctcgaatatttctaaaaataaaatgaattaacaatatattttcaaatttaattcgggcagcaacgagccaactatcgatttaagcataggcgacctctggaatgtgtgcgccacagtggcacactgccctggcgttgcgcacttcacagttctgaagtatggggttcttcttcaaaacattttttatgttctatttactccctctcaaaatattgttatattaagataagatatgatccataaaacaaaaacaaatctaaacatactctccgtagtttttttttttacaaaggtagtatggcacaacctttgttggttttttttgggacggagggagtatgcgacaatctctccgttttcaaagcaatttccacttcttgccttcggtaattggaccgcggaaatagtatagagacgaagacttaatcgtctccagtcttcacccctactcaactctagcaccgttacaaaacttgcaatgccgaagttgacaaaaaacatgcagaaaaaacgaaacaatcaccggctatatacgtggttgtcagatatgcaacgatgccagccgctactataccgcgaagtgccgaagtatactcgcatcgcatggcaagcagagtcgcgaggcaatacagcacaggaaagacgggcggcgaagctgtacgtacccaagaagtcgacgccgttgtacccgttgctgaaccggccggtgggccgcgacgtggggaagtcaatgccgttgtgcgggaagtttgcccgcggcacggcggcgccggtcaggtagttgttgttgccgacatcggccgtggagtcgccgaacacgtatatcgccggcaccttcgccgccgccgccgcggtgatacagatggccacagcaacaagcgcaatcggcggtagcatctgtccagccatgccggactgcgaggtgcagtccgctggctctgggtgggggctgaacggcaaacctatcccttgtttgcttttgggaaagggaggggccgcgaccggagcggcaatggcgcactttaaagggcgacgatggcgagctgcgtacggccaacgccttttattgagaccggcaaggcgtggcacagcacttagaccaagtagtagtacaaagttctttacttggcttagctttggtaaagagagatgtgaatgtgacctggtcacctggctatcgcgcaaaacgttgctcctcctcctgggttggtcatgggggtctcctggtcgaccaggagacagtctactactctcgtactcctacacgggaagagtaactggatatacagcgaagaaagtcgatcgatcaaggtatcctactatcctggctcctacatgtacttgtgacaaaaccaagaagatccctcagtctacttgtccagcaaaccccgtcaaatttactcgccacgatctcatgctccctggtggtcctacaggcgaattatatcggcatgatgttctaagtgcctttggatactctgtctctcaagagtaattactgctacttttcacagaaaatcgatccccgggaggccgggactgagtgggggtaacttagcttgatcagaaccgattacttggatcaaccccgttgtccataggaacatattctaccaaccactcgatgcatttgtacaggcaggaaccttaacacgtctacaagccttgaagcatagagaaaggcagccggaatccaatgatacggtaattactttcgatgtttgcatttgataatgctccagtgggatgaataggcagccttatggctgggcacacaagtttgcgctggccgattcttctacgcttaaataagcacccaataattatatctttacgtttagttcttttcatactgtattgttcttaccatcacttacaactgaagctagcctgccagatgcacctttttttgcccaggcagaaaaagaagatcccatgcacagcatggctttttttcaatctttctcctgttgaaagcaacgaaaataaaacgacagcagtgggcagcgcaacctttt

SEQ ID NO: 17583 - DNA, 2205 bp, Oryza sativa
gcaccaaactaacacacgccaaacacttccaaattccaaccatggcctggtcttcacacacgccccaattaagcgctgctcttgtgctcgccggtgacggcggcggcggtcttgtcttcctcgccggagcccttgtggtaaccgggcagtttctccatgatcttgcccagtatacccttcttctccttcccatccgggctgctcacttcctctgtagccggcggtgggtgtgctggcgccggagtagtggcaggagcagccggtgaggcggccggcggcggcacagcagttgcgtcttccggcttcttgtggccgccgggcagcttctccttgatcttgtcgaggaagcccttcttctcctcctcgggtgcacgtggcagggtcgcctccgtcttggcgtgatcaccctcgatcttctccacggggacggcggtgtcgtggtggtgatcgccgtgagtcaccacgggagcaggagctggcgtgggcgcggccgtcaccacggatgcaggcggagccggcgcggggaagcccgtcgccgcgggcggaggagcatgctcaccggcatggtccttgtggccgggcagcttctccttgatcttctccttgagccccttcttcttcttcctcttgaccacctcgccgttgtcatcgatcacctcctcttcctcatcactcgactgttgcacacaacgattaaaggtcatgaaaccttctataattactaaaaagtctgtaactaattaaagctagatcatgcatgtgtgcacttaccgagctggagctggagctggatcggtgcagcttggagaggaggctctccttcttctcgccctcggcgtggtgctcctccttctttggctcttccacggagaccttctccatgccggtgacaagctcctcctcatgcttcttctcctccggctgatcgtccttcttcctgccaaggaggttgtcgaagaggcccctgtccttcacctccacctgctctgcagcctcgccaccctggtggctctccgtgttcctctcatcctccatgatcgatcgatggattcagctaaagcctctcgagaactaaagtaatcaaacaacagatcagcaagaactattcgctcttgacttgtttgagctgtgacgagtcgcttttgctttcggatgaagaaggtggcgaggcagatgccctccttatatagcggaggggatcgaaaggtgcggcgtttgtatcgtacgtacgcgtaggcgacgcgaggacaagaagcgtgggcgggaaatggcgacgagatggggggcaggcagaggcaggcagcgggtgagccagtggcgccgcgacgcgtgtcggcaatcgcgtggggcggccggctggttccgacgtggcggtgcctcgggacgggtggacgcatcgggagaggtcggcgccatgtggagccagacggccgtgtcaccgagggagaggaggcgtgggcggcgcgtccgcctctccgctccctctgcttcgaggcctcgacgcctacgcgacgagacacttggcttcgggcgtcgctgtccgtcaatttcctaatcgatttttggttaagtgatgagcggagcgatccatttaggaacagtaacgtaagcgtttcttgttcggatacgattcgtcttagtgcgcagcagtagcgatagattaacatcagtttttttccatcggattctcatccctttttcctctttatcggcatcatcgcggccaatttttcttctctcccagcagaggaaggaagagtctgtgatcgcttttgtgacgagttgggagcgggacacggctcgagagcgacggcaccgcgcgcgcggtgtctgattaggacgacgggagagatccagagacctggacggtgacatatggggtccgtagatcagggtcccactgatccgtctttcacagcctaacaaatcgggtcttggtttggttggtggatttggtcggacgggataagttatccctgttgatcacactgattaatttgccacccccagatcgagtcgtccggggcttctctaatttccagccagttcttttccttttatttttctttctttccttcgctttgatgatagctgatgatagctttcgtggggggaaatgtcggtggcatgtcggccttttgatttctttcgcccgtcctgtcctgcgaaacgcattggggccacactctagtctgtagtacgggt

SEQ ID NO: 17584 - DNA, 1389 bp, Oryza sativa
cctgcagcccaacacgaggtaaaatccaatccgttgtaatggaacaagtgttgatgctaacagtaatcctgctaattctagaaaattttacttgctgttgaaatctgtactaccattggcattaactcatgtctgaagctccggccgaaatatgtaggccatcattccagcaatatacactactaggtgatattacaacaagctgggctggcttctatgacatagcagttgtcaatttactatctgaagaagaatccttcccttccctgatggagatttgcagaggaataggggaatagtcattcgcccatcaggatagtagacaatgggatggtttcacgttggccaaatttacaatgtacagtatgtaaatttacaatggtttcaggttggccaaatttacaatctactagcatactcatcatgcttgctcatgctgcacaatggccaacatctcacttgcaccagattgccctgctcgcatcctcatgctgataatgaaggcaatgagctgcagagtagatatactctattcttagtatggcataaaaagtgtgcactgaacatattcagttgaaatcttaccgtacaaaagccagcacacatgatactgaaacctttgaatttgaatggcgctgtttctgaaaggacccatgctgccgcaagaaagcaaaagctatggagtaaattaaaggaaacaagggttataaactaggatttatttacaaatgaaaaaaatacctgttagaggggtaaaaattagtggagctaatatgctggcaaacgagcttatgcccgatatacagccttgagcaattccctaagaggcaacaccaaagtaataggaataatgagcgaaacttagcagtcatgtcaactaatacaacacaggtcatcatttgaaatactcaaagacaatgatcagcaacaataggaaaaaccaacctgctcatttgatccaacactcttcgatacattggttcttatctagaaaaacagagaagaagatgattaatattgttctgaattgcttggaaggaaaaaagtttttaataaactgttgggaaaaatatggcttacagaagggtgaacaaaagcactcagaattataaacaccgcagataaatatggtacctgtagatgattaagacaacgttagcgaagatatgtgtaatggatgactgatattggtttagtgaatgctggaaacgcactattgcactgctgaaccagcaagcaactaaacctgattgcaaattagtgcaaaacaagagcgtagttctgtctatacatttggatatagccacaattgcattcttttgggtaagagtctaataagactacaagagaattattgccaagtccaaaggaagtacccagggctgcagg

SEQ ID NO: 17585 - DNA, 2646 bp, Oryza sativa
  unsure (1)..(2646): unsure at all n locations
acctgcagcagcaagggttatatttgatttactggaacagaaaagcttggtttcatggacagccatgatgaagggttgcttaccctatggacatggagatgaggtggttcaattatttcacttgatgcagaaacatggggagaaacctgattccatgtctcttgtaactgctgttcaagctgtctctgagcttggccatctaaatggtctaaaacaaatccattgttttgtttaccgttccctgttagagaaagataagattactgcaaattcattgataagtgcatatgccaaatgtggaagactggatttgtcagtaggtttgttctttagtttggaatacagaaacttggatacttggaatgcaattatcagtgcttatgcgatgcatggattctatattaatatgcttgaaatgtttaagcaaatggaagaagaaaacattcagcctgatgagttaacattctctactgtgcttactgcttgcagccatgctggtcttgtcaaggatggttggcgtatgttcaattccatgacctcagtatattcagttcttccacaggaagagcattatggttgcatggttgatttattgggtcgtgctgggcatctggaagatggatacaaatttataaagctatctaccttgaaggataaatccactatattttgtgttttgatctctgcttgcagaacgcatagaaatacacaactggcacttgctattagcaaagagctccttgagcatggaccacagaaaccaggtatttatgctctgatttcagaagtgtatgctcaggaagggcagtggaatgaatttaccaatacaagggccagagctaatttaagtgggttaaagaaacatcctggttctagtttcattgaattaatggagcaaggcatgtgttagcgaagagcctgcggacggcatgctactctttatagtgtgtaaactatacattatgaccctttttaacttcttactttacaaatgggcccatgagataactaatagcaaactaattgcaggaatggactcctccctttgcatgaagaacagaagcgcacaactgcccatctcgcatctctctcctctcaaatccttctcaaattggcctgaaatcaaaggtttttccgtgggacgtgtggacatcgtctaggaaggtactctcccttgattgtcctcattttgatatttccgtagttgactcgagcattggggtgaaaccctagcattgatttagattcattcattggattaattttatcggattgattaaacgcacagtcaatttgtgattgagtgtagcaggattcaggtagatcagtttgtatgaacttttggtttagttgaatttcatgcaatgactgggcacaaaaaccggttcactcagctgcaaaattaaggaattgcatcataaatttcagaatccttgcattggagggaaaagaacaagtaatccaacatgcttcatcctatataaggtgcccattcccttctactccctcatcccaaaatataagggattttagctagatatgacacatcctaccctatctagattcgtagtactaggatgtgtcacatctggtcaaaatcccttatattggagacggagggagtattgtattttctctccctggacgcacacttgaaacattaaagtttcaacttacagatgcctgactggaatcgagaactgatgcttgcatgcaagcagcaaaatcattgaagattgttcaggtagtgggtgcatggtcgtagtttttagctgaatcggtatttacattaacaatttattcaagctctcatttgttttttcacaattgatttcttgaactgacagctaatcgtttggtgtttcttcctcaccaatattcaaccattcaggccatcactttgctatcaggttacttagccgagagcaattgggcaatggttcaagaaatgggagagaagacaccacaatggttccttcgctatggccagttctccacgtgcagcaagtataactttaaaaagcacagcagccaggaatacatttgccgtatgtatcacttatttattaccgttcaccatanagttagtccattctggttttgttatgcccttaaaaacatttccttcaatcttaaagataatattgaggagattggaggtactaatgctgccacattggagataaacaactcttcaagttggggactgggattcttgggactggacagagaagaacatgtttgatcttgaggagcttgatcgcagtgacgtagtcagcaacctcgagtgtcatctgctatattctcatcgcccaacttaagatccaaggagaaggattgctctaaataatgtacttacaatattatctaaaagaatatatctagttattagggccgtatgcattgcttgatgcatatgtggagaattttttactctactatcttaaaaggtatgtatggatacttttgattagtttaggttggttatatgcatttagtgaggaatttactttttgtgatatgatggcttttgttttgtgacaaaccaattatcttttctcttgatcatctggcaaaccatgaaatcgtttgtcttgaacccaatctttatttttgaccaatggtcctttcctgagatctgctggg

SEQ ID NO: 17586 - DNA, 880 bp, Oryza sativa
caaccaagcataactatgtatactgatatagataagaaagcaaataaaaacatcctaacaatgaaatgagtcaaccatttcccaatgtccaatattgaccagaagcacaatgggatagcatagaacaagttctagctagaatgaaatggatggaagcaacaagaaacatatagaaagttataaagcatagtaaccatttaggatagtttcagcaaacaaacattgcagaagcatttctcaggcgtcataacttgccatgacactgcctccaaataagtaacatatatcaaatttataacattcttatccggaaaaaaataatgtccatccaaggaaacactgcctatgtaagcgctgaagcattacacaacttgactatttatgcccgtatatcaatgaaaaagagatgcagccttcaatccagtcttggttccataagcaatatttcaaagcctctctccagacacatacaacagacagaagtactgtgtcctacaagttcctttgggaaaagagtcactcactaatattatcacttggcaccgtcccttcatcaacactctcaactgcagcagcaatacttgcctcagttccagcattatccatgtagcgaaaatctggataatttctgctgttcaacgaatgcaaccagagagctacagctccctccttgtgctccattgcagcgatatgagggaatatatacttgagcttaaactcttcagcctcctcagaataaggttccatagaaaccgcctcatgtgaatccttccatttcttgttatatgaagtgaacatgcattcatctaagtacagcccaacctcaggcgcagtaggcacattaagattgacatccctgtaacagaaacggctgcaggaa

SEQ ID NO: 17587 - DNA, 655 bp, Oryza sativa
tggtgtagtatatacttataagtaactattgtatgaatgagctattagattggctataaataaattgaagctagtagttggctatactattaaacttgctctaatagttagtattattatggggaatgtgtaagccacgagcacggagtagcgcttgcatttttgttgtatatctcgaggatcacaatattcttcaacctctgtcagctcttaacatgggattcaggcgcagccccccaccgttcctcgccgtggctaacaaaaccagcaacccattgttcagggggctccagggaacaaactttgcctctgcaggatcaggcattctcgactcaacagtaagcacgtcggcataaacccaaagccactgcacgatttttcgctgaacaccggctgatgacgacgaaacacgtgtgtgcagggtcaatccatcatcccaatgagcaagcaagtgcagcaattcgccgccgtgcaacgcaacatctcagcacgcatcagccagcaagccgctgacaccgtgctgtcgagatccctgttcctgatcagcaccggcggcaacgacatcttcgccttcttctccgcgaacagcacgccgtcgtccgcggagatgcagcggttcgtcaccaatctcgtatcgctctacacaaatcatgtc

SEQ ID NO: 17588 - DNA, 2856 bp, Oryza sativa
gtcaaggacgccatgcacggcctcagcgtgagcttcagcggcttcaagtactccatcgggagctcccatgccgtggtgcaaagcatcatgaagcatccccaacgactcggtatctgaacattctacgcttcagtttcggatttctgaccaacgcaaggttcagagtttcgtgacacggcattggtgtgcaggattcaaggaggtcacgacggcttgctgcggctccggcaagttcaacggcgagtccgggtgcacgccgaacgccacgctgtgcgacaaccggcacgactacctcttctgggacctgctgcacccgacgcacgccacgtccaagatcgccgccgcggccatatacaacggctcggtccgcttcgctgcgccgataaatttcaggcagctggtggatgaccagcactagctagagcgtggcagtgtcaccgtgtaacgtagtactactaattgttgtacgtcgccgactatgtgtctgtttgtctggtgatattggtgcgtaggatatgctgggctgtgttcatcagtggcttgtgctttaggcggtggtgtagtttggatacacataccaaaatgtcatctccgttattattgttgcccttgttggtatttgcggtgtttgtgttcccaagtcgggaataatttgagcctggagcggatgagccaaggacatcgcactgcttacttggtgccaaatcggaatacaaactctaaacatgtaggtacatacacatatccggccatgccgttcttggtcccagttggtatgtcctcagcttgcgccagttgtgtatctgtcctgaagtcgccgtctcggctcttcaccactgccactccaggttaccgatctgcaggccaaatggaattcttcagagggtgaaaacaccagtttgtttgattgcgctagagaatgaacagcaatacagaatggacgtggacggcaattgaattaacaagttggtgctttggtgatcatattcgagaatcgacagtatatttctttctggtgcatattcttgtatatatatctacggtcacaaaggctgaagcatccatcacccgaagctgaggagagcagagagcagagagcaggtgtgccaatgggcagccatagtttctcatacgtgctggtggctttgtgcttgcttggggtcgcggcggaggcgacacagcttgcccccgcggtcttcgtgttcggcgactcgacggttgacgtgggcaacaacaactacctgaacatcaccaagcaggcccgagccaattaccccaagcacggcgtggacttcaccggctcgacgccgaccggccggttcagcaatggctacaacttggcagaccagctaggtgcgtacgatcccagatgaatatatggtgccctctatttagatgactaaccagcatgtgccgcgtggcacgcttcgatgatgaacagctcagcagctcggcttcccaatgagcccaccggcgtacctgtcgctgacagcgaagaccatcgtttcgcagatgtacaagggcatcaacttcgcatcaggcggatcaggcctcggtgacaaaaccggccaaggggtttgtttaacttgaacaaatcagtaacacacgttattattctgaaaattctgaaccatatgacacgtgacacgtatgaccgtgccgcccgggctgaaacgaacttgtttttttgaaggccggggatgtaatcccgatgttccagcaagtgcagtacttctcgaaggtggtggcgatgatgcagaagctgtcaggctcgagaacaaccaacactctcctctccaagtccatcttcctcatcagcaccggcagcaacgacatgttcgagtactccttgtccggcggcaacggcgacgaccgcgagtttctgctgggtttcgccgcggcgtacaggtcttacgtgagggcgttgtaccggctaggcgcgaggaagttcagcgtcgtcagcatcacgccgctgggctgcaccccgtcgcagcgggcccgccggctgtcggaggatggcacgcgcggatgctacggcccgatcaacaccctctcgctgcggtcctacccgacgctcgccgcgtcgctccgggacctcgccgacgagctgcccagcatggcctactccctcagcgactccttcgccatggtctccttcatcttcgccaacccgcgcacgaacgcctggagtaatcaaacggcccatggacacgttaatgtctttgtcttgatggtgtgagtctaccttgagcctgatcgatggattcttgatttgtccctgtaggtttcacggagctggagtccgggtgctgtgggtcggggccgtttggagcgctcgggtgcgacgagactgcgccgctgtgcaacaaccgcgacgaccacctgttctgggatgccaaccacccgacgcaggctgcgtcggccatcgccgcgcagacgctcttcaccggcaaccggactttcgtcagccctgtcaacgtcagggaattggctctgctgtgattgcgcccaaaaagaaatttcaagctattcggcagtttgcaaacgtaatgatgtgatttgatctcttccacctaataataaactatggccggatccatacgattgctcggttagaagttgaggtcgtttccaccacggtcgtgggcagagatgtacacgggagatctctctgttctcgtgtggttttgtatcagaattcagagatttctttatacacggaaaggattttaaattgacaagaaggcacttgtttgattacagggaaaaaaataaatctctctctctctctctaatttccttttctttcgctgaaccgaattttcgaaaaggaaaaattacaccgagggctgcagg

SEQ ID NO: 17589 - DNA, 682 bp, Oryza sativa
atctgtaaatacataccttcacctcgtcgtacagcttcttctcccagatatagagcttttgcagagtcaaagacaagttccttgctcccaccaccttctcccctcctccgacatccaacaggtcgctgcctccgtatcctgaatgcggcagcgcaatcactgacaccatccgagatgaaactgtttccgaacagcaatcaaacaatggctccaatgatcaggcacgaggtaatcgggagatgcatgcgtaggttatacaaagaacagagatagctcaccatggtacactgagctccggggatggtagctccgcctcccgacttcaagaatcggcgcgagcgccctgaccgcgtccgccgctcggacaaactgcgccttgatctcgccggcaacgtctgcaccatcggcggctctccggggagtcggaacggacgcggcgacgttgccatgcgcaggcgtctgttgccgcgccacgccgccgccgaccactcccttgtcgacgactggattctcctcttcgtcgacttcggcaatgctgctgctcacgccgccgatagagctgcgtcggctgcgagcgccgccgctcccgtgcgcggagtactcgctggaaacctccttgacgaccgcgtcgtcctccttcagctcagggatgccctcctcctcgcgcacctcccgggagctc

SEQ ID NO: 17590 - DNA, 969 bp, Oryza sativa
gatcagtcagcaccacagtgccactgccacccacaaatcaccacaaccttgagatccatcaccaagatgctaaacttttcccgtcgccgttacccaatacaaaaatggccactagccacagcagttcacgttctcaccacacagcctttttagtgccctgattatataatcttcctcgttaatcacagtttctaaatcttagttaccgaatgctaattccacttacaatcatttttatttctttacaaaatgctaattgcgacacgcactcccgaatccccgccgctagtctcgcccacagaagattcgaacacatacagaattacacggaccacaatcgtttggttaccactaatcacatattctaattgatcctgttcctgatcatgtaccgaacacctgccatgccatgccacgtacgtggagtggccaccaaaccccgcgccgctcgttgccgccggcgcgagtggctgtgccggtacacggaagacgcggcttccgtgcgcgccccgatgcgggggtggcggaaaggaggacaagcgttggcagctagctgcgcgcctccacgttgttccggaacgttccatcgcatcgttaactgaaacgagaggcagtattaatcccctagttaaactctggctaagtatagcagagacgccggccgagaggagtggggggagagggaggaggaggaggagagtggctactagtactagctatctttggagtgggcgtttcttggccggcggcgatggagcaggtgcggcggaagagtagcctgaggtcgcatggctcaggcaagtcctcgccgcgggtgggatcgggggtgttcgatgagcggtccggactggcggccgatcgtgacggcggcgaggaaggggaggtggtcgtgaggatcgacggggaggggccttgccgcgagccgttcgcgttccccggccaggatggcggtggggcgggggctgcagg

SEQ ID NO: 17591 - DNA, 775 bp, Oryza sativa
ccgcctcgtcaagacgctgctgctcaaggtgctggcatcctccttccatgtcaacacatactttgaccggattcaggaggcattgttcaaccagtttgtcatcgagacgctctccgggccgcccctagttgacgaaaaccaattccttgctgagatgcatgagcttcaacgcgcaggagcaaccatcccagctgagctccgttccactgtaccaaccaagaatctttcagggcaaaggagtattcggatgtccggggtgattcctaagggagaagggagcaagcagctgtcaaaagagaaaggagagcaccagattgaggaggggatcaccattgacaagcttcataaactcaaccagaaaaatatctcagcttggaacatgaaaaggttgatgaggattgttcggtttgggacgctcacgacaatggatgagcagatacagcaggcaacgggtgagggggatgagtcagcgacacagattcgtagtgaatatgaagccaagattgctgccaagaagatctttcacaatgtggcgaagcctggctccaagtaagtgtcttcattgtcagtagtatagtatggttagattccctaatctcctgcaagtgccatcattgctagttcttacaatatagataatcagacaagcaactgcaatttatctgtaatgtaggaactgttagttcgtgcggtggtcgtgcggacagtcagtgttatttcattggagatgctagtatgctaatatttcatcctatatatctttagtattaagtta

SEQ ID NO: 17592 - DNA, 1110 bp, Oryza sativa
tcctgcagcccgggcctaatcgccgtattttccgtttgttcagttgtactgtattggtagtttgtcctttactcctttttgtgtggtagtatacattctttctgttgtcgtaattgtacaggtcacatgttctcgttaaatatacgtattcgttattcaggatgcgtatctcaataactttgaaatatgtatttggatgatcgatctatcatagtgaggttttcattaccacgtaggcgagcaagaggcaatgcatgctgccctcgcagaagatgccggcgaggaccttaacgacgtagtacacgtagaagtacaccttggagcggttgcaggccagtataactgccagaaaaaaaagtggaaaacatatgaaaatgtgcacagatgcattatgcagtttcatcaagctagggtgacccaagtcatgctgcaaagagcatacacaacggcagaatggccacggtcaccggcagtgtcatcagcgccttcctgccgtatttgtccgacaaattccccacgatgggagtcaccacaagagcccccatccctgtgatctgcgcaaattagccaaaagccgttccattttcacaaatcccacccgcaaaatgtgacttaaataatccgaaacgcgcgatactcacggcgctctggaagccgctgaggtagatggcgacggagcactcgtcgcggccggggcagacggcgtccatcgtcacgtcggtgatcgccgggatgaccatgtaggaggcgaagtggaacatgaacgccgccacgaacaagtgccccagcacagccaagtccttcatcctggcgtctctaccaaatcgacagcttaagagaaacacggttaatttgcatgccaaaactccgggtctacgttttatactcgcatgcacggcacgcaaggacaagaaaaatatacatatcgccaatgcaacgcttccaagtaagagaagcagaaaaaccgaagcatcgatcagtcgctcttgcttagggtgatcacccacttgatctcgtcactaaaagtgaccctgcatttttgccaggtttgcacagttatattgcgccttgtgaacatacttttacgtgcccaattccccaaacaagcca

SEQ ID NO: 17593 - DNA, 4088 bp, Oryza sativa
  unsure (1)..(4088): unsure at all n locations
ccactacttcgaacctgatgctacggtatttttagtggcttctcattcatatcgttcatatacaggctagttagggatagctggtgctggcgtgcggcgctccatattgcatacatcaagagacaagattagattgcactaattttcgttcagactagctacagatttccataacctggcaagtacactgtattgttgttactgcatattaaggtaggtaactccaacataattgttcactcaaggaaattaaaggtttaatctcagttgtttgctatctgtttttttttttgcagatggaggcaataaatagattggatgtgcgagataactcagatatttattcaaatgatgatataacttctccagtaatagaggatgacaacaccagtacaccaaaaaaaatatcaagaattccactcaatgtaagtacactggcaatttaaaaattatgactgaggtgctttaaaatgcttattgcaatgtatatgtgattttgcagtgctccgtttttacaccagagtgtgatgataagataaggcctgcggtagggatgacatttgaagatattgcctctgttgaaaaattttacaagtcatatgcacaccaagttgggttctcagtgcgtattgggcagcaaaagaagttggatggcgtggttcagtgcaagcactttgtgtgctcaaggcaaggatggaaacatgtgaatgataaggagattgttgatccatcgaagaaaaaaaagattaaattgaaagaaactagatgtggatgtgatgcacacatttacgtgaagctatgttctgataacaagtacacgatagcttccttggttgagcaccatagtcatggacttgtatcgccagataagctgcatttgataagatcaaatcgtgaagttagtgagagggcaaaaactacactcttcacatgcagcagagcaagcataggaacctcccaggcatataggctccttcacgtgagtgatgggggatttcagaatgttggatgcactaagagagacttgcagaattactatcgggacctaagaaagaaaattaagaatgcggatgctcaaatgtttgtggcccagctatgtagaaaaaatgaggtcaattcatcctttttttatgattttgatgtggatgaacatggcagattgaagtatgtgttttgggcagatgctacaagcaggaagaactatagtcactttggcgatatcgtatcatttgattctacgtacaccactaaccagtatgacatgatttttgcaccatttactggggtaaatcatcacttgcaaagtgtgttttatggtgctgcattcttagcaaatgagaagattccagcatatgtttggttgtttaagaccttcctaagagcaatgggagggaaagccctacactcatcataactgacgaagatgccagcatgaaagcagctattgaaaaagtttttccaaccacggtgcataggttgtgtatgtggcatatcatggaaaaatgtcagacaagatcggaccactatggagagaagactgcgatttaagggaaatgatgaagtcatgtgtttggagatcagaaactgctactgagttcgaatcacagtggaaatctatcattttggactttcacttggaggacaatgagtggctgtcaaataggtttgacattcgtaaatcatggattccagcatatttcatggacatatctttggctggcattctcaaaacaacttcaaggtcagagagtgcaaattcgtttttcaaccgtttcattcatcgcaagcttgctcttgttgagttttggctcaggtttgtcacatctttagaatgccaacgccaagaggagttgaaggcagataacacaagcatccatacaacatacaaacctgtaactccttgggcaatggagacacaaggtagcattatgttcacgcatgaggtttttgacaaacttcgagaagagattatagccgccagagatctttgttgtgttaaagacattgcacaatgtgatgggttgaaaattgttaccattagtgatggatctcacaagctcagggtagtccgttgcaatacaacgacaatgatagcgaactgttcgtgcaagctatttgagtccgatgggatcccgtgtcatcatattattctagttttgagaggtgaaaatcaaaatgagttaccaactgcatacatcatgaagagatgggagaaaagagtgaaaaggtaatgtgtgcatatactctttgcttgaatcttttagttttagtcagttcatgaaaaaaattgtacagtgcatacactcactatttttttttgaaactggtttcctaaccacatcgttatcgtagggagaannnnnnnnnnnnnnnnnnnnnnnnnnnagaagagaagccaattgactcctcggaggcggcaatgagaaagaaaatatcaattgcacgcaacaaatttgaagatctcatacaaaaggctaagcactcagatgaaggcattgacttcttaacatctagtgtgttcaacctgaggcacccttggaccaaatggtgtctaatgtcaagcatactagacatgaggagtgagtcttttcttggttgcacaattcctactgaaattgatatacaccgaccaactgatattcattcgagggggagaagcaaaagaattagaagaagcaaggatgccaatactggtaagaagcagggtggcaaggaacggacaccacggatctgcaagatttgcaaacaaatggtgtttcaagatttgcacaggatatgctgcctttgtttgcaaatcatgaaacttgtcctagtgccatatatatccaaacgggttttactcgttctatatgctgatgtgacatgtcatggagatgcctacgtatcggtgagatcccaatttcagtgacatattgatagttttttttagaaaattcttttatccccctctttttaattttttaaaaaacaacttcccccatcacttttctttaattttattttttctatatggctaacatgtagtcactaccatggtatgtcacgtcagcacacggattgagtcagaactcgtttggacctatgagaccccaggataagtttggggggctgaaaaatatattttgtgattctaaaatgataaatatggttgtatgcaaaataactctggacaaaattgcacttctttttttttcataacacttggtttatggggaatttcggaagtacaaattgtgtttgtgccttcaagtaaagtattatctatttgatcacagtggattgatggttgcgcatcctatatacttatatagttcatccccactaagtgcacttaatgctatttctctcttctctcataaagccacatcattctaattatttttagcctttggatggtatatatatggtacaaatagtctcttctttcttctatcataaaaccatacaatttcaatcgtttttttcttcaaaattcatatgtatcaattatataaaatatgttcaccttgcattatatttgcaatcatgtgtaaattatataaaacataggaagtcattttattttcttttacaaaatataatatagcttatttgtacatactatacaacttaatttcccgcagcaacacggcggggtaatcatctattatttggagaaatttgggtcttaataaagaaatccttggtggaataattaatcctgacatattggtccattgagccacctgataaaaaacaaagtttattactcaagttcatttacatatgtttggtttgtgggtggggtgggttggatcaaattcatcactgtttttagggtggggtgataccgtctatccgtaaggcacgagagagttgatgatcctatgttttatattgcagctcatatgccagcaaggaagaaaagtgagttggattggtatgtcaactttttagggataaggccaatccgaatcttagatgggtacaattccatcttacttatttttaaaccaaataccctgataaataaataggttcgacccaacccaatcccgtcccttaaccaaaagcatgctttgattgacccatccaacatcaaattcttt

SEQ ID NO: 17594 - DNA, 696 bp, Oryza sativa
ccgtcatggcgagcgttgggagtgggagcgagcttacgaagtgccttgagtgctcagagaggggtaggaaggtgcccggtgtcatgggccgggagggtaaggtacccgatcctgcccttcaggaggagaaatctgttgaggcttcccgggaggaagctgcagtgggttcaaatgaggatgcaaattgtgatcctgcaagcactggcgatcgtagtgttgatttacctatccctgataatgaaaccaatacccaaatcactgaaatgagatcaaatggtgcagaaaaatgtgatgttcaactgtcaggtggtactctctgttctgaagctgtaccagctagcaatagtgagactgtttgccccatcctgaattcagattccaacacgaattcagattcagttgatgttgatccttcatttgtggctgaaaagaaaggtagtattgagactgttgttactgaagatggaaagaaacaagctatggatgttgttactgaagatgaaaagaaacaagatgtggattatgaaggcagcagtctagaagagatgcccctgagaagtgcattttcttacactcatgaagtcaaagagaggtttaatagaattctcaaaaaatatgttggaacacacaatttccacaacttcaccaccagaactaaagcggaggatcctgcagccaaaaggttcatcatttcct

SEQ ID NO: 17595 - DNA, 754 bp, Oryza sativa
tacgacagtgcggcagtgccttcgctagctacgaatataggaccggggcgaggccagctacggatgctacagtcgagcggccaccacgattacgagatgcaccggagcgagtgcagggacgccgaggtgtccatggacgcggcgtcgaacatgcaccggcggtcagtagcctcgatgccgtagtccatgagcgggcggcgctcgagctcctcgtcatgccggcgcgcgcattccgggacctccatctcccccttgctcacgtgctcccacaggtactcgagcctgctcatgtacctcagcttctcgtacagcctgcaagatccaaaattccaaggaaaccacggtaaacaccagcgcctcacccacgaatcgtagtgcagcacacacggagtgattcgttgtatgtacatacccggagctgaagaggaatcgccccaaggtggcgaagaagaggcgggcctggaatcccgggtgcacgaagtacaccgcgcgcagccgctccttggccgcggcaggcagcgcctcgtacgccgcgcggatcgctgcgacgccggggaagttgtcgccgcggtcgacgagggagtggacgtacacgaccacgaactcccgctccccgatctccgggagcacgcgcctccgcacgtaccccctcaacgccgcctccgcccgcccgcccagcgcgcgcgctgccgcgacaaaggaaacggggtcacttttccgccggcaaaagcatcggaattggggctgcaggaat

SEQ ID NO: 17596 - DNA, 1266 bp, Oryza sativa
cctggacatggactcgatctcctcgaggacggcgacgacctccctcatggagggccggttcttgtggtcggcggcgaggcaccggagcgtgagctgcgccgcacgctgcgcgcccctggacgagtactgcccctcgaggcgcgggtccatgagccgagccagcttccggcggtcggacaggaatggcttggcccagtccaccaggtggtgctgcccgctgggccgcccggcgtcgagcgcgcggagccccgtcaggagctccagcagcacgacgccgaagccgtacacgtcgctcttcacgtacaggtggcccgtcgccacgtactccggcgccgcgtagccgtaggtgcccatcacgcgggtcgtcacgtggctgctgccgccggccggcccgtccttggcgagcccgaagtcggagagcttcgcgtggaattgctgcacgtacgcatgatcaatccgcgaggaaaaggagatgatcgagttagacgacggcgtgtactctggcgggaggcggcagcgtgcagggcgttaccgtgtcgaggaggatgttggaggccttgaagtctcggtagatgacgtgcttctccgacgagtggaggaacgccagcccgcgggccgcgccgatggcgatgcgcagccggaggctccacgacagcggctgctgaggcgacgcgcttccgccctctggttgacacaaaaagattgtcatttttcagctctcgttctaccgttcagttacagtgtgttcagaaaaattctggtttgattttccgatgccagctttgcaatccaataatgaagtaaattccattgtcattccaattccaacctggcaacccaattatatctatatatctatactcttcatatcaagctagcttttgatactctattcacctgtataaattatgcactatcagttgactctgttctcagaacatccactaatcccctctccatgtgaagcagaacaatgatctcaatttgtccccttgtgaccaccatcaggcatcgttaattagcagcccaagtcaagttgtcagctcttaataatcatggccataccgtcatggatctgaaagcaccatgaaaccttttgtcttaaagtttacttactgcgtggctcacttctgaagaggtggttctccaagctgccttgggccatgtactcgtacacaagcagtagctccttgtcctcccagcagtagcccagtagcctcaccaggttgggatgtgaaagtctccccagaaaattcacctcggact

SEQ ID NO: 17597 - DNA, 2605 bp, Oryza sativa
cgacggccatgccggagccgctccgcgcggggctcgtggtcctctcgtccacccaccccttgtgcacccgcccgaacccgccctcgccgaggacggtgtccgccttgagttcctcgtggcggccctgagctcggcgaacgtgaagatccggaggttgggcgcctccaggatcctcccctccgcgctggcgtcgccgccggcgttcgtccggcctcaccaccagccaccgatcgcccgccgccggtgcttgtggctgtggcctggctcggcaacttaccagttggtggccgccctgggctcatcgcgacgcgtgcattgggctgcgcgatcgcgaccatgaccggtctcgccattgccgctgcaaaagagcaaaacccagcacacgaagtgcgtcagaactagagacgcagcaccaaaaccatgacaaaatggctttgttggttccagatcccgatgaacaaaataaatctcacgaatacaaagaaaacgtagtgatattgtaagcagagcatcgggatgtcgatattcatatatgtaccttgtggcagcgcatgacgggccatcaccttgacggcctccacctcgccgtcatcggagccgaagcaattccccatggcggacgcggccggcgagcagccaaacgagcagggaagcaccgggagcacttcctctctgtgagtctcttccccgagctataatggcttgtgtgcgtagatcatgtccttccagcgacgtgcttcgccatgtcttccgctcttcctctattaaaaaaggaggcggaaatgacctggacgtggtgtggaaggacgagacgaggcctggaggaaggctgctcctggctgggcgactggtcgactgtcatctgggaacccatgcatcaggggaggagcacatggcggcatggccgcatggcgcatatcgcggcaatatacatgttttgtggcacactggcacctcgtttcaaatttcatcagtgttcaaaaacattttgagtttctcaagattagaattttttttgcggggtcaagattataatattagatccattccaatgaaaaaagaatattagatccatttgcctattattgtacttatttttcaattttcttttgagaaacgcttgtttataatatgggatatttagcagaattgctaaccttcatttgacacaaatttgagttgaatatctgatgaatccttcaccattagatccttgtcactctttctccttgaaagccagcgagatagtggcgacttaagttaggatcccatattaagatcggggtaggaggagggaattcgccaaccttaaagagatggttaggtagtggaatgggctggcggcaaaattgccatagccgagtagtcggtaactagcagtgggccagtgatagcggatccaacagcaaatagacacaagagacgagaaaaaggtagggcgtgagaatatgatttggcaaattggcagcccttaggtagggcgtgagaatatgatttggcaaattggcagccctttgatttgcagtaggatcttgtggggtttatgatacccgggtattcgatagtagttctttggggctagatatgatggggcgggctgtcgacctccgattttataaatcggaaatcttatgtgtttatcagtaccaatccctgaatcagtagttggtacacacatacatagccgaatcacaacatatcacgaatgaatccaggctaagagagttaaatgcttacattagggccaggtaggccaacaactatcagagaacaacagcggaaaacaaaataatatctagcccgagacctagaatggaaccgcactccgatcagcttgttaggtacgcaagcgtactaacaagggcttctcttcaacactttgctaaaagatatatatagagcaacaatgagtacaaaagtactcagcaagccaccacacaaaatgcagtaatgtataggataatacaacgagtggctatggttactttgcgtaaagctgagttttcaaatatcatttcacaaacctaagacctagcataaactaatcatgttttaattccattgttcattaaacagcgacggttgtgtccactatccattgtgttcccaaggatagcttcctgccactggtcgtcatggttttctggggtctaccccttctcgcctctcgagaagttgatctaccagtacaaaatcatcatgcaacattccacccaatcagattaagaaattagagtctagccaagtgtaatatatgtcccggtgctcaataaccacgagcacgactattcgaatagatttggtttactcacactacagtggatgtacactttacccgtactccgcgacttgcccaacacatgagcctacgtcccaacgaatgagacttgccacggcaaagcctttcaataaccccactttggcagtacccgctccatgaactttagtcctcatgcactctaggcgtccaaggtttctagcagtgagaggagttctggctctcccgggaagggaagactcacacatgcattaagttatagttaagtttaggtttacacatggcagtcctaccgatggtgacaccactgtaggcactcgcccctcg

SEQ ID NO: 17598 - DNA, 4717 bp, Oryza sativa
tcctgcagcccctctcgcctgttaccgagcgaggcagaggcgcggctcagcgcagccggcgtggccggcccgatccgggacggcggcgggcggctcggagacggccggggtgaggcgcggaggagctccggcgatctcccgccgatggcagccggcgcgcgaggagacgggggcgtgcggcgcctcaggcgacgccatgcccgagctcggctacaaggggcttcgatgctagggacatcctccggccgaattgaagggtgagggagcatctacggggtatggggattcgatttcacgaactatatggagaggggagctcccgggatagcctacccacggagagctcgccggcgacgaaacggcggccggggcggcacggccatgggcgctaatcgccgattttagagccggcgctagcaattagatgtatggaggacgctacgggcgcgagggtgtaccgcgagacggcgagatggcgaaacgcggcgaagtggagctcgacgcggtgcaggacaggggcaaacgacggcgacgtaaggtgcttgacaacgtttcttgatgtccagcggctacccggcttcccccatggcgacggcggcagcacggctcttcctccactccctccaacctccagctccggccggggagcctcacaatggtgatctctagcggtggtgagagggtgatcgcaaggtgttcgatgaaatgcatacgagaagaaggctgagagggatgaggattttgttgagggcttcgcttaggatgcaagcaaactatggggataagatcaccagcacatgcctaggcgagctggagtactaatggtgatcggataagagcaatgaggtggatgacgcggataaggtttgatctcctcctccattaaggttatgtggctccatcatcgtacctaaagcctaaagtctgtgcgttctaactctagctgtggcaggaggctccgttttattcattgggcgcgaatgggggcgacggaacgcgcgcacatgggagctgtggcggagcggcggcttgctggggcggttttcccgtcctaaggtagttggctagggctagggatgacgcggattggcgttctggccgttatccatcggtggcgaggtgatgggtgatggcgatggcgacggcgcgacaagacgcgaggcgccatgtttcctggagggaatccggacgcgctggcggggaggcggctaggtttggcgcggttctggtgcggcacggaggggatggcgcaccggcacggacacgatgcggtgcacgggggcgacacgagatgcggagatggcgcgattgatcacgtgcgcggctcagtagtgaccgggaaggagcggactcgcagcatgtgagcggcttgggcccagatcgaacggttcatgggcgatgaacagtgccgactgaaaaagaaaaggaatgggggaaaaggaaaaagagaaagggggaagggctaatctgcaaaagtgaatgggattggatttgaaatgaaatgaaatctatacattctggttttgagaattcaaatgtttgatttgaatatttatttagttattcattagttcccaaatgagtttgctttccattagattatccaaaaattatccaattcaacttctaggctttgatatttcttaaaaactaattaaatattctattgtgacatttaataatacaatagcacattggtcgaatttatttgtatagcaatatattttacatacataggtttaatttatttaagttttattctatgaaggtattatgagatttggtgcaatattggtcttaaacattgaatcgaatactcccataagctcttttttatatatagaactcaatttatttacatgacaaattattttacatgagtgaatctatcccctgagagacttgatgaacattgtaaatattaatttaattattccagtgcaacactcctttatatatagggtcgtcatagtggcgattatttcatggttacttagatgtcatgacacctgtcacatggttccaatatttaatatttggcctataaattaaattagtaattaaccttctctttgtatggctttgttgtgttgtgcgtaaatatttatagggttcacaataaatatcttatttttataattattaatcagttgtatagctttagcttaattttcagtggtgacaatttatagtttgacaagcaataccaaccataacatccagcatgatgcaaaagttttaaaaagttcaaaattttagtgatttttattgtcggggattttcaggatgttacacgggccaagtgccctagactcatccaacttacttctattataagaaaggaattagagataaggcaatggatcttatctcatgtaaataggaggcatgtaccggattataagagatatcacgcatgtcttagctggctccctgatgactatataagggggtcggctaaccctaattcgggtgatcgctacaagctactctcaacgtcgtattgcgaaattctgcacagatccaatctcatacgactgaactagggtattacctctcttcgagtgcctgaactagcataatcactgtgtcaccatctttcctacgtctagtgcacccgataaatattattgccgatctagaaaatcgacatatctcttgttacatgttgtaatggtcttttaggcttctttggcaaatgggatcgggaaatgatatcccatccatcgaagggtaatatcgtatcctagccatctattcttctcatctatatcttcacatctcatttagtcctagccattcatccatttccctttgacaatcctgaatctcataacacatttgcaacaggttctttgatttaggcttttttctgtgttttatcggtgacataaggcccaatagcccagtgccgcgactgaccgcaatgttgggccatcccacacggcccagcccgcttcctccaacccaaaaccgatcgtaccaccgacccacgcgtcgcaggtacagcgctcagcccgtcgctgtcctttatttatttccctttcacgcactcccacgcggccacgcaccgcgcaacgctccgccccaaaaggccagacaacgcccgttgcgccgcctcccaaactccgcctcctcctcctccgctgcacccccgcaaaaaccctagcgcaccgacttcgcgatctccgcgccgcagccatgaagggcaaggccgacgcctccaagaagggcgagggcaggtaagatcctctctccggccgtctttgctgctgcgtatgggcggtggaggagggttttctggcggtggctgttgttggttcacatctgagcggttttgtgtttggtgttgttgttgttgttgttgttaggctcaaggccgccggcggcgccgggaagcggaagaaggccgccgctagcggcaagccgaagcgcccgccgtctgctttcttcgtcttcatgtgagtttctcgctccctcgcccacgttttgctctgttcagatctagtacagatctgtcttgagtttttgtttaatttttgttgattttcttgaattttaatattttttgtggtttttattttttacttttgcaggtctgagttcaggcaggagtaccaggcagcgcatcctgacaacaagagtgtcgccgccgtgagcttcctgacaccatcatctttttcgccactttttggctgatgtactttagatgtccaatttttttctcctctgttggttcattaggtgagcaaggctgcaggggagaagtggcgagctatgtctgagcaagtgagtttttctctgcagtgttcaaaaattagtacatgttcctattaagtgtgtgcatctgttatttagcatacatcatccatgagtatcactagaggactgtttaataattgttctggcctgtttgttaggaaaaagattgaattgctcctaaagtactagttgaatgaaaattgcaatttgtttttgaattctactcagtgaagcgcttaagtacacataagtaccatgggtggctattgatgtgacaatgtgccatatgtttttggcccttcgtgttaaattttattaggagaaggcaccttatgtggacaaggctggccaaaagaagcaggactacgagaagaccaaggccaacttcgataagaaggtgatgatagaataattgtgcatcctaattatagagcccttcaagcgttaggcactaattggacttcttgaattacttcttcaggagagcacaagctcaaagaaagctaagacccatgatgatggagaaggctctgacaagtccaagtctgaggtcgacgatgaccaggatggtggtagcgatgaggtaatcattaaaggaacacccggtgccctattttagcttgaatgcccaatgaatttttactactgctagttgtgttgctaatgaacatttttaatttgctctttgcaggaaaatgaggacgatgaagagtaaatagtgtatccgggggcatgaggtagcaaactgtgtcttaggtcccctattagctttactagtttgctatcttcgaccctaagatgttgggaataggcgtgcgtgggtgtgaagggggaccgtttagaattatggtactcagaatgttttcctacagtggattagcaaagaaaaagcctgaatgccgcctgctgttctgttgcttttcttttgctaaccacttgtcacagaactttgttt

SEQ ID NO: 17599 - DNA, 1323 bp, Oryza sativa
ggcttctgtgatggtactcaattgtcattgcccgctcttatgctgttccatctaattgtgatctaagatttcgtatcaaattaagtaagttcagaccgaagatatgtaagtactgaactcgttttggatattgatgatttagttttctataaacaaggcattgtaggcttgttgtagctttatacggttccctttgctttgacttttcaacttcgaggattccagcaaatgctgttaatagtagcataaaccgtgtcgaccatctgctggtgctccccgattctgacagaatattttcccctttctaacaagtaaaaacaaaagaactgaacctttataccattcgtaccatgagagaacatggatgcctataattttttttacatttttttttaaaaaatcaacttgtacaaataattccgtataaacacttatctagatttattctgattttttttatggacggaggattacctcccatcactccccatctccaacagcacacatgccaaactatccctctcgttggcaacattgtcttcccgcattcatccaccactgcggtactccctctatcaacattgtcttcccgcctttatccaccactattaacattgtcttcccgcctttatgcaccactgcggtactccctctgtctcataacatagcaatctaggactgtatttgatatttcatagtacaacaaatctggacacacccctactcagattcgttgcactataaaatatcccatccaatcatagatcacacccctactcagattcgttgcactataaaatatcccatccaatcatagattactatattataggacagagggaggacctcttacctccgcgttgttgtgcggcaacaatccccacaacgatgaactgctacttcggttagtgcgacggcaccacaccggacaccaccacaacgacggcaccacctcgtccttgccatgcattggcatgagctcggcagtggcgacgaaggatgcacaccagtaaccatcctcatcatcgttgatggaggcgagggtgtcagggtgagcgaacaggctgagaagctagacgacggaggcaactacagctagcacaccatagtgacggactcacaattgccgagtcggaacttgatagtgcactccctgtcactacaaacacggagcatgtcgaaggaggagaggacgagcgagatcaacatcaagtcgttggtgattcacattgggagggaaaacgtccctacggttaatacgcctacccggtggccggtacacgcccatctgcttcctgttcacacgatcattggaggcaaggc

SEQ ID NO: 17600 - DNA, 692 bp, Oryza sativa
catgatttgcaaacaaaggcagcatatcctgtgcaaatcttgaaacaccatttgtttgcaaatcttgcagatccgtggtgtccgttccttgccaccctgcttcttaccagtattgtcatccttgcttcttctaattcttttgcttctccccctcgaatgaatatcagttggtgggtgtatatcaatttcagtaggaattgtgcaaccaagaaaagactcaaactcctcatgtctagtatgcttgacattagacaccatttggtccaagggtgcctcaaggttgaacacactagatgttaagaagtcaatgccttcatctgagtgcttagccttttgtatgagatcttcaaatttgttgcgtgcaattgatattttctttctcattgccgcctccgaggagtcaattggcttctcttctataaggttgccttgttagtcatacacattctccctacgataacgatgtggttaggaaaccagtttcaaaaaaaaatagtgagtgtatgcactgtacaatttttttcatgaactgactaaaactaaaagattcaagcaaagagtatatgcacacattaccttttcactcttttctcccatctcttcatgatgtatgcagttggtaactcattttgattttcacctctcaaaactagaataatatgatgacacgggatcccatcggactcaaatag

SEQ ID NO: 17601 - DNA, 1248 bp, Oryza sativa
agctcatttctgtaaagagagttcttgggttgaattcacctacggtatatcacctgcgggcaactcctcatacatgttttcctcagagtgtatttctttttccagcgcagatgggtattgcttcagttgttcacctatatgtgttccctgcaaagccctattcgctattaggtaatcatcgttcacctgaaaacatttcagtgctaggggactatgccgccactgaccctgtggaccctgatgagataaaagatattagtcggcctaccaaattgaggcttccacagttggaaccagatgagataattgtgacaaatgttaaagagagtgttcgagactttgtaattggcagtggagaatatgtgagttcttgcaaactagtcctaccaagatttaaatctattctgttcttttatttttttacacttcataagattttcttcgtagagctcatatctactgctttcacccctccgaggtgtgggcttctcactgtgtttcaccatttcttttttatctgcttcacctagtttgcacgtgtttgccaatattcttattatgttttgtgtttttctttatctttaggtgataaaagatctcaaattcacgatgaagcaagcagtgcgaccagtcgggaagcgctttgagaaattaatgaagaagaagggcaagttcgggcaaagccgtgatgacaattgggtgagtacctccacgccacagagagcaatccatgggatcgatgatcctctcatatgcgggagctctagtgacagtgggatcggtagaggaaaacggcaccgcagggacgtaagctcagctggtgttgtggacagttgggaaggcagcgaccagacatcagatgggtatgtcatacggggacgccgctgggaaatcaagaaatcatgatattcttttgtacaggagctacggaatacaagctgggttgctgactcgctggtaaattttggtgctagcgtacagctcccgtagattgcttagctacttgtgtgattgattgtttgatactgtacaggtttctcgttttctatctataggtgcggtcagagtattgtaagtgcagaattccacaaattgtgccatgcttcaaggggccaagtgtaattgagttcctttacaaagtgcaaggtattgtaccagaacacaagtacacaactccctctgtaatttcgtgaaagtcgctgacacgaactggatgtacgccaaggtaggacacttcatgtgcactcg

SEQ ID NO: 17602 - DNA, 1362 bp, Oryza sativa
agcaagatttcagtggacaattttccttctgatttttgaattttgttagcagaatttattttgctctctggaatttttatagctcttgggaagtactccatgagaagtaaccatgaggtactccctagaatatactagggagtatatacctccctattaaaccggaaaaatactcaatactacgccacgaactgcattcaactctttccactcttgcacagttgtacattcattcaagtgcaccggaaaaatactcaatacaacgccacgaactgcattcaactctttcaactcttgcacagttgcacattcattccaagtgcactcttgctcattcattcaattgtatggaggccaagaaaaaggcaacacagaagatcagtacattgcatactagcaccgaaacgagcacttcacctatatgtacctaatgtacctgctacttcaacacaactatatctattatgatggatcaacacaggacatttgcctgaactgcatcgacaaacaacggtcagttagcaaaactccaaagtcagaacttccccacaaaaatttgatctgcaagcagcatttgcccagaacattctgcattgatctgataaattataaccacctggagaggagacccttgtattttacaagctgtgttcactgtagtgtcagatggaacctctatgccaatgcctatgaaactttggctctttctctagacaacctttcctcttcggcatgcctcagggtctcatccaaagctcgcagggaattggaagagtaactttctagggcttcaagaacacgcttcaaactaacctgcacactgtttgcctcaagaaaatggacctggtacgtttgtgctgttggaagaaggctttgccggcccggtactagagctagctttctgttgagtgtgtcggcctccttgttaatctccagggtcttcctttccaatatcttgttccatttttctctttcccggattgcaatcagctgttcagtttgctcaacattttgtttctcccataggctccgtacactagacacaagagcttgcatgctggtaatcacctccttctcagaaatccgatccatagcttgggaccagctattacagatgacaaacacaaggggtgcgcccactcttccaggagaatacggaggaactccatcagccgtctcctcctgctgatagttaagacagagtgccagccatccattcagtgccttgatgaagctcctctgctcattcacccaggaggaaaaattgacgatccatttaatcaactctagttcaagctccattgccagatctcgactggttccaccagaaattattgaatccaagtttttgggctgcaggaa

SEQ ID NO: 17603 - DNA, 768 bp, Oryza sativa
gtcaaatacacttttgccatagagtacccaaaaaaaaaagcaattctagacgtacacatgactgtttgtgatgctttaacttgattaacttaaatgtgcataaatcatttttgttatgaaaatgtgtcaatttctacagagatcaatttagtgcactggtacataattaccttcagaattaaggcagttactttctgatagacatactacacatgtggactgacattacaaaataaaaaaaataatgggtaaagacaaagctaaatcagactatttgaataaatgtcagagggaaagaatagagtgtacccttggattaaggtattaacttgtggccataactcctcgtcccttactctgtttatctttttcgacaccttagcaataactcgcacagctatccgtatttttgttgatagcttcctaaccaaattacgagttgcatcaatcttgggagcttcagcgcctttttgatccaagaatttcagcctcttagagttcttggcaagcaggagccgcattttctcttcagcctggaagaggaaaacagcaccaaaacattcaatacggaatagagactaccaagggtgagctcaagcaaacaacatgatttccccaatgtagagcagtaattcttcattgatgggttcctcataggattattagtttacacgtagggtgataatgatatgaaaacaaaatataatattgtcctgttatgctacaagggaacctaaaaaggcatggcagcaacagggctgcaggaat

SEQ ID NO: 17604 - DNA, 618 bp, Oryza sativa
atttgctgttcctctccatgtgtgtgtagagtgtggtgttcgagacgtaccacatccagggcggcacggaccggacgggcgtcccgaccaagatgatgtccgtcaacgcgacggtcaggctgcgcttccgcaaccggggcaccttcttcagcctgcacgtcacctccacgccgttccacctcttctacgacgacctcaccgtcgccaccggccacgtacgtgccctttccaccaccccaaccctcgcctttctgctcgtacttctacctgaatttgcctatgccatcctcgttacgtttggtgaatctgaatggattgggtaggtgatgcggacgtttccgtgcctgattaggctggcgtaaatcgatggtagttattgctagttactgcgtaacaactcacaaacaaacgggtgaatcaagagttggatctgggctctgtacaatggatcagtagggttgtcccgattattcgtactgtgctcttcattactaacatgagttctatcacgactatagtggagtactaatctcctatgccattccgaccgtgatgccagcagtccgtggaatttttgccggtttagatcagcttttgagcatccccatgaacatcata

SEQ ID NO: 17605 - DNA, 673 bp, Oryza sativa
agaacttagaacaaatttgtggcagtttttttaacaattttattaaataaaaagggagtcctccgggttaataatacttgtcgttttggacaagagcacagtcttaaaaaacaactttaaccactattttctattataatatactatatagaagtgttaacaaatatatgattttattgaaggatttttttaatactaatctatacatataatcatcatatttcgaagataaatattttaaaaattatccataataaaaataaaatttaactatatctttatctaaaacgacaagcattgtaggaagctctatgttgacagttattcattttatacgtgcagggcctttgtaccataacggtatgtaccatttgttctacaagtacaacccgcatagcgcgctctgggacatcggcaacctctcctggggccactttgtctccggcgacctcctcaactgggccgctctcgacaccgcgctcgaccccacctcgccttttgacgccaatggctgctggtcgggctccgccaccatcctccccggcggcctcccggccatcctctacaccggcattgacgccggcaaggagcaggtgcagaacgtcgccttcgccaagaacccctccgatccgctcctccgtgagtgggagaagcccgcgtacaatccggtcat

SEQ ID NO: 17606 - DNA, 1387 bp, Oryza sativa
gggagttattttgtgatgtatgttgataacatactgatatttgggacaaaccttaaggtgataaatgaggttaaatcattcttgtctcaaaattttgatatgaaggatttgggagtagatgatgttatcttaaacattaagctaattagaggtgagaatgggattacactcttgcagtcccattatgtggagaagatcttgaatcgctttggctacattgatagtaagccttgtccaacaccttatgatcatagcttgttgcttcgcaagaacaagagaattgctaggaatcatctggaatactcccaaatcattggctcgctgatgtacctggctagtgcaaataggcttgatatctcctttgctatgagcaagttgagccgttttgcctctaatccgggagatgatcactggcgtgcgcttgagcgagtaatgcactatctgaaaggtactatggaattggggcttcactatactgggtatcctgcggtactggagggttatagtgattctaactggatctctgatgtggatgagatcaaagccactagtggatatgtcttcacactgggtggtggtcctgtttcgtggaggtcttgcaaacagaccattttgacgaggtcaactatggaatcagagctgacggcaccggatactactactgttgaggcagaatggctgcgtgatctattaatgaatctgcctattgttgaaaaaccagtgccgactatccttatgaaatgtgacaatcaaacggtaattgtcaaagtgaatagttctaaggataatatgaaatcgtctagacatgtgaaaagacgattgaagtctgtcaggaaattgagaaactccagagttataacgttggattacatccaaacagctagaaacctggcagatcccttcacgaagggactatcacgaaatgtgatagacaatgcatcgaaggagatgggtttgagacccatgtgagttatactatggtggtaacccagtctatgtgatccgagatcccgtgaattagaacctaggaagaacaaaccattagtaaactagaggagagtaccaatctataccctctctaagtgaagatgcatgtactctcgtgagcagcaaggcaggttggctatgccttaatgagttctgttggctttaattagcaaagatgctgtcttgcagagcattcttgaaagacatcacctttgtgagcttaactgttagtcacagtccgtggagattttgggtgaatattctaggaagcttagtaaagacctaggagtatgacttatacgctccacccaaggggtagtctatagacggtctagtaccagataagactcttagtaaaacttgcatgcacaagacttgcaattcaaggcgtagtccattg

SEQ ID NO: 17607 - DNA, 3223 bp, Oryza sativa
attcctgcagcccttgtgatgtatcagtttcttaattatttattcaccttttgaattatggagtataatgatttcgcaggcattaccatgtattctgcagaagacagaagctttagtgacaacatgaatcctactgtaggattcaatattagaaaggtggccaaaggtaatgtcacaataaaattgtgggaacttggaggccagccggtattcccaagcatgtgggagagagattgctgtactgtttcggcaattgagtaatttattttcctgtctaattactaatttgatgcatgtgcaacatggcactatactcagtagtagttgtcatgcactcatgcttaattggctgttggttacatacgctaaccaattgtttcgaagacattttgattaatttgacctctgctgaaattaggcaaatttccaaaagcacatttcagtaggcgagaccatatctgccctcctaattttggctgtagattcaaacagaatgctaagtggtcctttatctgcaacttgaataattatattatctttttaattaatttaaaatcatccaggattattgggacaggaacattctgatgtggaaccatttttctagaggagaaagactacactgcagaggatgtcaaatttaagaactcaactgttggaattaatggatgggccttagcccacacgaagattaattctttgtaaaatcacaaaagcccacctcatgagatggtatgcatgtggagttttgtaccaccttgcttattctaggagagggggacctccttaaaagggaggatgcccttctagccacttgaagcatgtgtggtggagagaagagggggaacacacgcgcgcgcttgctggcctggcctggcacggcaggcggcgtgcgtgcacgtcgaatgatcagcaaaattggctccttatgcttacgcagatgcagcctccttttgcagttttgttttgttgcggaaaattcggatttgttttcttttggaaacattccgaaaaatccggtgcgtgaaaacggcgtggagtccggataagtttcgcacgacttatccggttcggttacacggagtggagatcgtgcgggcgccttgatcaagcaacctatctctatataaaccgagccgccgcctacacgcaacacatacgaaatcaatttatggtttgcctcctactctgtgctgcaccgtcgctcgtagactactccatcccgctcgccggcgtgcactggcgatcaggagagcaggtctccggaacctctgccttggacgtcctgcatcgggagaaggcggcaataaggtttttgaaagcgcttcgcgggactgacgactcgccttcctcttcgctcgcgtgctgcgcgccttcgtcgacgcccgcaaccgtgagtagttcctaccgagcaaccggtctttccgccaccttggtacgtgttcgacatgttgcgcatatttgatatgttcatgttttactgcttagtttacatgtgtagatctaatgatgcgttcatgctagtttacatctgcaatgtcataatttatttatgaaataaattaaatcattatgtgcttataatttcaataactccccaggtgcttaaattttgcttgttccttttttttttttttttttatgaaacttgttcgtgttccatggagggatgcctatgcgatgagtgcaggaagctgatataccagtgtggtgcatgggtaagtgcagacaaatgcagccttagtaacaacagatatatgtgtgcctcatacaattccaggttcttgatggcaggttaaatcacttcatcatttaagagttttagcagcagttgatatcgtcgtcgatacgaggtgctttgaagcggataaatttttttatgtgaccatgacagggaagaagcagagtgatgtggagctcaatgattttcagaagtatgcctgtccatttttgcatggtgcgtgaattctgatttttattagccttcagaatttttttactcggattgttggaaatgttaaaaatctaagactgggattggtttgagatgcttgtgcacgatagggtgattgatcttgtcagctttgtagatgttgtacatttctttccagaatatgatgaaacctaaccattgttgagtgtttgtcacagactttagtctatttctgtctcttaaataagcatgttaagtatacacctgggtcctgaaaacctatttcttgccatttattttcagggaagttaactgttggaaatgatcactgttccttcataggcgtcattgtcaacataaaactgccagtggtttatgcatagataatggtaattaaggctggccgttttcaatagactgatgtaagtgtatccgttcttgcacccaatacagaaacctggaactggagtattataacgacggaaaattttggtctgtgacattcacattcctttgtagcagtttgtgtcttcctgcgaattcttgaggtgtctgtcatacacaaaagtgtctaatactcagaaattgatgttttggatctgtccaaacatgtattgccttaacaattttttggagagttcaggccatgacaggttatgtgtattgcttgtggtcttctgttcgatgaacaaactaatctctataatttgtactgattgtgatcgcagttgtgcacttttgttgtgatcatggatgttttcatgcatagagagaaggaaatatttatttatatacctacttaaaaaatagctagggagtgtttctgtcttgatctcgtttcatctgttgtctgtctcggcagcgcctgtttagtccggttggcgagtcgtgagcgattggagagcaacaaacgagagctgagtcttgacagtctaacaaaaatgagtccatgtctgctttttcttggtaacacagggacattattgctatatagaaataaaatttttggaggcaagtttaggaaatcaaggtcccacatctcgttcgcatgcaattttcctgtcatctctctggttactgcacggacacagcccagctcttttttttttcagaagaagaaccaaccactataatatatcctgtagttctcttttatggtgaatcttaaaatctttgttctatacttcgttaccaaaacttatattgtattaacataaattgtattaacttatattgtattttttattaaatattaccgtatcgttagcacgggcaaattactagttatgt

SEQ ID NO: 17608 - DNA, 1549 bp, Oryza sativa
gtttttgagtctaataaagtagtcgtgtctaaacatagatattttattggtaaaggttatgagtgcggaggcctgttccgcttttccctttctgatttctgcaataagtctgtaaaccatatttgtggcagtgtggatgatgaggctaatgtttggcactcacgtttatgtcatattaattttggcttgatgtctcggctttccagcatgtgtttaattcctaagttttccattgtcaaaggttctaagtgccatagttgtgtgcaatcgaagcaacctcgcaagcctcacaaggctgccgaggagagaaacttggcaccagtagaactcctacattcagatctttgtgaaataaatggggttttgacgaagggtggaaaacgatatttcatgacgttgattgatgatgctactagattttgctatgtgtacttgttgaaaacgaaagacgaggctctagaatattttaaaatttataaggcagaagttgaaaatcaactctagactattttaaaatttataaggcagaagttgaaaatcaacttaacagaaagataaaaaggcttaggactgatcgtggtagagagtttttctcaaatgagtttgacttattccgtgaggaacatggcatcatacataagaggacacctccctattctcacgagtctaatgggattgccgaaaggaagaaccgcacactgactgacttggtgagtgggactgtaacaccctgcctccaaaatccgcattagtccgctctacacgttgagcagacccacgttcgcatggtatcccgattacgctttcgtcctcgcttcatgtaaaagggttaacccggggataccatggttggagcaccaaggcttataagcaggccctcacccacctaaacttccaaggtggtactaaaccaccactacacatccacttctgggccacatgggccaaactcacactactgacaggcttcaaacaggctggggtgttacagggactacctaaggcatggtggggggaggcattgttgacctcgaatcatgtgctaaacagagttcctaacagaaataaggacaaaacaccatatgagatatctattgggagaaaaccatcactttcttatttgcgcacatgggggtgcttggcgaaagtcaatgtaccaataacgaagaagcgcaaacttggacctaagactgtagaccgtgtctttctgggatatgctcatcacaacattgcctatagatttttaatagttaaatctgaggtacctgacatgcatgttggtacaattatggagtctcgtgatgctaccttttttgagagcttcttcccaatgaaggatacacatagtagttctagccgaccttctaaaataatttatagttcaatctcaccaccagaacaaactgaacatacacatgaacatgtcactgaggaggatgacagtgaagctcctcgaaggagtaagagacaaaggacggctaagtcttttggtgatgatttcactgtgtacctcgtggactgacactcctatgtcaattttagaagcata

SEQ ID NO: 17609 - DNA, 1898 bp, Oryza sativa
cagtctgggccaagtgtgcttctcctttcttcttctttgggtgcggacactggttggaatagtgaccatactcctcgcagttgaagcatttgatgtggctcttgtcacggccaccgccgcctgagccacttgcagagttgccgcgagcggcgccaccgcgcccacctgcgccacggcctcgcccgcgtccgcgaccgctttggccgcctttagctccctctccggaagctttccctttctggggcgacgatgactccccgccatccttcttgaaccgcgcctcccactcagcctgagtgagaagaacctgcccgtcggtggtgactccgccggccgctgccttcttcttacgcacccgttcctcgtaagccttaagccggcccacagcttcttcgaatggcatgtcatcaacattataaaactgctcaatacctgtgacaaggttgacgaatttctccggcaccgtgtcgaacaacttcttcaccatcgcggcatcactcaacgtcgagcccaacgccgagtggcgcacgctcatcgtggtgatgcggcctgcgtactgatccagggtttcccccggctccatcaccatggcgccgaattcgcccttcagcgtctacagccgcgcgtcacgcagtcgatcagcacccacgaatcttgtcttgagacaatcccatacttccttcgccaatcgtttctttgccacctgcatgaggagatcctctggcagcgactgcagcaggtgcgacttcgctttcttgtccttctgagggtcgacggccgccccggccgccggttcaatcacctcccacacaccctggtcctccatcatcgcctggacacggatcacccaactagtgtagttggtggccgtgagttgtggatacaagaaagcgctccccgagctccccctcgccggatccgacgttgccggaaccaacgccatggtgtcagaccagccctcaaacctgggtgctctgataccacttgttagcgctagaccctcgatcgaacaccttgcatgcgtactgcagcaatccggcacggcaacgaacgagattcagaggaatacagagcagaacaagaacacaggaaattgagaagtttcagagaacaatagcagataggaaatttgtggggctaaatttctgtggttttcattcactgaacagagtaacatgcaactcgaataacagtacaaaaactcctacttatactgcacacaaaagaaagaatccgaggctcaaatcgtgccatcccacgatccgcttttctctgaattcgacgactcacgcacccacgctaaactcacgcacacgaatgctaccgacgcggtcttcttctgactcgatcaccgcatcattcgcatctgctaacaaacacagatttattccttcaaccgttgcaactgcaatcaccaggaacacgttggggccacagctgtaataacaaactcaacagtcgcctctgatttttggcagctacctatgcaccatgtgcttcagctgacgctggtctgccgtcgtccgtcagtcaccatgcatgcgtcctggcatcgcatctgcatgcacaaagaaattgatgtagaattgatcatcatcggtaagcaatagaaactgatctaacaagaggaagatctgtgagagatgcgcaaagaaaatggaaagagatcaaacgtcaggcttggtggtggtgcatctgcacacaggcttgccgacgggatctatcgcagtacccacgtctgcgaaggatcaccgctgccggttcctagaaaacactatgcccatggatcgcggcgtcgccttcgacttgccgtagatcctgtgtcatcactgccgtttttggcttcacttgacaaaatctgaaatcaaatcacaacttgttggtaaaataaaataaca

SEQ ID NO: 17610 - DNA, 655 bp, Oryza sativa
aagggagcaaggtgcaacggctgttcgatccacgtcgcggtcgcatccacgtaagtcgtgatgtcatatttgaagaaaatgttgtttggcagtggcttggagatgcaggcgagcaagtctccgttgaatttgatgttgaagaaatcgttgagccaccagccggctcggcgacatcgctgccaggcgcgataccgaggtaccaggcgccatcacccggcaaccgtcctggcaaggagccggtggtggtagaagaggaagcttcctctccggcaggcacgatggaggcgtcaccgtcactgccgaccactcctgctacgcctatcggtgaacagagtacaccgcactctgctggcgaaattgacaccgatggtgctcctgttcggtacaggcacattgccgatattatgagagatgcgcccagggtggacttggttgacgatgaacaagatggtgaggcattgcttgcagagatggaggagctgtcagcttaccatgaagcagccggtcacccggcgtgggaggacgccatggctatggagatggatgccattgagtgcaacgggacgtgggaactcaccacgttgccagctggccacagggcaattgggcttaagtgggtttataaactcaagaagaacactgcgggagaagtgat

SEQ ID NO: 17611 - DNA, 646 bp, Oryza sativa
aattcctgcagccccagctactcatcgacctgcttcttaacctctgctagctcgttggctgccattctgtacggtctcttgtaaattggagcggttcccagtgccaagtcaatccggaattcaatctctctcttgggtggcatggtagtgaggtcttcgggaaacacttctgggtactcgcagactatgggaatctcttccaatttcctcgaattcttctcctcggtgaccactgggatttccacctcaatctgattcaaagagaccccttgctttggtgagattggtgatttgtacactactgtttctcccttctcgttggtcaaggtgactgtgcgattcgcacagtcaatgactcccttgaacttggtcagccaatccatcccaagaatgacatctaggtctttggattccagaagaatgaggttggctagaaatggtgatctttggatttctattgttatagaagggctgaattgtaccgaagtggagctattccctggggtatgaacccgcattggtgtgctaagttcccctcttattaacccatgcatcccgacaaacttctttgaaatgaacgaatgcgttgcaccagaatcaaaaagtactgttgcagggattgagttaacaagaaacgtacccagta

SEQ ID NO: 17612 - DNA, 673 bp, Oryza sativa
aattcctgcagccccacggagaagtatgatggcagcatcaatccctccgagttcctctagatctacaccacgattatcgtggcggcagggggcgacgaccgggtcatggcgaattacttccccatggccctcaagggtcaggcgcgcggctgtttgatgacccagcctcccgactccatccactcctgggaggatctgtgccagcagttcgttacgaacttccagggcacatatccccgcccgggagaagaggcggacctgcacgctgtgcggcggaaggacgaggagtccctccgctcgtacatacagcgcttctgtcaggtctgcaacactattccatgcattccggcccacgcggtcgtgtatgcgtttcgaatggcgtgcggcataaccgcatgttagagaagctcgcctccaaggagcccaagaccaccgccgagctcttcaagttggcggacaaggtggctcggaaggaggaggcgtggggaactctccagacaccggtgcggcggccgcggctacccccgagtctgccccccgctctaagcggcgagataggagaggcaaaaggaaaccgggccgctccgatgacgagggccatgtccttgcggctgatgggcccgcacgggcaccgcgcaagggaaaggccaccagcgacaagccgagctccact

SEQ ID NO: 17613 - DNA, 690 bp, Oryza sativa
gaattcctgcagccctaaggaactcgaactccttaagtgtgtcttacccgataaatttgtggccgggtgcattattgcgaagctacctccatcttggagaggtttcggtactgcactcaaacacaagagacaggaatactccgttgaggggttgatagcgtctcttgatgttaaggagaaagctcgggaaaaagatgccgcgtctaagggcgatggtgggcagtccactgccaatgttgtgcacaaggcccagaacaagagcaaggggaaacacaaagctcaacagaccaccaacttcaagaagcagaagaagaacaacaacaatcctaatctggatgagaggacttgctttgtgtgtggccaacctggtcatctagccaggaagtgtctacaacgcaaggggatgaaggcacctgcagggcagacttctaagtctgctaatgtgagcattggcaacactggagatggaagcgggtatggtaatttacctactgttttttcagttaatcagtctactaattggtgggttgatactagggccaatgtacatatttgtgctgacatctcattgttttcttcttatcaagtcgcacggggttccaccgtcctaatggggaacgggtcacatgcttctgttcatggtgttagcatggtagatctgaagtttacttcgggaaagatcgtgcagct

SEQ ID NO: 17614 - DNA, 2299 bp, Oryza sativa
tacacgttcaagccattttataaaatttgtggatcaaattgccatttttcatccttcattcccacacgtctctctctcatctcttccatccacagctggcctcaaatccatgcgcctcctcgcggcagcggggatagcttgggcaccagcagggagagcggacatacagcaaaaatgcgaaaatgattgaaacaatggacaccaaatcggccaaaaaagtgaaacctagagaaactgatggggaaagaatatttccgctttgtaatttggatggatgcagaaggaaatatccaatcgtgttagcttgctcatgaacagatcagcagagcgcccgttcgtctgagagccatcgatccaaacatacaaagcacccgatacttgatacttctcactgaatcaaactagaaaataaaacagaacaaaagaacaacaatccaggaaaaaaagtgatatttttagggagatatgctgccacattgggttgacactcaaatttagcatttgtttggatttatagcaaattctcattagatttggaaactaccgagtctttcccgtgaaagcggtcggtccgccattgtgtggccagttagacctcatgtgtccaggcggtcagaccttcagcacaaagttcaaatccaatctagatatttcttgtattttcttgtttgatacaggatttctttaagttctaggtgatttctaagcttaattgtacttggaaacaaccctatgctaagggccgaccattttgcattaacactgctgcaattacaaatccactagcatcagcctccaatacaaaaggttgtgagaaatcagacatggccaagactggggattgggccaattgaagtttgatttgctcaaaggcagcctgctgttatgaaccccaattaaattgttcttcttaagagcatcaaagagtgggcggcaaataactccaaaattcttaataaatctgatcctgtagtagtccgcaagacctaaaaatcctttgagcagtgtgacattagcaggaactggctgtcatgacccaaaaaattgtattttttttacagtctgccgtatccttatatagcatatatactaaatacttatatatatgtccataaggatacaaggcaagatgtaatgtctaactatcacaactgaagcttggacacctacagtaatggttccatttatttttcaccagctacatttcttaatacatcggttggtttactgaccaacttattatcaccaggacgattccctgtacctagcatgcaggtatatgtcctcttgtatgactctaaagactaagtagaccacactccccactaggtctgcatgtcaccatttccctctgacatctcatcttgactagtttctgcgcacatcaaatagtaagaatatatgagtatgttgtacatactcagcaagattagtacatatatctacatatatatttttaaagaaaaatactactacccatagatattaacagccgataaatagtaaaagacactaaacatagtgagttaaatacattctgcagaggtattaaaataaccgtcacaatctcgttccttcaatccattttttccgcaagtagtgataccctcgtctgagatcacgccgccaaattccctacttgtgtgaggcatttctcatctcacactgatatcagccgacccgatatcgttgtttcaggtatcgactgtctcaggctaagtatcagtgtgtcacaatcacgttattattctcactgataaaatcatcaatccattattcgggtgaataatatttactgttagattgttagcatcaccatctcaatataatacaggtaagcaaatttagttagagatgattaagtaaaatagttgatgggcgcagtcttgcctagtttctgccgttctaccagcgcgtcccacctagtcaaatatgcaaatctttgatattaattaatatctagattttcatgcatgataactactaacatactactaggtagctagttgatgtgactatactaaagaaagagaacctaacatgtagtagcaggtgcttgcatgttagtcgagcatgcatgtaactgctgctagccattaaaagtactagtcttttcactaatatatatattttcttctagtgcatttactagacactgatccacctattctatggctagacatcatgtgtttatactacctatagaactagccatatactcgtaaaaaaccaaagcacaggttccaggcattacctagaaggcttctactagctctaatctcccatggccctcgccaca

SEQ ID NO: 17615 - DNA, 1510 bp, Oryza sativa
taatatatttgcctacctatttatcatatgtctctgttaatctagtcttagcatatcaatttagctctatcggctgcttctcgttttagggcttctgccggtatcggctaaatcgatttgctagattatattagcttagacatctaccaccctgaaaactcagtcaatagcttgattgtctattgtctagatattatgtttctcttcatacttagtgctgcatcagttaagtttgatctactaagtggtgcttagaaccataatctctagctgcgtttgactgccaataagggtttcatcggggttttagccgatgaggtatctagacattgcatcggcttataaggattgcatatatatatatatatataagttggatttagctgatgacaacaaatgtttcactgttttatctaatcatttggattttatggcatcggacctccagccgatgtgtgctttaaccttcggataagtgtttattctatcatattattgttagtcgattggtttctactggattatattgctatattatattatcatcagccgattgccttcatatcattatctacattggacatatagccgatttcttacaccctatcgctatcggctggtatcggcatcggctattatcggctatcggctggaactactccatcggcttgttagccgatcggctgttttgatctactatttgcatatcttgtcagttgcaggatcaaactgactggtacgctcgcatctcatcaatctttggacctgcactggagctaagcagatctcccaggccggtgtgttcgattttttcgtcaacacttacgtatgtgcacaatctttaaaattatatttttaaataaaatatattactctacaaagtataaataaactaggtctataataaaaaaataaaatatcaaatcaacatactttaaatgtcactcttttaaattatatattcaatttatgatttggttgtatttgttaaattaaattgtagtgctaaatacatcacgagtcatgataccgacatataataattaatgtcataataattttttaaataatttcacatcatattttatggtgtcaaatattactcgacaaacacagaactctaatttaaatctatgtatgtaaaatgaaaaacataatttagttgtgtttttcagttagatctgattttattttatttttgtgtaaggttaatattctcaaagtttttaatttgtgttatttggtatttgataggtgaggagaatttccatagatgtgaaacattatcaaaaaaaatttccaaccagttatctttctataatacaaccccttaatccatcacgagaattatggtcatacatataggattttttttctttaccaaatattgttttggcaacagatgaacaatctaataagatgcgcattaaagtactattatatgtgtatatatacatatatatatatatatatatatatatatatatatatatatatatgggctgcagga

SEQ ID NO: 17616 - DNA, 1026 bp, Oryza sativa
cataatgatttgaccattattggacaccacactaaatgttccacccaatgctaagtttatctagagactttggaaaggtacagagaggtacaaagctaatcttgtacctttcagtacctccaaagaacagaaacaacactcttaaaatctatgctcttccaacatcttcaaacttgatgctcctcctagaggcctagaagctaagatctaggtccatggtggatgactgacccaaggtgaggcggaccatgtcctcgtgctcaggcatcacgtactcacagagaacaccagaagcagatgagctagatatggcaggaggcagtgaaagctgatctatgaggatatcccgcattggcatcatgttcagcgttgatggtacggcagtgctagtgatacattccggagaagcagatgagtttaacatggttggatgtagcatgtgctgctccatgtggatagccggcatctgcatgaggttcaccattgatgtggtggcactagtgataccggtcagagacggcaccgttccaacatgctggccacctgcagctgacggaatgtggatgcttggtatctcggatgaccaaatgagatcagccatttcctgcttgggcatatattgcatggtgacagcaaaatgatgtgggtctgagcacaccgctgctatccgagaagcatctcttgctggtggaaacaatgacagtaatggtggtggtcccatgggttctgggtagctaaatccaggaggagggaggaaccccgggatttccgatgacctgagggcaaacaccagcccacaatagatgcatgaaaggggattcccgttaccatggaccgccacaggtgaaacaacgccgtggagcctctggatatctggagtttccctcatgaaatgcatgatatcatggttgatgatcctgtggttggtaaccggttccacggtagctggcatagtgttctccatggcgagcatctgggtggtcggcggtgccggcgccggtgccggtgctatcgtagggattacaa

SEQ ID NO: 17617 - DNA, 3913 bp, Oryza sativa
attcctgcagccctgaatcccctgaatccctcctccacgatgatgccaatgcattcgtcaatgaagaggatgatcctggataggtgatcgagttacccaaaactgatccaccttcacaaccactagttgagctcaaatctcttccttcaggtattcactatgctttcttgcatggtgatatggagttgccagtcatcataagagagaagctttttgatgatgagacctccaaactcacagctgtgttaaaaaaccttcgctctatgctaggttactcacttcaaggcctcaaaggcattagtcctaccctttgtactcatcgcactcctttagacccttcttgtgtgccttctcgagagccacaatgaagactaaataatgcatgttgacgaccgttaagtaccaatctcgaccaacaactagcatatgaataaagggaaaattagcatttcttacacatataccaataataaataatgtagttgtattaggatttgagaattagcttggaagtaggaattatacaccaaagtgaaggagaaatgaaaccaacatgcaatgaaacacactatagattgagaggctcacaagtcagctcaaacggacttaaagtggggccaaccacccgggaatcgaccaagggcccacctggcagccacttaccaaaggtggtggagagagccgttgccgagggttcggccaaaacctgtcatagcagtgccacatctccatcgtccacgtgttgactcctcattggctcccaatggtgtttgtgggtgtttagcagccatataaccgtcactagtagcctatttaaggagttcactctcttcacttagaacacacaccacaaggagcaaatttcctcttccactttgtattctctatagttttagtaggaataaaggttaggagcttcagtcaaatagtcttctcggagttttgggtatgtctttagcactttactattcttgtaagaccatagttgaataaacataattatcttcttaatttatttatgctcatggtttatatatttctttattaaatatatgttctatgagcattatatactttgtatatctacatcatcctggctagtcgatccatgctacggtaacggtccaatgacctttatagctaggttgctctagcttcaagctgttcatcagtaggatgagagtcctgggagagttagtgatattatttactagcataagcatgatgcttaggttagataaatatcgttggatgcgggtgtgccccacggaaagtgaggtgggcagtaggtgggtatgatgtaagagtgtgtaaatgtcataactatgctagcagaccaatagggcggtagtacctgggtgcctggaactaagtcctatgttgtaagcatgtgtatgttaagtgtataatagacatgattagtatagaagtacatgtgtattgtagtttcctaaagctaatttccttctggatattcatatagaggtgaatctcctgtgtgttcactacctatcaattattatcctaacccctatttttcctatggtaaataaattatagattgattatagagatataaaccatatctttgtgccaccgctttccctgcagaaatataaatacgatgcccttggaaatacacatgggtgaaatgctacagcagtatccgtgcgcttgcgaatttatctacgaacataaaaaataccaacaagcatttctcacgttgttgccagggaagacactggttttaagatatagtttatatgtctataatcattttatgattaatgaaaccctagtccaaacatgtttacctcgatgtattttctcttttatgtgaaaataggtaatgcatcactagttttaacctgccgacagacttcgttgataatccagagaagcttacgagaagaatccgacctcgtgtcgttccttcgcaaattaggctcttggcacctgaaccagttttctttgcaccagatcactcgtagctgatggcgcagaagaccattcgtgagtagtcggctccctcttcttccaatgtgcacgttgggccaaccatccatacttgggatgcaaactttgagatcaagactggtctgatcactatggtgcaggccatcctgttctacgggaaggccaatgaggatacgaacgtacaactctagcaattccttgagctatatgaaactattgccatcaggctctgtctgtttctgttccatctactcgggagtgcaaaacaatggttctactccaagagaggtgccatagacacttgggtgaggtgctcaattgctttcctagctaacttctttctgatgggcaaaaccaacaccctttgttggagaatttcatgtttccagcaagccaacaatgagccgatgccagaggcatgggagaggctccaagattacaccatgacttgtccttaccatgggatggacaattggcttatcatctagaacttctaaacggattgatgcagtcagcccgtgaccatattgtcgctgctactgaaggagccttcttctcacttactatcgctcgtgcattagaactaattgagaagatggtctccaatcaaggatggagtgaaggtcgactccaatcttgtcaacggggcatgcacaccgttaaggagacaaacatgctcgcttcttagatggacctccccctaaagcgcttggatgaacgcgctcgacacaagtcgaaaatgtacggtatagtccaggtcttggacgtctgtatgacgtgtgagacctaccacaatactggacagtcgaggaatgattgccccaagacctgtgaagatgtcttcttcataaacaacaacaacgggtaccgttcacaaggagtctaggggtggaatcaaccatgctcatactatcaaggaggcaacaatgataacttcaatcccaattaaccctccttgaaagatcatgtctattgccaaaccaagataaatgagatgatgttaaagagactgtcatccagtggcaaaacattggagagaattcatgtcttaacagtgaaatttggcaagttagactcggatttggagttggatatcgaagcggatttcaaggagattggatcttaccaaaatagattacgcatcggctgacaactgttaacgactaaatttggtaagccatgaactaggttcaacagagtcagggtttgagtgagacaatatggaaagcagccgatacaacttgaggctcggtttggtcctcaattaagataaccatcattgacatacagagatagagctcatttaaggcaattgtatgtattaattaggattttaatgtcagtttgaattagagatatggtaagagtctgccattttgtttttatctttaggaaagttttagtcgtgtccacaatggacgaattttgtactctgggtataaatataaaccccagttcactgttataagggacgacaatccaaccaatacaactttcggtacatcgcgacccttttcttttactttttcgatgagttcttgctttaagtcgaagcatcggctacaatctcttgacaagaggtaacttgtctcgatggcttgcactatctgggcttttatatctttttaaatgtattagactattagtatttttgttgtggtcatcatttatcatatatcttagttaatctagcttagtatctcaacttagtcatatcggctgattcttgctttagggtttacaccggtatcagctaagtcgttttactagattagattagctaagatatttaccatcctgaaaagtgattaattacttgattgtttacactttaggtttctctatatactttgagttgcatcaaccctagtcttgtctagaatccaaaaaactaagctggaaataatcataattaaggataatatcggagtttcag

SEQ ID NO: 17618 - DNA, 15734 bp, Oryza sativa
aattcctgcagccctgggtcttctatggtctccccatcgtccatcccaacagcatcctcgtcgttaccatcaacggcattggcctcgtcatcgaggccgtctacctcaccatcttcttcctcttctccaacaagaagaactagaagaaaatgggagtggtgctcgctacggaggctctcttcatggcggcggtggcactcggcgtgcttttgggcgcgcacacccatcagagacgctccttgatcgtcggcatcctctgcgtcatctttggtaccatcatgtactcctcaccactcaccatcatgagtcaggttgtgaagactaaaagcgtggagtacatgccgttgctgttgtcagtggtgagcttcctcaatggactctgctggacatcatacgcgctcatccgcttcgacatcttcatcaccatacccaatggtcttggcgtgctctttactctcatgcaactcatcctcttgagctggtaagataagaatcaagataagaatcttgagctgccaaccgtcgcccctgtcgccaaggaaaccagcatcgtcacccctgtcagcaaggacgacgacatcaatggcagcactgccagccatgtcataatcaatatcacgaaggagccataagctagttaggtgatcgaacaagtctaacgctgtaagctagttaggtgttaccaatttctacatttaggtgttaccaatttctacattcaagtcatagtacttttttttagtaaccaatgtaattttgtgttttttatctatttgtgaagttgcgattatatatattatatcctgtaattttgatttgtcaaatggattccaaaatttcggaataaaattttctagaatgttgtttgtcatcctcttcagggttgttaatagccgtgcaaaaggactagtagccaaacatgtcatggtgtacagcaccatgtgaccaataaatcagcacgagcaaccatgtccataccgtctagttcagagcattgcgcaaaatctctacagagaaacatagagaaagacagttcttaataaaaattctaggtccgtgggacctaagactacgagattatatcgatcgcctgctctgccattaccttagaaacgaaaccttcacgaatatgtgggcatgcattgtgggttgtatttgagaaacttataaagacgtaatatcaaccgaataacacatgtcatgctttaactgtacgattctccacaaaatttcttcgtcatcattgcttaaataatattttcaaactatttttagttttatactctactactagaaaaaatacccgtgcgttgcaacaggttgtaaataacatttattcaaataaattaaaattctaaaccacatatcataattgggcataaatgataaaaaaataaatatcataaaaattatataactaaatccttttttttcatttagctataaataatttaattcagaggaaaattataatcaataaattttaatggatcaaatagagctgaaactaatattgtaaatagagaaacaactgaaattagctataaattaaaaaagaacttattttatagtcagatgaaaattcgaactgatgcaattttggtcactaaatcgaattagcaacttttgagaaaaatattagctcatcatcctaccaccagagacattccatttttgacagtgttctcatcgttgagattaaaaatgaactggaaggtaggaacaccgcaaatataagggttaattagatccatgccattaaaattttagcagttttgaaatataccattactataacgatgccactgctacttgtttgaaatcttagtggtgccactgagatacgtattttacatgtattagacgaaaatgcgctcatcttctacctctctctcttccccatcttctacccctctctctcccctcgctgcgccgttcattccgtccccgctgctcctaatgatgctcgtgatgccgccgctcaccgccgttgcagctcgccactgcctccgccgtgtcgccgcagccactgctgccgcttgccgccgcggccctgttgctgctgctgctgccgccgctcgtcgcggcgccgtcgcatgaacgtgttcggcaggtggcgaagcctagtgacgagtcgtgtcaccgaagcgcggtgaagctcggcgagcgacggcgaaccgaggaatcccaggagctcgcaccgcgtctcacccggcgcaccgtcggccacaagcgcgagcgccacatggaaggagcaagcgccccatggaaggacagcgccgctgacgaggaggttcaccgcgccatgctgttcccgccgctgtccctgctgccgcgcgccgtagcttgctctgccgccctcactgttgccgctagctccgccgctgctcgctgctgccactcgcgccgccgtccccgctgctcctgctgctccaccgccgtcgtcgagcaagaagaaaggagaaggggaggaaggaagaagaagaagagagaagggcaatttggtccaaaatttattggaaatgcatctaaggggtaagcagtggcatatctggctcaaacatatgtaaaattataatggcatggtttcaaatacacgaatgctggtggcatatttcaaaattggtaaaattttaatggcatatatgcaattaacccaacatataatggatgatgtgtgggagggaggcccgagcagcccaccaggcccaacattagcaaaaccctaatccaactccccttttcagccttctccatctcattcctcagccgcaccggcacaccccgcaccagtgctgcgccgcttctctttcacaccgcgctcgccaggacgatggcatcctccttgcatcatgccgctgccgcgccaacattcttctccttcttcatcatccacgcgccacgccgccgtcaatcgtccctccccctagccatcgacatcagcccctcctcctccatgttgttgtgccggtcaaagccgatcgacatgcggtatttggggagggtagggtgcggcaggaggtggtcgccttcgcctctgtactgtcccatggcacctgtttcaagaggtgaacgcatggcctatgagaagaaccgccgttcaacgatattttccacgcctacaatttgtgtgatttttcttcctcctatttcttctttcgctagggttctccatcgtttatctgtgttcaattggaaccgctcgattggattctttccttgttctccccttctagaacatgtagttcagtctgattggataattttttcagggttctcttagttcttgtagatatgcccgattaaaattttataatagggagggaatcggacggaaaaatagcggaaacatcgcaaaaaacacgcacggtgagcgaatcagattgcgcaacgtacgaaaatacttgacaaaaacatcttaaacttttataatatataggtaaagataaagataatatctcttatatactaaaagtccactaaactttctataaacactactaacccatcacgtggtatttctatggacactttttaattgtcacattctaataagtcggtggtccttatctttagaaaaaaaataccacaacccacctcttgtcgaaacaagatttcagcaatactaaaagggggtgactatcaagctggaaaagtggatgggttgaaagacaaagaattttatacaggttcaggccttcttaatcaagaagtaataccctactcctgcccggggattgatccgccgagtgtattattgatcgtatgatctgggagaaaaacgtgccccaaaaggcacccggacacctccttatataggggaagggattcgtattacaaaatacagtccatatccctaacggaataggtagttacagataagattcaatcctaaccgactaggatcccgggtatttccttgacatacaagtttggaatttaacccaagtccctttaaagatattctatctatacatggcaccccatacccagtcggactatacataccgtgttaggtatggggtatccataatctccacagtagcccctgagacctttacagtcgacaaaatagtcttctctcgtaatccaaacgataatccgagtactccgatttcttctgccttgatctcccgagtaccaaaatcaaagactgtgaagggctaaaaatagagaaaatcaagtgcatcgatcagatacacctaattaggtgtagacctgactatgtgattagttaaaaactaagcgtataatcaaggtgtaaacaatatccaatcaagtggttttacaaccggatcatccatggtatcatatagctaagcatatgcgacgtttaataaaacatccagccgactactttagctttgatacaccataaaaggagatattaaaagacccgagtgaaaaacactctaaaggtctataaaccaacacatatgataagaatccgagtaaaaactctcaaaaaagatccatcaaatgtggcataaatcataacaataggtgagtctaaattgcctgagctataactcacaccatatcaaaataagcatataacatgccgagagaatgactattcaaaaactagtcatctcaacaaaacccgaacagcttttgcagcctaaaaaggcttacaaaattagtataacacctttctgttgggcacctttttatttgcatcgtagtaattccaaagaattatctaactgcgtcaaaaaggattttaacagcattgggctataccgtcgtgagcaagtgttgctgaatcaaaatgcctaagtccctaaggatcacaacttggccacgtcgatagccaaatttaggcctaggcccattagtactcccgataacctaatgaaataacaccgaaagcaaagcgtcggttcgtcttccccgccgaaactctcgccactttccccattctctgctacagtgtcagaccacaccggcgaagttacggttcacagtttcgctccaatccatccaccaaagctccacaaaattctcccacgcaaccaccgcatcaatctcccatccattcccagccacattttgaaccaaatcacatcatccaggccacatccatggcgaaagagagagaaagctttgagagtcagtgggcgtcttccgatgtaacggaggagaacctgaaggagatggtggcgcacggcgtgcttccggcaaatgagatcatcgggtggcgtccagcgtgcggtgaaacgtttccgacccccgacacacacgaggtggtggtattctcccatttcttctatggcgggttttcccttccgacctcaagtttcttccgagggattttagatttctatgggctcagtttgcatcacctaaaccccaattccatagtccacatcgccaatttcatccatgcttgcgaggcctttctggggattaggccgcattttgctctattccgtcgcatcttcttcctcaagccccagccaaataaaagcaaaccgtgcgtagttgggggagccagatttcaactgagagggaccttgagccaaaaatacttctccatgccatttaagacctcgaacaaaggttggcacgcgaactggttctatgtgcaaaaccccgagccaacgcttcctgggtactcctgtcttcctccagcatatcgcgatacctggaatcacttcctatgggagaagaggctgcccaagcgcttgacctattggatcgcatgctgaagcttaaggaacagggtctgcagggggagcaaattacccggcacttcatcaggagccagctggcaccattcaaggaaagatcccgaacagcttttgagttcgatggcaagcatgaccccaaccgagagaacccagttcaaaattatgcaggagagaatgtacaaaatcttctcgatgccatcgtgatcagctattcacacttactgccagtcgtgccatacaatgccttcaaccctcctccaccggtacgtatcatacatctcagcctttctcaaagcatgcttttatcttctgtaaggtcgactgaaaacttggaataccatgcacaggaattcgctttgatgaaatccgatgctccaatcgctcaacgccgctcacctcgccggcacactggccaagccagtggagggccgaagatcaagtcgaacgtccaacccaacacctcgaggtcaactaaccagtcagattctcgtaagaggaagttggtttcaagtgacgatgaaggtgatgacgcggaaaagacgggcaacaaagggtaattgggaaacaaccaaagcaagccaattcgaagaagaaaacatccagtcgtctcatgccaaaaataaggaaatcatccagatatgtgtcatctagctatttcccctgtttcgctaatcactcattattgaagcagagctaatagcatgtttcaaatttgtaggaaaccatctgacatagatccttttggaaaagaccccatgccgaatggcacggagactggtccttcagcagaaactgagccgactgccaaggaccacccgggtaataatcaaccggcgaccgacaatgtagataccagcaacgagcccccgactggaaattagtcggccgaagctgaagtcggcactgatcaggagcccccaactagaaactagtcgggtactgaacaaactagagatatcccagaagtagaagctcaagccaacagccctcccaagacgaacgctggcgctgaccctggaaccaactctcctgttaaggtgcaaggacctgcacgtccccgtccggaaattattacaggtaaacaagtcctccaaatctttccttgatccgacaaactttcttaaattgctttaccattattttgatccgacaaacttttttcaattgctttaccattattcatgaatgtataaggaccaatgatcggtgatgaagaagaggttcttcggatacaatcggctgaagattctcgcccaccaatattagtcaagtggtgggatgatgaaatacgatcacagggaattgtaataaataaacaaaaggaagacgaggaagtatgcctgctgaaaaagacactcggccaagctactcatcttgtaaatgtaagtctctttacacatagcttcaatcatcctgtcggccactttactgaataaagacgcacttgtaatgcagagaatccatcttaggaatgaggcaaatactgcaaccctcgagaaattggttccctaccttggaaccctggaagcaaccagagatcaactgtgtgaagcgaaggagcttgccaggaagactgagcatgaccttagggactggatcgccgagctccaggactccaactttgagctaagtggttcatcaaaacgtaactctcatccttatctgatttgtttcatgctgctattcatgtgcgactaaccagtggaaagcaatatagtgcaagctgccaagatatccgagctagaaaggcgaatccaggctctggagaaagacaaggtcgaacgggcaaaacagagggactcggctctgaaagacgtcgaaggtacttgtagctgaaacttcaaaaaccactctcatcttcatgcccagtcgttgatgtgaatttatttgtacagatcgcaaaatcaaatcccaggctcaattcgacgtcttggttaacaaaatcaagaagcttgaaggagccagagatgaaatcgccaatgccgctacgccactcgtccaggccatgtttttcaataacaatggtccgagttcaattgatgctgccaaaatcttcaacaagctgagaactgctccggatacatattttatgaacatcaaagaagctggaagtatgggggcgagtctagcgttggcgatgaccaagtccttgtacccgaagattgatattgatgccgttgatggcttcgcagacgggacaagtgaggaaaccgcccttgacctcatcagtgatgcgcaaaaagctgctgacaaaatagccgctgatgtagttgagaggttccgggacaacgatcttaagccgactaggtctgataactctgatgatgaaaaaactgaatctgattgattgtgtattctgatgataatgatgatgataatggaggcacaatttgtacaatactgatgaatttatgctgtgcttgatgatttaatctcagctccagatttcttaaaagtttttgtcaaaccttattgagcctagaacccgaagttgttaaaaactttcagtcctcattggctaagctaaaaaatcaaacaaggcaatgataaatcaagtaagcaaattgaattgataaaaatcacactccattattattatagtagcccccgactgataactgaaggaaaaacttgatgttagcagtcaaagaggaagatacaaaaagtaatgcctaagcataaaaacgacgaagatgttcgatattccaagagttgtcgatttgagtactgtcttcatgcttgagtcgataagaacatggctgagtaacttcagaaactatgaacggtccttcccacaagggagataacttgtgccgatctcgtgtagcctgaattttcctcagaaccaagtcaccgactaagaaagctcatgatcgaacattgcgattgtgataacgacgcatcccttgtaaataccgagccgactgaattagcgatgcttcacgggcttcttctagtcggttgagatcatctactcggtcttctccatagcactcctcgctgaaattacgaaatcgcaaagattcgaattctacctcacttggcaacattgcttccgcaccatatactagaaagaatggtgactgtcgcgtagcccgactgggtgtggtgcgcagggaccaaaggacggatggcaactgttctacccatttgccaacatagggatgcagttggtcaaaaacttgtgcttttatcccttgaagtaccataccattggcacgttcaacttgtccattgctcatggggtgcgctacggaggcataacaaattttgatgccgaagtcctcgcaaaaatctttaaatactccgccagtgaattgagtgccgttattagttattatccgattgggtaccgaaaaacggtgcacaatgttgataaaaaaatctctagccttgtttgccgtgattgtgacgaccggtttggcttcgatccacttggaaaatttgtcaacagctacaaagagatgagtataaccaccgatagcctttttgtacgggccaaccatgtcgagcccccaaaccgcgaacagccaagataacgggatggtttgcaactcctgagccggtagatgagtttgtcgagcgaaaaattgacaacattcacatgttcgcacaattttgtccgcgtcagatacagctgttggccagaagaaaccttgccgataagccttgccaacgatgggtcgtgcggcagcgtaattgccacagatgcctgaatgtatatctcttagcaattgtcttccctcctccaaagacacacaacgttgcagaatccctgatggacttttcttgtacagctcggtctcatgtatgacataaagtttgctgcgcctggacatccgctcggcttcatctttatcttgagggagctcttgtttagtcaaaaatctaatgaggggctctctccagtcggcttcaatcatgcctacttcttgagtgtccgtggcctcgattatttatttccttggtatggttggctcataaagatattcaacaaacacgtcggaaggagctgcttctcattttgaaccaaaattagccagtctgtcggctggctcattattatgtcgaaggacatgggttagctcaaggccatcaaatttatcttctaacttgcgtacctcctgacgataggcggtcatgttatcatcaaggcaggaccactctttcatgacttgattaacaatcaactgagaatctccacgaactatcagacgccgaattcccaaggagatcgcaatccttaatccgtgaagtagtgcctcatattccgccacgttatgggacgcagaaaaatgtatccataatacgtagttcaacctctctccagtcatggagattagaacaacccccgctccggtgcctgaaagcctctttgacccgtcaaaatgcatagtccaatactccatcttctctgtaggcgtgtcttcttggcactcggtccacttggcgatgaagtctgctaaagcttgggacttgatcgaagttcgcggcttgaaggatagatccaaagacatcaactctaaggcccactttgcgatccgcccatttgcttcgcgggtgtgaagtatatccccgaaccgagtgaccttgaaaatagtgggataatttcctaacggtaatcaaaacaccatacaataacttttgaacctgaggatatcttatcttgaagtcggccaaaacctcgctgacgaaatagattggtcgttggactttttgaacatggccttcttcctcacgctcgacaaccaggactgtgctcacaacctgggaagtcgctgacacgtataacaacaacggctcttgcggatctggtgaagctaagactggtggagtagtgagaagtttgttgaagtcttcaaaggctttttgtgcttcgggtcccctctggaagttgtcggttttctttaacaacttgaaaaagggcttcccccgctcgccaagtcgtgagacaaaccgactgagcgccgccatgcatctagttaacttttgaacatctttctaggaactcgacagtttcatgttgaggatggcgttgattttctccgggttggcttgtatgcctctatgggacaccataaagccaagcagcttccctgacgatactccgaagatgcacttttcagggtttaatttcatcctgaaagcacggatgcccgcaaaggtctcttctagatccgtaatcaaatcatccttctgcttggtcttgacaactacatcatcaacataagcttcaacgttgcgaccaatctgagttgaaaagcatctctggatcatgcgttgataagttgctcctgcattctttaatccaaaaggcatggtgatgtagcagtaggccccgaagggcgtgatgaacgaagtctttaaacagtcggactcctttagtcggatctgatgatatcctgtgtagcaatccaaaaaactgagtaactcgcagccggccgttgaattaactacctggtcaatgcgaggtaccccgaagggatctttgggacaagatttattgaggttggtgtaatcaacacacatgcgccattgccccgtcttcttccaaaccaggactgggttggccagccagtcgggatgtaggacttccttgatgaagcctgctgctaacagcttggtcaattcctccttgatcgcatctttcctatcctgtgagaaacggcggagtcgttgcttgataggtttagcatcttccttaacatgtaaagagtgcttcacctctctaggaatacgaggcatatcagatggtttccacgcaaagatatctttattattttgaagaaaggtgatgagcgcgctttcctatttataatctaactcagcgcctattacagcagtcttagtagggtcaaagggatctaggggaatcttcttggtcttggcgtcgccttctccgccctttgacatcttggtcgtaggcacttctccttcggttgctgtggacgcagccagtcggatttcttctcgagcgagtgtgatctcgcgggtttgggctatctcacagctttccttgttgcaagtgacagcttgcttgatgtcgctccgcagggatatgactcctctgggacctggcatcttcatcatcatgtaggtgtagtgcgggacagtcatgaacttggctaatgccgggcgtccgagtatggtatggtacgctgtctcaaaatcagcaacttcgaagcaaatattctctgtgcgaaagttctcccgagtgccaaaagtaaccggtagagtgatctggccgagtggagtagaagacagcctggggatgactccgtgaatgggcgcattacttggcttcaattccgtgcgagggatttgcatgttgtccagagtcttggtgaaaaggatgttgagtgcgctgccaccattgatgagggatcttcggagctagacactgcgaaccactgggtctagtaccagggggcaccgccccgggtggaccactcggtcagggtgatccgagcggtcaaacttgatagttgtttctgaccaccgaagatattggggcgtgtcgggctgaacagcattgatctcccgttcagtcaccttttgctttcgcttggattcataagccagggttctgccaaagatgtggttgagttccttgcgatgatcttgaaaaccagtcggggcatcatcttcatcatccttcttctttgtcgtgctttaatctccgtcagtcgtcttgcgtgcgttcttggcgtattgctctgcgaactgtttatagacaaagcagtctttggctgcgtggttggaatttggaggatgcggacattgagagttcatgatcttgtcgaaagtgttgacgcgcgaatgttgtcgggaggatggtgtagtggttgccacaagttcctcaggtttacgcttgcgatccttgtgattggtacttccactccctcctgtggtcagtgtatctttcttcggcttccaagtagtgcccgactgcttggatacggtgacagcatcttcagcttttgcgtactcattggctttctcgaacatctgcttgactgtcctgggaggcttgcgtccaaacttgccgactaagagatcgtggcgaatgcccttggtgaaggcggtgatgatgacgtcgtcggtgatatcggagatcttgttgcgttgctcagaaaaacatcgaatgtaatctcgaagggattctccggacttctggacaacgttgtaaagatcgaactgggtgccagggcgttcaaaggtgccttggaaattggcgatgaagtggtcgcgaagttccgcccaagatccgatcatgccacggggtagcccgtgaagccaggaccgggcagaatccgctagggctacgagcagatagtttgccatagctttgctgtctcctcctgctgcgcgaattgcgagactgtagacggtaagccaagactcaggattagtggtgccgtcatacttctcgattccagtcggcttgaagccggctgcccaatccactcgatgcaggtcacttgtgaaggtagcaactccatccacgccgtcgtcgtaacgatctggtgaatggtgggggttgtagcctcttgccgcgcggcgctggttgatagtttcgcaaagatcgatgggatgcctgcgatatggggagcggggacgttcagctcgacgctccctgtgtcggtcaggaggcgagtgaacggatcgctcgtcgtgatccctgctcctgcgactggttccggcgtcgacgacgctgaggctcggttggtgatagtctcgagatcgaagaggaggaactcggctgccagtcggcgtgcggacgcttgcggagttaatcgggaccgaagctgcgatcatggtcttggtctggttcaagatgttgacgacgtgattggcctgattgagtgcgtcttccttgaggagggtgtcgaggagggtgatcgctgcaaccgcgttctgctgaggagtgcgaaaaaccgtcgtcccctcgacgtcttgctgcccgatgagttcccgtgctcgccgcccggcctccaaggcgcgctttcgccggtcctcggcctcctttgtagccgctcgcgctcctgttgctcacgctgcagccgtctcgctcttgtgcttgacgctcctcctctagtcggcgacgttcggcttcttgtcgcacgcgctgttcttctacttcttgggcttgacgcttttcttccgtctcgttgtcggccatgaaaatgccgaagtagaggggcatgtagttatcttcaaagccttcggcgaagttgtcgaggttgcggtagtcgtagtggtagccgaagtcatcgtgctctacgatctcgattggtcgtgagtcgacaccgggggagctgaggtagccgtccaattgttccgtcgaaaccgtgccgagaggttggagtatgacgccgacttccctggagctagacaggatcggggccggggccggatcccgcctagacctacggggagaggacgcccttgtggtgaagacggtagccaagtcatcggggagtttcattagaattggcggataggctccatcgtcttgatcgggtcgtgttggagtagattagatctcgtccgagtggtttggggccaactcgactgagatgatcttggtgtagatctcggccgagttcgggatactgaacggggcagagacctggcctcttcctgactggttcgattccgagtcgaggagagaaatcctgccgatgtcgttggtgatgaagtcgaggctgccgaactggaacgcctgctcgggagggaagacgaagtcgtcgatgccggagacgaaacccatcgcactagtcggcgaagaacttgacgctgcccctacctggcgcgccaactgtcgaaacaagttttcggcaatactaaaaggggtggctatcaagctggaaaagtggatgggttgagagataaggaattttatacaggttcaggccttcttaatcaagaagtaataccctactcctatccggggattgatccgccgagtgtattattgatcgtatgatctgggagaaaaacgtgccccaagaggcacccggaccccttcttatataggggaagggatccgtattacaaaatacagtctatatccctaacgtaataggtatttacagataagattcaatcgtaaccgactagaatcccgggtatttctttgacatataagtttggaatttaacccaagcccctttaaagatattctatctatacatggcaccccatacccagttgtactatacatgccgtgtaggtatgaggtatacataatctccacacctctttcccttctctccaaccagcccaaacctcaagtacggtcgtacattacttacgtttcctccttctaatcctcctctctcctttctatataatcgaaagtttacaagtttaccttcgtaccattgaaagttcgggggtaaactttaataccattgaaaattttccaccgttactttttctaccactgccggttacttctgtctagattttctcatttctatttcattttccctcgaaaaggccgaataaaatgagtgtctacccttctttcacattgcagttccctgggacacgatctttttctcgttctttccatcggcccatttgtggaattggaaacggattgattttgctcgttgtttcgatcagcccgatcgatctttgcgtacgttcagatgggagaaaatcgtggctagctggagcctggagcgaggtcgttccgtcgttgcatgtcgacctcgtcgtcatggtcatcggcggacggcgggggacaagctgctactggatagtgttgccggagcggcggcggcacgtcgagcccgttctcatctgaggggattggagtggaggacctgctaatagatcatgttgccggtgctgacgacgctgaggctcggttggtgatagtctcgagatcgaagaggaggaactcggctgccagtcggcgtgcggacgcttgcggagttaatcgggaccgaagctgcgatcatggtcttggtctggttcaagatgttgacgacgtgattggcctgattgagtgcgtcttccttgaggagg

SEQ ID NO: 17619 - DNA, 1049 bp, Oryza sativa
cgagtgatctgcaagtttagtgaccgggatgacacagttgaacaagtttgaggatctgaacggtcgatttacgagtttagagaccaggatgacacagtggtacaagtttaggggaccggtgatgaactttactctagaaattaagtgaaagttttaaaatgcccttggagccaccatatctcccatctctcttctctccgtccccttattccatactactatggtcgccgccgctcgtcgtcaaccacagaggtggcatggccgccgccttgtactccggcatcagccgcccagacatgaacctcaagccacacgcgttgcagagggtcttgggacccaggggacccgtcagcagctacgacgttttctccgacgcgcagtgcatgcaccgccacgtacacgccggcctccatgcccaccttcacccccgcggggccggggctcttcttgccgcggctgccgctggagccgttcagccttgtggccgacagctttttagaggacgggaagtcggacgacgggcgggacgatgacagcgacgactaaaatgtcggatgtgggccaagggtgtgccacgcagcggcggtcgcggccgtcgcgcatgacctcttgctatgcgcgccgcgcccaggcgctgccgtgagacagctgtcttgaccaggccagttgccgccaccgttgttggccgcggaagcaggcgccgctgccgccgccattgcggcatgtgcagacgactagtaatcgagctcggcagcttccttggtctgaacccatcaacacacacatccatcatcattgttcagctcaaaactgtttgatgggagatctgacgggtgggtttaaggacattttataactttcgcgtgatttttctcccctttccaaccgaaaattattattttaatggacgcggtatccaccaacaaagattcaacttttcatccaatttttcagagtgtcttcccccaaaattcattttgcacggtgtcgtacagctaaaaccgcgaagtcacgatatcctatagcaaattttggggctgcaggaattc

SEQ ID NO: 17620 - DNA, 2192 bp, Oryza sativa
ctaatagttgaacttaatgagtgagatttgtaggactgcaattggtgaactataggatagattagtccattatgtaataactggtctgacaaaaattattcaatcattcagttgtattaacattaggttgcatatatggattttttctgaactacctaaatattcctaccatacactgtttatagatggtgcaaagacttaggctgagttctttttagggtgcggtaaaagacttgaaaaatagattaatatgatttttcaaagcaactttgctatagaaactttttacaaacaacacaccatataacagtttggaaagcgtgagcgtagaaaagaacttagggtaaaagaatatatcattaggtagtgtttggttgcaaggaagggatggggtgggatgggatgaacccacttttaggggtgcttggtttaggggtaagtgggctggtatggtccctagagaggaatattcctctcagatcatgtaccaatcaatccagcaaaatcgaccggacgagttcgccctatctgggacgagcgcacggcatgagccggtgctttaccctgctcgcgccgtcatctgtccgcgttctgttgcccttcccgccaccctgctcgctccgtcgtccatccatgctcgctcgcccaactcgccgccctgctcgccctgcacggtgggcgatggatccaatgatgccgccctcgggagaacgggctcaagcggcggtagacggcttgggcgacggcggcggcggggggctcggcgatggatccggcaagggtgagtgcaacggcagtggcggcggtttgcggccacgtcatgctcctcctcccgcctggctatccccgagacggagctcctccgctcgttaggccattgtcacacatatccgaagtgagtgctcgtcgttgtccttcttgcaagcctgccctcgccgcaagcttgcttgcccgccggcccatctcgcgcgccgcccggtcattgatggtagctgcaaacgtatccatcccatatctccctcatcccttcaaccaaacaaaaaattgtaattgtactatcctacaaaccaaatatgtgagtggaatcatcccaactctaaaatcaagaatggttaatttcatcccatcccgcctagtccggaaaccaaacacatgtttattttgttcgtatagttagggcacccgcaatggttatctataggctctctacaagagatccatgtcagcatatttttctacttgaaagaaattaaatgaagagagagagcaaagctatctactaacctggagatagtctatagagaaaaacgaggtaatgcattagagagctatagatatccatgtagacatactattgagatggtttactattaatctaatctattgctgagatgtacatattttatagagagcaccttactttaccattgcgggtgcccttacatgggcaaaatcccgtataatttttgggatagaggttggaaattgtacacttatttcggcataacctaggtagttttcacgtagctaagaatagtatagactgtctgcagcagcgatggcacaacgatgaccgccgcagccgccacgagcgacacgaccacccatggcgacgggaaaaagtgaagcacaaagccgccacaccaccagctcaccttcctgctccggtggcacgccacggcatccaccatctccgcgtactcgtcggggaggcgcgcgccgacggtctcctccccgagctcgcggaagaaggccaccagctccgcgtccgtcttgcgcatgctcgacagcacgcctcgccgccggaggaacgccgcgtcctgcgggcaccggacgaggccctccatcctcgccacgtgagccgtcacgcacgcgccgtgcgcccagtggaagtgcttctcgaaggcgatcatgttgtgcagcacggtggcgctgtactcgtgcacgtcgaggcaggggatggtcatcaccgccacggggctcgccgtccggccccagaaccacatgtcgaggtcgccgcagctcgccgccgcgctccggaaccacaccgccgaccggcagagctccatggagctcgggaacagccgctccgactccttcttgatcttgagaagcttccgtggcgtcgacaggatgcagtacttgctcgtcggcacgcgcgaccagtgaaagaggtgtagcacgtgctggaa

SEQ ID NO: 17621 - DNA, 1250 bp, Oryza sativa
acttgatccacgagcgtaggtcgtgcctctagagtggctatgaatccatgttcaacgactcccacattgagacgtttcaagctcctgctgcaattcctcggtgcatagggcattgcagtagcttttcctgcttaatgcatctaccaccacattggcttttcccggatggtaatgaatgctcatgtcataatctttgattagctccaaccatcttcgctgtcggagatttagatccagttgggtaaatatgtatttcagactcttgtggtccgtatacacttcacagcggttgccaatcagatagttcctctagatcttcaaagcatgaaccactactgccaattccaggtcatgagttggataattcccttcatgtggacgcaactgccacgaggcatatgcgaccactctgccctcttgcattagaacacatctaagcccgtggtgggatgcgtcgcaatagacttggaagtctttcatctggtcgggcagaatcagaactggggtggatactaatttcttcttgagctcctcaaaactcttgtcacactcagctgtccatttaatcttctcatctttcttaagcaactgagtcatgggtcgggcgatcctggagaagttttcgatgaatcggcggtaataacccacaagtccaagaaaactacgaatttgcgacacggtcttaggtggggtccacttggtaactgactccacattcgatggatcaactgccacaccttgagctgcaataacgtgacctagaaatttgacttcagacaaccagaagtcacacttgctgaacttggcgtataactggtgctccttcaacttctcgagtaacagacggagatgtagctcatgttcttcttcgaactttgaatagataagtatgtcgtcgatgaacaccacaacaaacttgtcgagaaattccatgaacacattgttcatcagattcatgaagaatgcaggtgcgttggtaagtccgaaagacataaccgtgcactcatatagcccgtaccgagtggtgaaggctgtctttggaatatcctcttcccgaattctcaactggtggtagcctgatagtaggtctatcttagaaaacactttagctcctttcagttgatcaaacaaatcatcgatccgcggtaaaggatatttgttcttgattgtgacctcgttgagtgcgcgatagtcgatgcacatcctcttcgtcttatcctttttctccacaaaaatgaccggtgcaccct

SEQ ID NO: 17622 - DNA, 7187 bp, Oryza sativa
aattcctgcagcccgaaactttaggggccaccggacattctggagactcgccacgaaggccctacaacccgttcctccaggggtgagcgtggggggagggccgcctcgtgaggaggaacctggcactctagatgaggaggaaccttcccccatgcgggcagctcgacgctcgtcccggcgtcgctcgatattgatctgagcgtcctgctccccgtagagaccgtcatgacgcctccggcttcccgaggctcccgacgacgttggagccgtggaccgccttgaggccatggccgactgacgggccctcctccttgctgacgaggagagggtaacgggggtacgcgacataccggtggcggcgggtcggccgcccgcggccaattgccgctgggcagtggtgaccaagttggccacgtcgtctagccagcgctgaacaggggtctccggctccgagttcacggggggatgccgcagaagggcgcccgccgcctgaagcgtgcctcggggtgagccgccatcaccgtaagtgaggcggcgccgtgccccgacgcgtcgtggcctctcttcgcccaggggcggggagagggccgaaccacctgaacgggtgggatcctccctccgcgagggttcgtggcggggaggagttggagagtcgcggcggtggtgacgagggccacggctctcgctagaatccccactcccagatggagtgggggtgaacgccaccgcctcctcctcctccaggacctcgaccatgatcgtcgagggcccagggaaacttggggcggaagaaaacgacttctccttaaaacgcgcgacttcctcctacctggcgcattagctgtcgccagctgtcgagggaagtccctcgatagcgggaggtcgtgaggaccccctttcgtgagttcggccgggggaagaagctcgtctcttggaaatctcgtatccgcccctagggctactagctagcttgcacacaatcgaattatacaggttcgggccggtgagaagcgtaataccctactcctgtgtttaggattatggttgagtgttacaagggttccttaactccggagagctcttgctcttcttctcctagaattcaggtctactcagcgttttccttcttctcggtgagcaaggtcctccttatatctcaaggggataccacatgcaccgcctctacctactcttctttcgggtggggacccaccctatcttgaccagaactcgacccgtgccttcgcctggaagctaagccacagcttgtcctcgagtggggcccagtgccgtccctcgcctgacacgggggacagccctgtcattcccccattaatggatgaagacttgtggtggccgccgtccgaatgaccctccgatgggacgggtcatacctacctccactccgccgggagcagacgcgacgtgggagcacggttgtcggtctagtcagacgtgaccgatgtcatgaccggtcacagaccggtcattcttgattatggcgcgtcagatgcgcacaccgcatgtctgcctcactacattaaatgcgacagggggcagttggggcgttgcacgcattaaaggaagctcagcctgggccccctcctcgctcgctccccccgccaaatggcggctgggtgagggcctcggggcgaagcggtgcaagggcccgaggggcatgacgtggcaccccgaggccccgaccccccctggccgctccagcggttcgcgggctacaggggcaggaccaggctgtagggacacgcggcaggataggaaggtagattccccacacttcgcatacccccggtcccatatctccgacagtagcccccggcaccatatcggacattggcctcctgaggtcggtctgacgtggtgcctcacgacttcccaagctagggttgcgggcccggcagggaatctaagggaatgctgccgagtggccaagttggcgtatcaaccacagcagcggtttggccgccactgaccgtgctgatgatgaggatgtttaagacacgaaaatcggggggtcggttagaccacgcctcgactccttcgctcgctactcatgcggtggtactggcgacggttcgcctaggttgcgcccgtgaccgttgcgtgccctacgccgagtgtgccgctgacgggtgcactaaatgcggggcgcggattcagtgggcgatgtgatgagtggacgcgggaaatgatgagacaaccgcgggcgcgagaatcgtggaggcaaccgtgagggcgtgaaacgaggaggcgagcgcaggcgaggtgaggataaaaggatacggaggcagggactttgcattcttcctttcgccaagtgctcacccgcctactcacccgcctactcgctctctaagccctaacattctcgccaattcacactactccgcgcgccaagcccttcgccgtttctccgccggccatcatggctcaagacgctggcgacacagtgctcccggcatcacgcattatggcggataggcaccttagcctcccccgcaagaccatgccggaaggcaccgtcgtgagggcgggggagttgcggccacggccgcgatatccggagggatctgtgcacctcttgtcctttgctatggtggggttgattccgccattcttcggattcttccacgaggttttggatttctatgaaatccatgccttgcatctcgcacccaatgctgtgatgacgctgcccatcttcgcacatctgtgcgagatgttcatcggggtgcggccgatgatgcggctgttccagtctttcttcatcccgcagctgctgcaaggtgcggtggtggggggatgttacttccagccccggccagccacggcggggcaatacatcgagagtcatctccgcaagaaatgagtggactggaggaaggactggttctacatcgcgctgccggaccacccgcgacttcggcttcccgctggccctcccgaacgatccgccgcatggctggcggtttcagagttgggcgaagagtacgacgcggtgcaggatcgcctcaggggcctgtgaagcctaggcctcacagcggcaatggtctttggcgattatttccgccgccgcatcgcgcctcttcaggatcgatcccgtggcgcatgggagtacactggtcctaacgaccccatgcgcacgcatgtgggtgagcgctgggaatggggggaggaggacgcgaagacggtgattcggcgggtgttgggtctagactccgccgagcaaacactgattccagacgggatccttcccctctgctgtgaccgcgatcgggagagcatcctggctgtgatgtcggccggcaggagccggtcctaccggggcggcgccggtggcagcgctgccggcgtgagtggcggtgacgcgaccgtatgcgggagtcggacaagcggacccggcgggggtggcagctccggggcacccggcccgagccacggacccagggacgactcggccagcgacctgaaagggaagcggaagatgcccaaatctcgaccgccctctcccccgcgtggagggggcgccgagcgtgtggcggaccgaccgccagcaggccacaagcgccccgtcgagcctgaggccggacggaagaagaagcggctccggaagataggtcaaacggagccgtgttgggggagcttcattgagcccctgaagtggactttcaaccgccctccccgcaggtaccactgccggcacccactacggtgctttttactcatctcggtctcttgttccttcctcttctttttcttcattaacgccatcggggttctcttgtagcgagattctttcccaggggatctcggggtccgaccctttgcaggggatgaaatccgaacgaatggagtggcccgggcttggccgatccagggccgtggggccttcacagcctctcggcggggcccacgggccgcacaccgggtccgaccccgggctaacctcagccgggactcgacccactgcgagcgatagcggcggtgacgtccctcccgggggcggctctgagaccgggatccatgcggagcgccactcgggatcggggggcgagggaggtcgcggctcggaagccgaggccggaggcggccttgagcccgaggtcgaggctgaaattgggggcgggcacgagcccgaggccgaggctgaatctacccgaggacccgaagcgggggccgagagggacggccgctcccccttgcacttgggacgccctcggggctggtcgcgcagaaggggggctgagagcagcccccagtctcgcgggggatccagcagcactctgtcgtcctggggacggaccgcggctttttcttctccgactccggcaagtatggagccgctcctgcaggtgctcgctgccgccgattccaccgtccgggaggggctcaatgccaatgttcaagccctggcggaagagcgagcggccctggaggcagagtgggcacagctcgctgcggaccgcgcgcgggttgacgagggacgcggcgccgtggacgacatggtgaaggtgggacgcaaaatgcgccaagcccaactagccgaaatccaagcgggactggccagaccgaggctatgacgaccgggggtcggggacggccgtgtgtaggcccttccgagcccccagggttcggcgcaacccggggcgcggcccgtgtttgggctccctttcgacggttttcaggtcgccccacggcacttacggttcggagtaagcacgaactatcatttgaaccaggacaagccagaggaaagagtgagaaaaaggggcgcataacggccttcacactaagtggaaaaatttattgcttggaaagggaaaaggatacacagtggtagcctccggccaagctcgcacaagccgaggtgttgtgcgggggttggcccgagctcctggaaagcaaaaaatctcgacgctatggatagaagcgacgaaggtgtttgatattccaggggttaggcaactccgtgccatcctccgtggttagtcgaacggagcctggccggggaacgccgatcactttgtatggcccttcccacattggcgagagcttgctcagccctagatgtgattgcacgcggcataggacgaggtcgccaacttgcagtgaccgggcccggacgtggcgctgatggtagcgccgcaggctttgttggtagcgcgcggcacgcagggccgcacgctttctccgttcttcaagatagtcgaggtcgtcgcggtgaagatcatcctggttggcctcattgtacagcgtgacgcgaggcgatcccagggaaagctccgaaagtaggatagcctcggcgccatacaccaggaaaaagggcgtttaccccgttgcgcggcttggagtggtgcgatttgcccacaacacggcgggcaattcctcgagccacgaatccccgtgtttcttcaggacattgtacgtcttggtcttgaggcctttgaggatttcggcgttggctcgctcgacttggccgttgctcctggggtgggcgggcgaggcaaagcacaatttgatgcccatgtcgtcgcaatagttgtcaaatagctcactggtgaactgggtgccgttatctgtaatgatgcggttgggcactccgaatcgggatgtgatgcccctgatgaacttgagggcggaatgcttgtcgatcttgacgaccgggtaagcttcgggccacttggtgaacttgtcgatggcaacgtataggtgctgatacccgcctcgagccgtcttgaatggtccaaggatgtctagcccccaaaccgcaaaaggccaagagagtgggatgagctgcaaggcttgggccggctggtgggtttgcttggcgtggaactggcatgccttgcaccgctggacccattcttgggcatcttgcaatgcagtcgactagtaaaaaccttgtcggaaggctttaccgaccaaagttcgtgaggccgaatgggccccgcactcaccctgatgggtgtcggctatgagctcgatgccttgctctcgagaaacacacttcaagagtatcccgttggcggcacgccggtagagggtcccttctatgaggacgtaccgcttggagatgcgcgcgagcttctcagcttctgcgcgatcctcaggaagagtattgccgtcgagatacgcccggatgtcagtcatccaaacgacctgatgaggggggtcggggtcgaccccctcgggccccgagggccgcgagtcgccaagggtcggggcagagggcgtgtcgtcggggtccctcgaggggttcggtcgcgccgatggctgcgcgagtctttcctcgaaggtccccggggggagtggggctcgtgccgatgcaacacgcgacaactcatcagcgactgtgttgtcgcgtcggggcacgtgccggagctcgagtctgtcgatgtgatgttccatgcgccgcacttcgcgacatatgcgtccatttgtgggtcggtgcactggtactctttggatacttgattcacgaccagctgggagtcacctaggaccaggagacggtggatgcccattctggccaccgccctcaatcccgcgaggagtccttcgtattccgccatgttgttcgtggctcggaagtcgagccaaatgacatacttgaggacgtccccgcttggcgatgtcagcgtgactctggcgcctgcaccttgaaggttgagggagccgtcgaaatgcataacccagtgcccgccatgaatgtcggcgtttgggtcctttacatctctggggaggaaggagacgttgggtggaacaggttcgtccactggggtccactccgcgatgaagttagctaggacctggcttttgatcgcgtgtcgtggtttgaagtgcaggtcgaactcagccagctcgatggcccactttacaacccgaccagtgccctcttggttgtgcaggatttggccgagagggtaggatgtcactacggaaacccgatgcgcttggaaatagtggcgtaatttccttgaggccattaaaactgcataaagcattttctgggcctgtgggtatcgggtcttcgcatctcggagtgcctcgctgacaaagtagacgggccgctgcacctttcggcggggccggtccgtgttgttaggggcaaatgatctggggcgcccttgctcaggggcctcgggggggggtctcgagtcatgttggga

SEQ ID NO: 17623 - DNA, 1428 bp, Oryza sativa
cgatgcacatccggagcttgccgttggcctgggggacgaccaccgggttcgccagccactccggatggataacctcgcagatgaagtcagcctccaagagccgcaccacttcctctcggatgaaggcctgtcgctctggggcttgatgtcgcactttttgccggatgggtcgcgcatccggccgcacggcgaggcagtgctcgatcacctccctggggaccccgggcatgtccgatggcttccatgtgaagacgttagaatttgcccgcaggaaggagacgagtgcgctttcctatttggcgtccagggttccaccaattttggcggtcttggacggatcatcgccaagggggatctccttgacgggcacctcattagccgaggtgaggcgcttcttggaggcacgggacgcggtggcctccggggcctgcggctccgtggccactgccaggttgtcggcgcgttgctccgcgcaggcgagggcgactttgacatcgccaaagacggtgatgggaacagcagggcctggcatcttcatctggaggtaggcgtagtggttggtggccatgaacttcactaacgtaggtctgcccaggaccgcgttgtagggcagattgaggtccgccacatcgaagtcgattcgctcggtgcggaagttggtggagtcaccgaatgttaccgggagctcgacgtgtgtctcggagtcacgccaatgatcagcagcgacgactggagcttcatccccggggccttgagcgcatcgaaggcggctggggagatgatgctcaggctggcccccccgtcaaccaggacacgcttcatcctgacgttgtgaatggtcggggagtgtcacgcccagaaattcccgaatagaattcccaagcagaatgtgcattaaaacccccatccaggaccggccgggctacacaaacgacaatgttgacatacagatccacgtcttacaaacattataaaagtcttacataaatgtagcggaaaaacaaaagataactggagctaagccttgacttgatctgcagcgggaacaccactccacaggtatcctcgacggcacggacgaagcctactcctcggagaaaccaccatcggacacatactcatactctagggttggggaaaatagagcaagactgagtactacccactgtactcagcaagtcataccggaataggggtatgatgcagggatttatcaatggatagctataaaggttcatttgcataacactggcatttataaacagaggtagaatgcgaaaatagttgtaataattaatcaatattaacctaccccccttaaacggaatctcgaccccgagattcggaggagctggcgaagaggtgcggatgggcggccttcaactcatcttccctttcccaggttgcttcctcctcagaatggtggct

SEQ ID NO: 17624 - DNA, 1826 bp, Oryza sativa
ttttaagtgcaaaataccccgttttaaaagttcaaagtatgttttaagacaagataaatagtccaatgatgtaaagtagttttatcccatcattttctaagatcactctagtatgattcactctccttttagatggagttgaaacattttgattggactttaactgtaagaggggtgaagctaaagatatagcctaattatttagatacgagtatgtctacatacataactaaaacataactaaaagttagatacgagtatgtctatatacataataaaagttagtatatatatctgaaaacgtataaggtgtaaaataaaacatattttatgttcacgttcataattaaaagttactatattatgaaaatgatatatggtgtgaaactgtgaaatgagacatattttcgtgtttagttttagtctggcggcaaaccgccgtgccggctcagtcgctgtaaacgcctataaaacctccaccatatcacacagcagctcacttgtctcgcttcctcctccgactcgcctcttcccaccaactccttccccgatggagtccctcctcgccgcctcttcctctctccccgcggccgccttctcgccgccgtcgtccctctcttcgacctcctcgtcgccgcacgccctacggtcggccgtcgccggagccgcccgcgcggtgcgctgctccgccgccaaggtgctcctcctctcgagccacccgtttcttgattctgcagctctggaaaatcgcgcgttcaccgccgtgccctgtttttcctattcgatcgatcgtttctgcgggttttgatggcatctggttttggtgcaggattcgatcctgtacgcgctggagcacgacgagatgtttaactcggcggaggtgatccagtgggagagcggcaagtccatcaactccatcgccgccgcgcagggcatccgcatccgccgccgctgccgcccacgctacccctccgagggctccggcgccgacaaagccgtcccccgcaacatgctcgagcagatcatctgggacaaagaggtcgaggtgtcccaggtaaactcgtctgcgccgcgcgtaaactgtttgaataaattcgcacacaagaataaccatttgttactgattggcatgcattttcggttactctgttcttgtgcagaggaaggcgaagaagccgctgcagaaggtgatcgagtcgagccagcacgcgccaccggccagggacttcgtcggcgcgctaacggcggcctacagccgcaacgtcgcgccggcgctgatcgccgaggtgaagaaggcgtcgccgagcagaggcgtgctccgggaggacttcaatccggtgagtttcagagagttttgcttgcatctctctttacgaaaattcatgtctgaaggttgattgcctggtttataatttaattgtctgaatactgtttcatgtgttgctaatcttttgaactgataacaggttgagatcgcgcaatcctatgagaagaacggcgcggcttgcctcagtatcctgaccgacgaaaaacactttcaggttggctgttcttctgttcttttttctaagaaagaaggtctcgccttctggtagctttcgacttcgtagttctcaaattcttatccttacaattattaatgtttttttttcgcatatatctgacttttcaaactctttgattcttcagggtagctttgagaatctcgagaccgttcgcaattccggagtaaaggtacgcgctagtattcaaaatgggcttcttcttttttaactttttcggaagaatattcttcagctgcagttgacagttgaaacatgtgcatt

SEQ ID NO: 17625 - DNA, 8897 bp, Oryza sativa
aaagaaaatgtactcctgcttctgatgatattctgtaatgagtatattcttgcggttgcagtatactagattaaatttatattacttaataatgtgcgttgtacgtgcacttactagtacacttacaaaagagcgaacctgtttgattacacccagtcgatgcatacaaatactcgaactaacacaatcaatcaaatcatcaaatcgttcctttacttactttcagtcatattttctagtttaccatatacctaataactagttcatccatctttatcaatttggttgtaaatcgtccatcttttttgcaagagcatgatatcctttgtagttttgttccatgaaccttccaattcgcttacgagaaagttggttatctacaaaccagtctaaatcgggctagacgtcagtttgatctctaaatcgtctctgcttgtcggttctaatcttttctaagcccatcttaggttgcgttcggaatcccctcttcccaacatgcacaatacttacggaaaacagagcaatccattagcacgtgattaatcaagtattagctaatttttttcgaaaatggatcaatatgatttttttaagcaactttcatttttacagaaaacacaacgtttagcattttgaaaagcgtacgcgcagaatacgatggggatgcactactaggaaatcgggcttatgcaacggcaagaattgttgcaatatgcccaaaaccgttgcaataggtacaattgcaatggatttttgtcgttagggctcatggcgcaaaagtccgtagcaatatggtttttaccactggatcactttgtcgttgtaaataaaaactcctgttgcaactgaatgaaccgtggcaattaacagataaggcaacggttggttggtggtaatacaacatattgcaacaccagatgtcgttgtcgtaggaactagtcgcatcgcaccaaagcgtggtaataagtgctaatgtgtattgccacagacctcaaacgtggtaataggtcgacctttattgccatgctcacagtttggttgttatagatagatcccactattgccacgctacacatgtctctttgctataagcaggccccacctatcagtgactaaggtcgacgagcgcatagtggactaggtcctcgcatgcaccggccgtgggcgcaccatgtggcagccacatggcggccacggtggaccagcgtgggaggtggcaaaatccgagacctggcgaaattcgacctgaactcggactcagcggtctgactggccacgagcctctggttagaccggtcccacgaagaaaaccaggttcttttcaagctttggcaatgtgttcatatttcgagtctagatgtcaaattttagtggtaacactagtcttccacgtaaatcatataactatgtaaaagttgatgggaacatatgttgtgtacacagcttcgtgtacacatcctacacaccaactaacacatatgaccgaaaacttctgacgaaattttgtttttctccttggtctatgtatgatgattttgtaagatatgactttatgcgtagatgtaatactactatatgtactaattttttaagttttttttggtatttattagttggtgtgtaagtgaagacttgtatgcgtagaatatgttgtccatgtggaaaccaaataaaaatgaaatagttttgcatgatagaaatgtcgaaattacgaaatggccgataaattaaaatgaaaagcatccaaaagttgaactcgaagaggggaaaaattagggtactcccatgtacggtcaatattctttcggtgaaaaatgatgtatccatcgacaacgagtcacccgcgatgactttgttactctaaagatatgtcaacctagtgtttcactacgtgctcacaaggataggacgtgtatatgcacagcttgaatttgcgcgtgttataagcgtatatgtttcttactgttcaagaaaaatcatacaaattaaagcaatacaccttatgtgttgtgcatatctatctatctatctatctatctatctattatctatctatctatctatctatctatctatctatctatctatctatctattatatactaaaagtccattaatctttctataaacgctcctaaaccgccatgtggcgtccctacgaacgctcctaagtcgccacatggcattttataatctcaccgttgattttcatttaaattaaagggcccataattttagaccggtaaattagatctatttgcttcctgttaatatcccgtgcttatggttaaaactagcgtgcctacttatgatggaaaaagctacggaactgttcatttaaaaaatcaagaaccgtacgtaagtacgagaagaaaaactataaaaaaacctactaaaaaaataaaaacatgcttacgtatgtaaaagaactataacgcacttaaaatttatatgtatgcacatcagaagaaaaaattagaccatctttttaaaataagattttctatactataaaaacacgcaatatgttagaccattagattagcccgctttctcttaataaatactccctctgtttcacaatgtaaaattttctagcattgtccccattcatatagatgctaatgaatctagacacatatatgtttagattcattaatatctatatgaatatgggtaatgctggaaagttttacattgtgaaacggagaaactataacaaaattcgataacccggattatgttattgaattattgcatcaaggaccataatttataataatttaataatattagataatttaataattttgttttatattaattgttgaatactaaaagtccatatgaactttcttaaaacgctctcacactgccacatgccaatccataaaacgctctcaagctaccacgtgacgctaataaaatccatccctcaatttttacttaattcagtgggtccaatatttttagccgtccaacttaattgagattaaaataacctagcgccgccggaaccgcggctaagggccggacggagggaaacttccctagggagtcaccgtagtcatcctgctcttgctcgtatgtcccgccatggctgatgattaagggggtgtttagatttaggggtgtaaagttttggcgtgtcatatcgggtattatatagggtgtcgcatggggtgtttgggcactaataaaaaaactaattacaaaattcgttagtaaaccgcgagacgaatttataagtctaattattccgtcattagcaaatgtttactgtagcatcacattgtcaaatcatggagcaattaggcttaaaatattcgtctcgcaaattagtcgcaatatgtgcaattagttattttttttggccgatatttattatttcattcaggtgttcaaacatctgatgtgaacatggtgtaaagttttggcatagaatctaaacatggcctaattcaattttggcttttcaattttgttattcacatgtacgtaatgtacgtactactctgtcccagaaaaagataaactctagctacgaatctggacaaaacaccttacttttacttttgttgacatgttttctgaagaaaataagtctaccatattttcaaatgatgaagaatattacaaataattgcttataaatattatttaaatatgatataatataaagctaatgggtttggagaattataaaagcaattaatgccgatgaaaaaaaattatgaagaaatcgtggcataacacaaatatgatatactataaagctaatacgttagagaattataaaagcaattaaggccgatgaaaaaaaaatatagagaaatcgtggcaaatgtttgcttctataagtgtctcaaacttagcgtacgacacaagcccacgcgaatgcgtgggctatcttcagactcaatcacgcacgaaccgtacggacatacgagcgatgcaacaaacacatacatatgttgaaaaagatccgatccaggtaacacatatgtattaatttctcatatataactatatgtatatatgagatggtaacacatatgtatgtttggtagatcatttggtggccagcttgaaggagctgagttggtaggtggtcgccccgaccaagtcagccacaacggccacgtacaactccctcgtctttttgcgagagctagcagcatcgatgacaaccagatagttggacccctgcaccacctgctcctcggctgcgaccacgcggacgaactgcagcctgtcattggtccccagctggttgtgcttccccaccgcccacgcgccgacccgctgaatctgattgttgccggcaacgtcctcgatcacgttccacccgccgacccactgcgcgcggctggtggtggcaacggcagcaacggctgcgaggaggatgagcaggagcccggggtgtctcgccatgtcgattcgagaacgatttgggacttgggagcagctgatcagcaggctagggtgcagtggagacagctgggtcttggaagaacacttgtgctagatgagccatttatatagggctagttagcatatattaattctaatttatgggacatatcgaattttttttacagttcgtttgatgacatggtcaaatactatcagttccaaactcgacattttgtacaacacttggttgtagttgaaagctacggatcacgttggggacattcaacaactagtaggatctatatatacctttggcaattaacacgacatgtatggttgtggtttaaatactactctctccgttttatattataagttcgtttttagttaaacttttttaagtttgaacaggtttatagaaaaaatataataacatttttaatataaaataagcatataatcaaaatatgttaaaatttagttttaatgaaactaatttggcgttaaaacttaaaaaagtttcagtaagaaaaaaaatcaatgtggattgcaatatgaaacgaagtgagtataactttgcatagctcagcagcttagtttccttatagtagaaccagattaaattcctaaatttgatatgagtgctctcacatacggctaattatttttctagtggtcaacattgtcttctaggtgatcccaacatatactggccagccactcggaggcactcaacaaagggattgagagtctcttcgagacgtcatgtgtgtgtgcatccatagtggtgggtgtgattcttttttatggcatgtggtgatatggcttcaactttctctgtggtttaatatcattccgtctaaagagaatagggatggagattgtctattcacgataaacccgtcacctgcctctaagcacgaccccccatgggttgtgctcatgacgcatctccatcgagcccttcagcacagccccctacgggctgtactcggtgcacatcttcagcgagcccctgtggcatgaccctccatggacggtgtttggggcatatatatagtaagccccgaagcatggtttccatcggttgtgcttagggttcatcgtcggcgaatccccaagtcaggcccttctatgggctgtgctcggggcacatcttaagcaagtccccaagtcccccctccccccctcttgtgaactatgctcgaggtacatcctcagccagtccccaagccactgcctcctgtgcttggggctacactcgaacccaaagtgctcgaggagcaacaacgcatggaccccattaagcctcacattcggtgtgaaactacgtataccaacccaacatataatcaatacaacatgcgataacatagtgcatgctgaccatgcaataggcccaatggataccccttttgtccgtgtcttctagtccaaaggcacgtgtcgaagcaatgagcaaggaggcagaaaggagctactccacgtccctctagctcctctatgataagacagtcatacctaacccctatattggggtctatctataaaaaacaagccactgttgcatccgcttgtagctataaaaggaggaccaggaccatagaaaaaaaaggttatgattttcctgtttcattcatctaatttagattagaatcctagttgcaactcagtgaaaattagtacatcctctcccactcagaacaactccaaaaaccacactgtacacatcctctcagctagcgagaacacaggagtagggtaccatgcctcttagcggcccgaacctgtttaaatctctctcacacttttatctctcccttttttacttcgacttcatgctaaatcattggctccgttttgcacacccgtcgtagccgaatcccaaaggtggtgtcactcctccccagtataagagcttcatttctccgatagaggttttcgatttttcaaccatcgagcatgctttaagagtcatgctagcaggggcgaggaattaaactcaagaccggggtttgggtgcatgaaagatagacgcactagctgctgcatccgccttcgtttttttgtcatatatatacaagcttgcatatagaagttacatcgtacagtgcaggatcagtattgcgacaatttaattatactataattattaaaactatattatacttatgtttagttatgtttgaaatttatttgaaggattttatttgcatgtttttatttatggctctatcggccaagtttgaaaatatatactaacatgtcgctgcccgaaatcatttgaaacactgaaaaaatcttttcataatagatctcaaaatttgaaacgcatattatattatgtagacgatgccaaatactccatccatttcatatttcatattataagtcggttgacttttttgctagccaaaatttattaaatttgaccaagtttacagaaaaatttagtaacatctaaaatatcaaattagtttcattatatttaacattgaatatattctaataatctgtttgttttatgttaaaaatattactatatttttttataaatttggtcaaacttaaaaaagtttgactagaaaaaaattcgaacgatttataatatggaacggatggagtaaaaaggttatccacttttaagttatagatttggttgacgtctacaacttttttatttagagaatgtctcaatatgaggttatttggaaaattcaaaaaatcatttttcagaaaatgatttaagaacttgcaatgcatatttagagatgtaaacaatctcaaacaaataaattgtcaaaattttacagattgtggcgagaaatatgagtttgatatagagcacgtctttattcgacttcatctaagacacctacaaaccaacttgttttctcccatattacagacgtgttttctcactggtgaagtgtgttgattggctagcaaaggtccagccttgacctagcaagttatcacattttgcgtcggctttcgacacgtctatgatgtgattttagaaacacggttgtgtccaggatgctttcacatctgtatccattatctaaaaaatgacttatatccctggctaagtgtttacatttagaagtatacatgagtgaactggaaaacacttttggcaaataaattaattgaatgctatggttggagccccccttgcatatgaatcgatctcaccctagtcagaaacagaggcaagacggttgcagatttgcggtaaactaaaacacaacacttgaaactacgctgagtctgaccaattcgtcccttgcctatgccgctgtgcaaagccaacaatccagacaagtatccggattctaaatccactagccaataacttcacggtcaaatactttgactcagcaactaaatcaccgctgctagtttatgttctcttcttcacggtcaaatatttttattaggtacggtcaaatactttgcctgattaatccgtttcaagacatagattccctttgcttactgaccgtgaatagggatgtaagtgggtcaacccacatgtccatttatggtcaaatacatgataactcatggattttcgtgtcgtggcccggctgacggtatctagagatgcaagtgggtcgacctataaacttatttatagctcaaattaagaggtaacccgtgagtcaaacctgtaggttacccactaattttatctataagtcggttcgcggatcagcccgcttataccctggtccatgaaagatgcagtacagtttgcacattgcacacagttggcacaaggaacaaatgtgttgtggccaactaatccaaccaagaagtccaagcggacacaggaaggatggtatgatcaatctgtccaaataacagcgcgctggactaagattattttttttggaaaataatgtaggggagtatcttgcactgtatgtattaaaaattaattataaaaattacatatgtacattcatgagttgaggttttgtagccattgtgaaataagtggaaagtaactagcttttgctctatggatagccaagaaaagttatgctttaagcttgtctttactagtggagtagccagaaatttcttttttctgggtagtcctacttcgagctatatccatggcatcagggactccggtcagttgttcgggctaatggggtgtgtgcaaatgaaatttgaatgtttttcagtgaattagaaataatatttatagcaaacacttgatacaactagaaaggtagcccgcgctgatgcgcgggcatcttatttagtggtgtttaaaattttgttatgaatgtttatgtatatatgattttttttaaaaaaatttctcttctaaatatgtgtatatcaataatttgtttgggaatgttttgaaagttagtttcgatcattggacgtacggacgtgtgctaaaagggacatgtttctcgacatttgtctatacgcatgttggaccgatggggatgtca

SEQ ID NO: 17626 - DNA, 765 bp, Oryza sativa
taccatttctcttggttcatttgtgatgctaacggatactaagttgtgatcaacttgtgatgtaattcaaattattgttgataaccgataatttggtaagttattgattttatttctctttgttaaattacatatctttcaagttattattcatgtgagatccatagggtacccactggatatactcgcgcccgccgggcatgggtacgggcatggagttttgcccgctaactctagtaggcagtgttcgggtgggcaatgtcgggcatggttttgctctacccgtgtctgacccgacccattgccatccctacacttgacactacaaaattaacctatcagtcacatggaggcaaagcctgaagctaataaacattcagacttcgtgggctattaatatttctggggtcctcttcagagtaagttcagagcgagcaacaagaaggaaggcgatcagctcgttcttcttctccctctcctccagcgacggccatggcgagattaggtcttgccgtgtgcgccgttccttccacctctgccttcttctgtcgtcgacctcctcgctccggctaaaccccacgacggaggacacagccaaccatggcagaagaactgcttatcacttccagctgcaaagaactggcagaatggtaatcaaggactaatctttttgattaatcgcttgatccagttacggattcctgctgattagccaaactaatcccttttcctgtctgatcggtgccgaactctgcgggccgcagg

SEQ ID NO: 17627 - DNA, 690 bp, Oryza sativa
cggtaacaaaagcttgacaatggaactgaccattctttacctgtggactatcatatattgccttggcaagggtagtcttgcccaatcctccaaagccaaaaattgatattacccttagttcttgatcactgtccactcttagatatgttaggaccctgtccctccgattgttgattcccacaagtagatcatcctgtataaaaccaataacttgcctagggtcaagggacaaacaggttgagattgaagtggtggtattcttcgagtcagaggcatcaacaatagcattagcaccgctatatctcgcatacctgtcactaacatctcgagcacgaaccttaagctcttgcacttgcatgacaattcgatggcggaccttcagagtgtacataagatgcttcatcctatatataaaccctacaataccattaccacaatagccaccaaagtggtgttggaactcatcaatgcagtcctcagcgtcataagccatctctctgacttgcttcatccagatcttcacttggacactgtggctgcttgtggctgcaaggttctggaggaatgcgttcatgctctcaagttcatccttgatgtattgcaactcacctctgaccccaccaagaagtcggggctcttgcgaaagaaaagagcccagtttacccagcagtgttttcacagcaccctcag

SEQ ID NO: 17628 - DNA, 822 bp, Oryza sativa
ttcctgcagccctgtatcttggcaggcttgtatgaacatatgcaggagtgattgtaactgtaaaggttttcagtacctaaaaggggaagggacatgctttccaaaatcattccttttcaatggaagggcatacccatcacactttgtgtcaccacgcaatatgtatcttaagatccctataagcatgaatatttcaggtatgccagtatcccaatccaatgtgcttgattcaagaaaacatagccttaattgtgatcagatggatgaaaaaactagggaactatttcccgatgtgcacaagacaagtcagggagaaacaagatggttttacttgtatgggtttgcgggtgcgatttttattcttgaagttttctttattggatttgcatggttctttgtttcaagatgggatctggatgcattagaaatacaagcagtcgagcaaggttacaaggtgatggcaagtaatttcagaagatataattataaagagttggctaaggcaactagaaagtttaaatgtgagcttggaagaggaggctcaggtattgtctacaagggaaccttggatgatggtcgagtagttgctgttaagatgctggaaaatgtaaggcaatgtgaggaagaattccaagctgagttgcgcataattgggaaaattaaccatatgaatctggtaaggatatggggattttgctcagagaactcacacagggaatggcttggggggggttttttaccgagtatatcgagaatgggtcattagctaacatactgtttaatgaaaacattttgctagagtggagacagcgatttaatatt

SEQ ID NO: 17629 - DNA, 2232 bp, Oryza sativa
agcctatctccaccatgagtgtctagagtgggtcatccattgtgacgtgaagccagagaatatcctgttggacggaaattttgagcctaagatcgcggactttgggttggcgaagctcctaaacagaggcgggtccaatcaaaacgtgtctcgagtgcgagggaccataggttacattgctccagagtggatcagcagcctgcaaattactgcaaaagttgatgtgtatagctatggagttgtgctgcttgagctggtgtcaggaaagcgagttctggatttggctacaagtgctaatgaggaggtgcatgtagtgctcaggaggcttgtaaagatgtttgccaataacttgagtggaaatgaaccatcttggattgcggagtttgtggattgcaggctaagtggccagttcaactacacgcaagtaagaacaatgatcacactggctgtcgcgtgcttggatgaagaacgaagcaaaaggccaacaatggaatctatagtgcagctgctccttttggttgatgaatcttgtagcagtaatgttctatgtcctgagatgccaacaaggtggacaactggacacgccaaggcaaatgcaagtttttgtattcatagtttgtagttctatctcattgtatggaaattcggaaactcttgtacttcaaactctaggcattcatttattcagatgtgctgcatattccttcacaaattataataaagtatgctattcaagaatatctgttgtgatgtacgcattgtctagtatatttaccatctttttgcctcatgagttccagcaaagtcataggttcacagatagtgctgaaatggggctcctctcctatctttacaatacagcagttgcaattcaatcatggaaaaatcacagaatgaatattattggataccaacaggtattaaaggactttctagttgatgatattgctcagtttgagaatggaaaatatgtttgattgacattgttattaggtcgacttcgactaagtactactatattaattagctaaatatataaacttgacttcgactaagtactactatattaatttgctaaatatataaacttgttagtatttgatactagtttgatgcttacctgtgcataatggattttgtttagttacagtatgccggtgacaattttgaatatccatacatgtgactcgttgacctagcggcgttctccaggcgtttctttataaggtaaggtgtgctcgtgttcagctccatacaagtctacgggaaaaaatggccttttttttttcaagaaatgagatagcgtggcttcacaaaagagaaagcgaattaacatcaagaacaggaagcgaattaacatcaagaagaggaggcgaattagcatcaagtgcacttggcgaggagcatcctgtaagtacatacactctttacaagctactgagtcctctaatcctctgagagtgtctcacggtctcacggcgtcgtcggctgcaccacctccttcttcccagccggctcctgcacaggcacagcaggagcaggagcagggtcgaccggcacacccgagcgcgagcgccgccgctgacaccagcgccatccggaatccattctaatccttccatttcaaaggtaatgctccgccgcccgccgggtgtttgtcagattgtcacgcttattcagttgttctgagcctgagcattgagcacatcaggtttagcctgtcttggatggcgatacaagtggcggtttcttgtattaatcaccaacgccccccaagaaagatttggagtcgattatcttcattcctagctcatcttttttcttttatttatttattaattattttgtggggatcctagctcaggttcttgatttggccacatgcttgccaggatccaggataggacactggcgctggtgataggctgatagctattttctgcacattttataaatgttgatgtttcttcaaacattagatatgtgctgaaatgatcaatggatgctgcaaaatgaaatggtgatctgattctagttagcttgcatagttcaaattgacctttttttctaaaatttattgtggtgtaggattttctttaaagttttatatggttcagttcagcattctaatggtatttgcacgaatcgaatatatgcagtatgttgatcttgttacatagcttgaaaaaagtatcatatgcaaggagttacactactacatccatgaaaatg

SEQ ID NO: 17630 - DNA, 1390 bp, Oryza sativa
ttcagaaagcgtcttgaagaaatgcggtggtatgcctgtagctatcaatagtatagctgggcttttggcttgtaggcctgttaagagcttagaagaaatgcagaacttacaaaactctcttggatctgagatggattctttctcaaccatggagaaaataaagcagatactactattaagttacaatgatttaccctaccatttgaagacatgcttcttgtattttagtatcttcccagaggactacaagattaaaaggaaaaatgttgtccggcaatgggtggcagagggatttgtatcagacaagcggggacaatctgcggagcaagttgctgagagctattttgcagagtttatcaataggagtatagtccaacctttagatataagtgacagcggaaaggttaagacttgcaggatccatgatataatgttggaggtcattgtagagatgtctgttgaacaaaattttatttcacttatgggggatcaacatacaatgatttcctatgacaaggttcgacgtctttccttacatggccatggtgcatataatctatcaactagcttggaattatcacatatccgatccctaagctcctttggggatatgccaagagctttgcgctttgaccgtgcaagattgctcagagtgttagatctagaaagctgtgaatttctgaggaatcgtcaacatcatcatatttgtgcattgttccatctaaagtacctcagtctaagaagagctcacaacatagataggctcccaagaaaaataaagaaattgcagagcttggaaactctagatttaaggggtaaaggtatagataagttacctgctagtttcattgaactggagaatttggtccatttccgttcaggttctacctacttgccgcatggctttgggagaatgaaaagcatactaacattgggattgatagagatctcagatgacacatcttggaggatacaagaaattggctgcttgatgcaactggagaagctctgcatatggtcacgcgatggcatgaacaaggagaactgggagtccctactcaccgtcattgagaacttaagcaggcgcctcctgtcactctcaattgaaacggacaggagaacttgttctttgccacttgatttctcatcctccccacctcttctcctgcgaagcctcctgttatatggaagtttggaagcattgccaagttggatggcatcgctggataaccttgtgaaattaactcttggtggtactaaattagaggaggatgatatacagattctccagaagctcccacgattgttttctcttagactgtggtttgcatttgccgtagagaagtttgttgttgcgccctgagggtttcccaatcttcagttacttgcg

SEQ ID NO: 17631 - DNA, 911 bp, Oryza sativa
acatatcttggatttactgttcatatttagcggtaatcaattcatgttctgcacagtcttttacacttttcctcatatttttttccattatatacaatcaatttaattttacagtgaaactgaatatgtgaacagtttttcagctttattccagtgtttatgaattaatatttttcatcatcttctaatatttgataggcacagctggttctgtcatttggctgttcagaagcctggaggctgggccatttgatatcctgaagttttgagtaagaatggagaatgggctgtccgatgaagttcttaaagcagttttccctctactggatggtcaagacctagtcttttgcatgcttgtatgtcgtcaatggcgagaaattgcaaaggatgactacttctggaaatgcatatgtgcgaggaagtggccttccatttgcaagcaacctccttcagatgcaaactaccagaagctctatttaaccttctccaaaccacggacgccacagcaccttcctgtaccaaagctcacattcgaggatcttgtgttttacattgacatgtggcttgacggatcactcatcttctctcaagctgtttcaggctgcatccttcgaggaggtctgcagaatacaccttgtggcattccggatgtacttgtagcacatttgactgctcctgactgcattctgatgatggaggttgaacccaagctggaaataactatggggccatccatcactgtgtctgttcttgcccaccgaaaggatacaaagaagatggcttgcgtcattaataagtcaacttttgattacatcgacagcaacgcagcacgggcattggcatatgaatatctccagttttcaccaagatacccttttatatcagacatccgagcatggatgtctttgctt

SEQ ID NO: 17632 - DNA, 1721 bp, Oryza sativa
tacattatagctaagatgagtgagatccatagtaattctttaagacaagtgaaactatattatttataactaatttgtgtaagaaatattagttctccctttatttgttgaggcaagtgatgatcaaacaatcgatacttagggcccctttgaatcacaggaatgaaaaaacggaggaataggaatgacataggaatgaccgtttgattggactaaaggaaaaacacaggaatttgaagagagataaagactcaaaggatttcttccatgaggttctacctcttattaaaattccttcaaaacttatatggaaagatacattctataggaatttcatagaattccataggattcattcctttgattcaaagagcttcgtgggaaaaattcctataggaatgaaatcctctaaaattcctatgaatttcctttgaatcaaaaggaggccttaacaaccgtaataccttttctatcagttgatcacatttgctgagaataataattcaaacaaagcaactcctttgtcaacaggtctagggatcacaatcaacataccggacggtacaggtcttgggatgccaagcggtatttactgtactggccagaataattttaaattcaaatatgaaatttaactttaaatttgagtatacgaatttatattctcttgcgacttctttttttttagaaattcaggggtgagtgtgtgtctgcgtttgttcttgcaacttgtgtaggtatatttgtatagataaatgagaactcggagaggcacattcaatggggaaaaaacagaaatatagaaaactatatatggcccacagaatatcacacggcaaaaatccccaaaaaaaaaaactaaaacaaaagtttggcccagaaccaacagacaattggaatagcctatccgccttttcctggccataatgcacgaagatatattcattagtttcaccagtaatagaaggaactggaggtacaaaatgagtatagttacatagtatagttacacaaaattacttctatacagatgcaatatctcctcggttcatggcatctatctatcactccagtccagtctgtttttttttagataatgaccagtccagtctgttgaaaaggaagaaaaatatttgacaaacgtcacatctaatcagaagaacatctgcaatataaaaccattagcattttgctgtaaagcaatattatcatctatgcgtgaatctttacattaaacggccggcatagcatgctcgagggtatttttgctgcagctggggccactgcacgaagaactgatcagctattcgtagcttgtacaacagtaaaccgcttaatgaaagcttcttcactcttgcaatgctttcgatgtagaaaatggaggaccatcccaaaccaagcacctgcagaaatacaacaatccaaaactcagtagagatataaagcattatgctgacttggaagtgagacaaataatcaaatatgaagattggatgtttggatttaggcaagatggccctagacactgttttataacaaatacttcccctgtttcataatgtaagactttctagtattgcccatattcatttagatgttaatgaatctagacatatgtatgtgtttagattcattaacatctatatgtatgtgggcaatactagaaaatcttacattgtgaaacggagggggtaataaaaggtaccacaagtcttatactg

SEQ ID NO: 17633 - DNA, 1746 bp, Oryza sativa
ccacaacaattcgccctaaatcatgttctaattagggatggcatcagatcggaaattagggatgaaagaacacagagatatagaccaagaaatacctctcagagtttctctcgacgtgcgtctcagagacgctctcagcttgtgtgctgtgccggtgcgccgccgccacgcctctgcgacgctgcgccgccgccgcgccgccgcgggcgctgtcccgccgcgcctctgcaccgccggaagagaggggaaaggaggggacaggacggtggagagggcgaccggagaggagggacgtgctgccgcagtgccgctgccgcctgctggggaggggcgcacgcgtacaacgctgttgccgtgttgagctagcggctagccgctaggggcattggcgccggcggctgggagtgaggagaggagcgatgcggtgggtagggttagggttttcctgggcctaatgggccatatgacattttgtgctggtgttcagggttggcactacatttaaaagtctaatatgcacccctcgaagccccgcgggtgaattacctcccccgcccaattgcaggccccggccccgactccttgggtcagaaaatccacccacccccacctccgtagcggcagggtcccccgcgggggaaattgccatccctaggcgatagtgcttcacttattcttccaatccgatgaccaagacgatgaagctgacggtgatgacggtgagggcgaggttgactatagaagataccattgaaccgcaaactcaacagggacctctcacaaatataggttgaagcaaacccgataaataaaagaagattccatctaaccttgaaaaggatttgtccgagaaaaggaagggcatcaaattgatataatctatgctttttcctcgagggtctgcctgcgagtatccgagtatgatatttcctttatacccttgccaggagcggagctagaacaaaatgaagggggttccactcgcttgctttactctggtttgaataaaatttagcttgatacgggtgcttaagtttaaactgacaaggtatatatatatggtgaaaatagataaactataggtaaaattttttttgaaaccgggttcttagctccgccctgacccttgcaaacaaattatccttctaatttttggctcaacgggaataccatttatcttttttttttggttcatacgataatatatatacaagtgaaattcccatttgggtaaatgctaaaacctttcccttgtcaaagataacagcagcagatcacacgcatatacaacatgagaaactctgacaaacatatgaaagaaggaactataacatatacccaaaaaagttttctcaatcatttgagccattgagtgataaaaatacataggtaacatgtgttttcgaccatgaatcaagctcattaataggcggcagagtacattatgtttaaccatgcaaagaaaggtacttcgttgaaacatatttcggtgtaaatttagtgtggtacgggcatatccaagcacgaatttaagttcagcagtgatatgccgtaatttacacacatgttttgggctacaaacaagcgcgagtcttttcttaatcaaatggcagtcgtcctgccgcttcattacattacattacattcctaaacttgctacagaaaacaaaatagctttctcacacgaatccttaataacaaagataaattattttagcacacgatgtagcttattataatttgagc

SEQ ID NO: 17634 - DNA, 2429 bp, Oryza sativa
  unsure (1)..(2429): unsure at all n locations
tacgccaagacaagacgccggatatcgacttcagagataggcacgactagtcccttacggtgtctcaggatactgtcaggagagacgaaagcgctatctctgatctcgctaggcacaggttcgaggaggaaggctaccctgttgtcgactacgagtcagatcgtcagactgccatgtcgacaatagttagattggctaccccaaatattgtaatggtgtgattatcatgaataagagcaataccggcttcggccaacaggatatagggttattatatgacaattcaggggcccgaacctgtataaaaatctctgtctccatctcttttacgtcagtctcgcgtatatcctagtaccaacgatccccatgacatgcaaataccgtagtcgagacatcaaacgtcgacagtggcacgccaggtagagggattttggtgcttcaggattttgacaagatgggtttaagagatgaattctccgacaacaagctactcgacaacttcgctgttgggtgatctgaacctaccagaatacgtatcccgacaagatcggaaccatcgtcgtcaacaaattcgatttatcaagatcgctcaagcttcaacacgtcaatgccgtggatcacatcaattttgaggttgtcaatcaacagtgcagacaaccttcgagattgatcagtaccaatacacgcgccacatcaactggtggagggctcgattaaccgcgtccaagccgaacacggcatcgatctccaccaacaaaacaagcgcgtcgtggagcggaaatcaaagcgtcggattgatctgcttattggtgtaaatgctagtcggactcggggagtttccacgtctgcactactatccaatctctaggcagcaatctgattcggggctaaagacaaacaggtcaattaaatgaccagattacatggtacgtgcacgggggacagtaccatgcacgaaaaagcatattaaggagttgttgttcctcaccaagaaggcaaaggtatttagtagattgaatctactaatttcgtagatacatctagcatgtatctacaaaggtacgcaatattttatatgcaatttatcgtacctattcagatcatacagcattgtcagatctataatttattatgtttacctagagcatgttttttatacaatatttattatgcgagtgtttccggtgttaggccgacaacggtctaatactggggctcgctctattctcttttgtatgaatcatgcttgtttacggtttacataatgcctaatatttacatctgctcgttacatcctgataatactagaagatccatgcagttttctgagtacatactcgatattatctgctatatgtcttgtcttctagaaaatatttttcaggaacaattgagcactcgactaggttgtggtcaagtacaccgcattatcgagaacgatctcgacaaatgcagagtcgtcacgcccaacccaccaacgaagaccgacgacctatctcatagcacccgccatggctggactactcgagaaaaggttgttaacagataattcctcgcaagcgctgtcggcttgatcacccgacatgcatgcgaacggacatccggatatgctacaagttgggtgtgtgagtcatgctggccacatgagacgcacatgtaataaaccaactctagcacctccattggtgttcgagagataactctacacgttcactggtcctcgagccagtacatagcaatctctcgcactgcaacctccatgtgttcgagagataactctacacgttcgctggttctcgaaccagtacgtagcaatctctcgcaccgcaacctccattggtgttcgagagataactctacacgttcgctggttctcgaaccagtacgtagcaatctctcgcaccgcaaacttctattggtgttcgagagataattctactcgctccctggtcctcaaaccagtacgtagcaatctctcgcaccgcaacttccatggttcttgaaccagtacgtagcaatctctcgcatcgcaaacttccattggtgtcacgccctgaagttcccctcccttgctctaaattcataaaataaatcgtccgaagaaattgtttaatttaacctagagttgaatccttaattaataaatgcaaataatcatcggaatcggcatgtggaatttttcttggattctacatgtcaaaatatgctaacaggatttttagtggaattttcagagccttggaaataattttaaccaattaaaataagcaaagtgcaatattaaatccctgggaaaatcctttttcctttttatctttcctttttccccctcttttcctcctttgggccgccggcccatctctcccgccccctcccgaagtccaggtcgcctccccctttctccctcgggtgctgacaggnnggggccc

SEQ ID NO: 17635 - DNA, 3171 bp, Oryza sativa
ttcccgcgcctccggttgccgtcgccggcgaccgtgcatgcgcgccaccgccctcaccataaccggtcggccggtttgaggccgagccgagccgaccggacgtctcctcctccccatgagccgccgctcggtggggcccgcttgccagccgcccctctctctccttgagtcactgacccgcgggtcccgcgtgtcggcgccacccctccttgtgctgacgtcagccctgggatgaattattgcgcaataaattgattaaggctttttctttattagtaaaaacacagataatcttctaaaaatcataactaattcatccgagctccaattaagtccattcaagtctcagtaaatcaagaaaaatgtatagaatccattaaaaatggttttgtttcctgttttagtagtcttatagcatgttttgcttgtgtgctttgtttgtagcgtagatttcgcccgtttcgtcgattcgtggtttctcgaagacgttgctgtggttccatcagtgcgagagcaaggcaagtcatacattgcaattgatcatattgtacccaatttacaaatgtcccgcatttctattaaatattgcactgttttacaatatcatgtgggatgggtcctattactcagctatatgttgtttcccttacgccattgatagcttgggtattaaaatgactagatgttggtttaggagatgcttagccatgcttagttcaactaatgcacaaaaggggatcacactaaagcatagactttgattattggcaatagctttggattagtgccaccgcaatggtgttggtgaattaaagtacactacatggtgggctgtgggtgcatggttttgctagtcgtgcccatggcgattaaggaccggttcgcgggatgccctggaagaacttatcgtacttaccacaagccagcgtgggcaacggctgggcttgtagtgtagcttttctctagccgacatacccaggcgagggtgggcgtgatggagttgggtcggccggggtgtccggttgatcggcttccggattcaccgcggcacgaaaggggggctgcccgttacctgctggggacggggacgaaccctaaggtgtggtgcgatcggttagagagggttatgcgaagggtcctgtcacggcctctttccggtatgtcgtggtggcatgtcggcgcacgggaacgtgtcgtggggctgtgtcttgtgggtacagttgtacacctctgatcagagtaaaactattcgaatagccgtgcccgcggttataggcggtcgaccagattcaccgtgattagtctcacccctagtttagcttaatgaactagtgtagttcaggtggttggttgggcctgttgcaacgtggcgtagcgttggacagtgactggttaatattgcttaattactataactgtttttactgttttcaactactggttttaaatgcccgctttatgcaaatgaaccccgtagcctcctttggttatatcctgcatcatacctcctcttccggtatgacttgctgagtacagtgggtagtactcagtcttgctcttttcccccacaccagagttgaagttcttctcagttggagatgtcttgaagaggttagtttcgtcgctgccgtcaagggttgcctgtggaatggaatcgcccgctgcaggagtcaagtcttcaggcttagctcgcttttatctttttccgctgcatttgtattctttcatatttttgtaagacgtggatctgtatgtcaacaattgtcatttgtgtaccctggctagtcctggacaagggtttaatacacattcagcttagaaattctggttcgtgaatttctgggcgtgacaagttggtatcagagccgaccttgaccgtaggacaagccaactggaaaacctaagagccctctgaaccccttttcatatgcacatgccttcttcacttggatttgtttcgggaaactttggggtttgatcttttgattttgggagaaaatcttggtcgcctatttaatcggatcttttgactagggacagtccagggttttagcaaaactttatttggaatttatttggcagtcagtcgggaattgttaggtggtatgcattaagttgtgtctagattcgatgggatgtagtctttatgtgcatcattattatcatgcatttatttcatgcattaagttattgtttagtcagttgcattagtgtcttttgtctgggttcatgaaaaatgttccatgcataaaaatcatcatgcttggctagttggttgggccatttgttgcattgtttaaatttggatttgagcatgcattgattcctatcccttgtctaccttagaagtcagacctgttcttcgatcgcaagcgccgctccgagcttcagagtcaccgcccttagctttatcgtcttcttagtctgtttgcgtgctagtttttgtgtttaggtttgttgcttgtgggttagtcggcggtcgatatcatgtgtgagtggtatgacagccttaagtaggaattgcgtgcctctttttcagtgttttaatcaagattaagataattgcacttaattttataagaaagattagtttccgagccatttgttttcttcctttctcttatttctacctatcctcatccagatggtgaagacaaggaatgatccccgtgactccaacgacgccagtggcagcgaagagcagacagatgaagctcataccagtggtgcacctggtagcagttcatctccaccgcccgagaacccaacagtccctcagatgatgacaatgatgatgcaacagatgcagcaacattaccatcagatgttgcagcaggcgcaacagaaccagcagtttggtcctccaccatcacacgtgtccaaactgttagactttcttcgtatccagccacccactttctcaagcaccaccaacccaatggaggccaacgactggctccgtgctattgagaagaagctgaacctactgcaatgcaacgaccaagagaaagttgcttttgctacacaccagttgcaaggtcccgcttctgtctggtgggataactacgtggtgacccgtccagatgcaacgaaggttacttgggtagagtttgtcaaaactttaggaaggcacagattcctgaagggattatggcacaacagaagagagag

SEQ ID NO: 17636 - DNA, 1064 bp, Oryza sativa
cagacaaaccctataggtgcccgcacgaggctgataagagaagtctaaacgttatctctaaactcaccgagaacggtcacatgagctcgataacagttactccaaggtctccgcgcggttgagaatatgaattcgttcatttgcattgaagtcgggggctactgtcagggttatggataccacatacctaatagtagttgactaaatctcggcaggactcaccacataccatgtcctatacggaaacaacctacggatataggaggagttccggacaaggaaagacaaccagagttctacatggaaacgacaaaggactaatcggattgtatccatattggtttccctagttctacttggacaaggggacacctatgggtataaatacaaggcccctaggaggagaggggacacaatcgacacccaccatagaagacacggacaatacacacccaccacaatatatgggcaacatagacgccacaaagccacaagccaatataagccaacatacgccaagacaagacgccggatatcgacttcagagataggcacggctagtcccctacggtgtctcaggatactgtcagaagagacgaaagcgctatctctgatctcgccgggcacgggttcgaggaggaaggctaccctgttgtcgactacgagtcagatcgtcagaccgccatgtcgacaacagttagataggctaccccaaatattatactggtgtgattatcatgaataagagcaataccggcttcggccaacagaatgtagggttattacctgacaattcaggggcccgaacctgtataaaaatccttgtctccatctcttttaccttagtctcgcgtatatcctagtaccaacgatccccatgccatgcaaataccgtagtcgagacatcaaacgtcgacagtatgcatttccatgtattagctaaaacattgcgtacgtatgagggagatcatagccacgctggtatagtagtaggtaagttggaagaggatcacgaattgactttaggttctgttgctttgttgcacgatgagggctgcaggaat

SEQ ID NO: 17637 - DNA, 3034 bp, Oryza sativa
tgctaccctggttgccttcctctctgctgacctcaccaattccggcgggcccatgatgtcaccagccttcacactctcactgatgccctccaatctggtgtaggaaggggaagaagatggagggcgcaattggcattggggacgtcatcgattggttctctggcaaccggagatgggatcgcaggaagagagagaggaggaggatggtgaccttggggcagaggagtcgagggaggaggatggtgaatgtggggcggagtcatcgaggaagggagggataaggtggatggcgactgtctgacgaagacgagggagaaaacggatctgagaaaacagaaaatggttgggttgtatatttatcccgtagccgcacgggacgccgttctatagtttttctgtagaagaatagtatgttgcgtagctgccatccaattattttttttgtaccatgccaaattttaggtatgcataatgattttaagaaagtcaagatcacgaaattaatttcatactccttgtgtaggttctggctgtttgtgctgaaaccatgatcaaatggaaaagttatggaaagaagtgaattgtaaactgaaattttgaactttaactcctttctaagatgataaatccagagccctgaaggtatcatctaactctggtgaaaattccatactcttctatctccatctttatcccattcaaatctgcaatgcctggccctattcattttaataaatatgtatctgagtttagaaatagctacagggtgaattcatatgttgaatttctttcttgggataacaaattagtttatgccatcttgtgggaaatattttcccctctgaaaactcgtttatgccaacatcaaattatagaagtgtttgtccatgatgagtcataaaatttctcaaagagttatattttccccgttgcaacgcacaggtacctgactagtttgacagatttttctcttgatgacaaaccaaatccaaaaaaaaaaaatccatttgtatctttcatcattcccacacaagccaaaatccaccaacaccaccttaagaagttgaagttgaaacattctcttccaccctccccaaatcgataaatcctctttccccactaaatttcacctcgaagtcatggttaagaaaaaaacatacttgcattcaacccaccttagactggttgaaccggacgattttgagctgaaacagacaactttgatactaatggaacatgattggaccattataaggcctagatgtttcttcttttttttgagaaatgtagtacaaacgcagacgctcacaacgcgcatacactcacccctatgaaagcacacatgtacaccttacccctatgagcacatccggaagactcgggcgcctcgctgttgacaggtgcattgcttaccactgaaagaataattagctgtaaacgtgagcacccgtgccaaatctaagacttggacccgggtgggttggttccaccacaagaaacctaactagtttagctacgctgtgggatcgagatgtcgactagaggtggggtgaataggaaatataaaaataaattacacctaatcaaaactaacctaatttgctaagctttgtgaaggataagtctaactaagcaactaagttaaggtgtgcaatcatagggtgataagggctcaaatatgtctctatgaaagtaaattgcacaaaagtaaatgagatgagaatgaatttttcacccgaggcttgaaaactcactggtttgcttaatcctcgttgaggcaagcccaacttcaccgctcaaaaccacgaaaccaccgtaagccccctccgtcaaggggtgggcaacgtgggtgccgggccacgaagtggactacccaagcctcgatcactagggtagttcttccttccttccaaaggtggtgaactccaaaccactcacaaaccggcactaggccttctctataatctccttggagaggtcaccgggcaacacctccacaagccttctaggaggcagcaatctccaagagtaacaagcaatgacccagctcggagatgatcaagtgtcacgccagctctacaatgaagcaatgcacttgaattttggctcaattaactctcaaacacaccaaatggatgaacacaagagagtgtgaaagtagttgcaaaaagtatatgcaaatgaagcaagaaccaagagaggccccttactactggtgggggtgtatttatacccccaaactacaaaaactagccgttggggtcgaaatgcccaacctctgttgcctaccggtccgaccgtcattgggtggccggttagaccggccaacagtgtaacggctagttttctagccattacaatgcattaaatgcactggtaacgggtagtctggtttgatcggagtaggccggcctgtcaaaccagccgcagctctggcggctctgtatcgccagttgaggggccgtccaactggctcacaacccactgatcagatggagcctagcccagtcagaccgacactggtcagaccggtgcactccctgcggtcgaatcggccaaggtagacaagctgcaagagtataagaaatcgtaccaagtttcaatgcatatgacctaatgtggcattttgatcatctttttgcttaggtaattacccctattgatggtatggcaaagctatacataaatatagcaaaattcgatcaattaaattaaaaccgttagttttaccgtcttcattccttttgctttgcgccatcgattttaatactcggtgatcatccacggcatacacatcatgtggtcctatctcaaaatgtataactcaacataatagttagtccacaattagcttgttattaattaccaaaatcaactagggggcctagatgcttcatacgctcacttcgctaaggaccaattgtttctgatggcaccatttggtttcttccgaagatcagatacgcattcaatccgcctttacatcagctaaactaaacggttttgaaacgaatcattcattgaaccaccaccg

SEQ ID NO: 17638 - DNA, 7541 bp, Oryza sativa
attcctgcagccctgatgccgtggaggagggctgatctgcggtgggagaaagctcaacaagggtagagcgagggagggagggaggagtatagttggccataaggcccgagcccaatggcccggcccaaggcacaggattttggcccggtctaggcacggcatggcccgatcactgtcgggcccgtgccggcacaacccggctgttgggccgtgcctaggcctatgcctcggcacggtgggctggcccagcatggcacgaaattcagggatgtgaaatatacttattttcaaccatatgtaagacagggcacaaagaatagggaggacaattagacgtatcatatatatatatatatatatatatatatatatatatatatatatatatatgagggaggggaaatagacttatttcaataaaagcacgatgggccgtccgtgccttcggatcagcccggcacggcctgatccttattgggccatgcctgggccacaagtggagcacgtgggccagcacggcacagcccgccgtgtaggtcgggccgtgccggcccaacaaattttggctcgggcacgaccgggcctaggctgtgccgtgccgggcggcccatatggccaactatagggaggagtaggccggggaaggagggaggggctcgccgctcgccggttgtttctgctcctcgacaagcttatccaaagaggaaggaagaagaagagatagatggtcttactagtgggaccccatgttaacgtggcgttcaacagtaccaaaactagtctaatacctctttagggggtgaaatatccggtattgatagttaagaggtgtagtataaccggttttgtagttagggggtgtattttggacaatcataagagttcaggggggtaaaatggacttttccctttttatgcaaaaccaccttagagggttatataaatggtattgaaaagtttagggggggttgaacgtctgcttctcaagttcagcgtgctagacggatttccatatctaaagtttagtgtgggtatttggactttttttcctataaataacaatatctaaacttacattgttggggtttgttgtgtaccttccattaactataagcatctcgcgcacataatattcacgtactatggagcctaggggtttctcgaaacacttcaaaagaaaaataacaacgctaattagaatcaaattggtgtatatatgcatgaatttaaggtgtttatgtgttatgtcattacatgccagcctgttttaacttgcagcttttgtttttatcctatattgcccatcctttagacatgtacattctgtgtgcactgctcgaacaaagtaattgacatgttttacttacaaattttttatagtaagaaggtagagtggacgaatttacttacaaattcaaaattgtaaggaactctacaggtatctacataaaagtttggcatgtcacaatatgatcaagtattctgtcggatatatgttcgtaggtgggctatgtaacctccgtggactctctcggcctggttgggattttgacggaggtcgtcagcgaaaactgatttgcagtgtttggaaaaagatattccctcagctttacatgaatctcaacacagtatgatgttccaatattgtatatcagtatgtcacacaatattgtagtatatcagtatatcagtcttagtttggaatgtaaggggccttaataacagtggaaaaaggtccctcatagcgaatgttgtgtcttcctcccgtgcctccctctcttctgttgtcaagaatccaagctggcggttttagaccagcagctagttgctcaaacttgtggtgcatctcttgatggtttcgattttgtttttccagcgatggttcgaggggtggtgttttcacggcttggagaagtgatcgctttatggtctcttgcacccacaagggtcattggtcgctcaccctaagcatcaccaacctagaaggaggtggctgctggttattaacaaatgtctacgggccacaagacgctgctaacaagatccttttcttggatgaactgctcctggtcggccaacaattggtgactgggccgtggtgtgtcgtgggagatttcaacctgctgtcggctgattcggacaagaacaacagcaatgttaacaaaagattgattggcagatttcggaacatgatggactcgcttgaggttcaggaggtttatctctttgggaggcgatactcttggagcagtgagcaggaaaacccgacactcactaagattgataaagtgttggtgaatgctggctgggaggatttgtttcgtgatgctcacttgcaagctcttagttcttcggcctcatatcactctccgcttctgttggcctgcgacattatgatgcatcggccgcgaagatttaagtttgaatctttctagtctcggctggagttttacttaggttttgatgatttgttaaggaaacttgggagtcggtgcaaacaggttctgatgccatttgcactcttcatctgcggttgtgcgctactgcagctgccctcaggaaatggggggaacgtcgaatcagcaagctacgtctccagttggtggtggcctatgaaattatcttccagctcgacaaggcgcaagatgataggctgctcatgggcgaggagagggcattgcgggctactctgaaggggcgttgccttgccctggcatcgctcgagcggattcggctaaggaaacgctcacgcctattattcttgaggtatagcgggacatccgcccaattccatcaactaaaaattaatgcacgcaggtgtaagaaggcgatcgcctcgctttttcactagggtttctaggctacaactgaggaggacatgcttgaagtcacccatgatttcttcttcggcatcatgggctcgcctactcagaggtcagcagcaatcgacttcgcgcaggccggcatgcatgcttttgacctgttggaacttgaaacagacatctcagaggaggctagacagatcaattttgctatgccgagtgagaaagctctaggacccgatggttttagcggggttttttcaagagatgttgggaggtgatcaaggatgatgtggttgccgccatgaaacttacttggagagtgaatgcacgtcatctccacctcttgaacatggcctccattgtgctgctgccaaagaaggaagagccgactcattttggggagtatagaccgatcagccttatccatagctttgtcaaaaactcaaaatcctcacgaagatcatggcctctaggctatctgctagaatggatgagatcatcaggcaatctcagacggcatttatccggaaaagaagaatccatgagaactttctttatgtccaaggagcagtcaagcttttgcaccgtaccaaaaagccagctatgttgttgaagattgacattgccaaagcgtttgatatagtctgctgggatttccttcttgagctgatgcaatttctgggtttcggcaaccattggcaggactgtgtcgcatctctcttggctaccgtgtccatggtcgtttccatcaatggaagggtgatcctctttcgccactcctgttttgtcctggtgatggacactttcgcggcattgtgcaacactgttgttaccaagaacaccctctctcctctagccagcgcccagattccgctacgggcgtccttgtatgcggatgatgctattatcatcctccatccctccaggcaggatgtcgaagtgatccaattcattcttaagctcatgggcgaggcaacgggcctcatttccaacctcgccaagaactcctttacgccaatcaattgttccgagactaaaatcttggaggtaatagaggtgcttggatgtctggttaaggacctccccatcacctatctagggctccccatgtctactcgtaagctgtcaaaggcccagctgctgcttatgttggataggatggcgaagaatctagcaggctggaaatcatgcctgctctcaccggacgctcggctcgctctgatcaaacatgttctgatggctatcccactctatcttttatcggttttggaattacaggtgtgggcggttaaggcaatagagaaaaaatgttgcggcttttttgtggaaagaggatgaggatgcgtcgcggggggggatgcagccttgttgcttaggaaaaactcttcttgccaattgagaatggcggtctgggcattgtcaatcttggcagaatgggcattgcaatgtgaacacgttggctttggttgcagtgttcccaaccggagtggctgtgggcgtccttcgcgccggctcaagacaagaaagccgagcatttccttgctgcgggttgcaagatggtgttgggggacgggaacaacatcttcttctggacagacaactagctcccggatggaggttctattctgaactgggcgccaattttatgttcttacgtcaaaatcaggggaaggacagttcactcggcactgcaagaggatgcctggaacggcgacatcagggggggttatcgctccaagctatgatggaatatctccaagtctaggacctgatcaccgctgtcaccctgaaccctgctcagtcagacgtattctgttggaagcctgctacggatggtgttttctcggtgaaaacggcctactccctcctctgcgccgggaagacgtggtcggcggtcggcagattgatcttgaagtcccgcgcactgacccgctgcaaattcttcatgttcctcgccatgcgatgggcttgcttgacgacggacaacctccagcggcggggctggcatctcgcctcgttctgtcacctctgcgggaatgatgcggaaccctgcgcccacatcttccactcctgtgattacacgaagtcggtatgggcgcaggtcagaagttgccttggcatttcctgtgattctccttctagcgacatgctgagttggtggtgcgtggcacgtaaatcggttcacaagacggattggaagacattcgatgcgggagttatcctggtggtgtggttaatttggaaggaacgtaatgcgtgggtgtttgatggaaaggccacttcagcgatgcatctgtgtgcgaccatcgctgatgagtgggaagcatggaaggccacgggtttgttgtgcgccattgattgtggttagatagactagtcattttaggctctccctacggcggttggttggttgttgcctctaccgttcttggtagatggtattttgtaaaaacttctcttcttcttaatatacatctcggccggtttttgctggtccggcttaaaaaatatttgtagcatatatctgcatatcactgtactccaaatattgtgtgacgctattttacaacactgacttatttaacatatcagaaaacgtggtgtttagtgatatttgcaacacttaaaatttatagcattttttttcattcacagggatatgaagcaaccagtgcagtactttcccagtttctaacaatttatactggataagcaacagaacacgcgttgggcctcctgctatgccaacggggcgaaaatcattgaatgatgtttagggaagacctttgctaagattgtcagcatattagttgtgacgaggaagggacatgaagcacatgaacaaccacctagagccagacaatactgcatggaacgagggaaaaaaatgttcatgtgtggcattctctcaaatgacacgaggttggttgctttgttaaaatgtcagaaaattcactattcaatttgccaatactaataccatcattgaggattgatccctaatgacggttggagggtattaccgacctttccaaccatcataaccgtcatactcaaagctataaaagaagctcctctaattccatttcacacacacttcaagcaaagctctctcatattctctcaagtttaggaataaattctctttctgttatctttccacttagcttagatgtattagtatgagaatgagtagcttactacttgtgtgtcactctaccctttgatttattgacttagactatgattattacaactaacaaataaattattagtacggttctctctactatgatcttcccacgggattaaataaatacgatacccttggaatactctcgggtgaaatgctacaatggtatatccgtgcgcttgcggatgaactctgtaaccataatataccaagagtatttatgcgtcattgctgggaattatatttctagtaatatcgttaagaaataccaacaagcatttctggcgccattaccggggaagatttataatagagattaccaatactaatactttatttttacctctgtataatcactgtcctttgcaggctaaccttggttgttttcacttttgttgtggaaacagggtagtgcatgactagtttcaacttgcgaacgatcaagtttttagagagcgtctcggcgcgactgctcctgttcttctacgacaacgctgcttcctctacttctgcttcaccatggcttctactggagagaacgggaacgaaggagacaacatgaacgggggcaatacgaatgcctcaacatcttctgggtataagattttaactttacttgattttcttctttttatttatgtgttcacaatattatccataggattacaatcctatgtgaatatcgattatgtttatgcttatgttatcaaaagcatgctcatgtttatgtttagcatgtttatgtttagcatcttcactagatcgcttcttattgtgtatgtcatgtttattatcttaatattttggattaaaatatgtcgaattatgaccatattttcaacatatgcagggtcattaagttttttatcctagaattttcatgactatttgcaccataacgcgtgccgaatatttttaggcacatcattaccattactttggacttttaaataaaacattatccttctcgaattcccaatcccagctacataatccctccatcctaaaaaaacgaatttaggtttacatgtgacacattatagtaaacgaatctgaacagagatatgttcagattcgtagtactaggatatgtcacatttagtaataggttgattttttatgggatggaaggagtatatcagtgtactccaaatattgtgtgacggtattttacaacactgacttatttagcatatcacaaaacacgatttttagtgacatttgtaacacttaaaatttatagtagcattttttttcattcacagggatatgaagcaaccagtgtagtactttcccaatttctactaacaacttatactggataagcaacagaacgcacgttgggcctctgctatttcaaccgggaggtctgcggatgttgagactagagcgaaaatcaaaatcgtttaacaaggtttagggaagacctttagtcgtttaacaaggtttagggaagacctttggtgaaattgtcagcatattagttgtgacgaggaaaggacatggagcagggctgcaggaat

SEQ ID NO: 17639 - DNA, 882 bp, Oryza sativa
attcctgcagccccttgaggatctttcatgatctcctgaaaatatcaacacgagtcgtcacaaatgcacactagaaaatttttcatcattgaacattttcgacaagaacattataaaaaacggataagcgaaaaaatcatccgagtttaaatttatttatttaccatgaggatcggacagatgaaaggagcagggatacaaacttctggtgatgccggtggaaagtacgggcaagaagagggcttcctcatcagtggcctgacgactctccacacatcgttcaagagatcgggccgtttctcccttgccatttcagcgcatctaacaccaaggacagccagctgtttggcctccttgtaaggccagtctccagcagatttatcgatcagcctgtgcaggttatcactctccaattccgctgcaactttcttggacagattcaacggtgccatcccggtcaatagccgtaggatgatcacaccaaatgaatacacatcggagagtgttgtgagctccccggtggtgatgaactcagggtccatgtacgacagcctctccatcaggttgggtgggcaggtcccgggctgcaagaacaggctcgataggccgacgttgcagagcctgcttctgtagctggcgtcgtcgtcgatgaggatgttgcaaggcctgagatcgccatggatcaaagcagcagtaggaggattcttgttgttcgagtggaggaagagcagcgcgcagcagatctccccgatgatctgcgtgcggttttgccatggtagaggtgttgaattgttcgcgcaaacgatgtggtcctcgaggtttcttccgtttggtaaccattcgtacactagggcggagattttcgagcatactccgataaat

SEQ ID NO: 17640 - DNA, 663 bp, Oryza sativa
aaaactacacctttggttttagtatacttctttttcatgcatgtcttttaatttgatggatttgtgtgggggaaaatgtttcgcttgagcttctcgcatgctctattcctgttttatttcatcaaattttgtgaatctgtaagattaattcgattcatgggtaattggtaagcacgacatctgtgccattttatatcgtataagcacctttgtactgatgcatattacataagggccatcattttttttcatgttgcttttgccttccatactaagctggtcctgtagcattttggagtttttatggctgtgctgaagataataatttgagcagggagatggctctggtcacaaatgtgtgcgaatatgaagaacttgcaaagcacaaactgccaaagatggtttatgatttctatgctgttgacgcagaagaccaatggactctcagggagaacagtgaggcattctccagaattttgtaagttgtgctctaaattggtagggaatatctgaaaatggagatagggaggtcctgattttgtgttatattcatagaagttattgttaggatgtagcttttagttattttcatttgacattgtgttttgattttgaaataaaatatattacccattacttcgtctttcaaagtatattatggtg

SEQ ID NO: 17641 - DNA, 1451 bp, Oryza sativa
actgagtattcggttaaaaataaaaaattatagtgtgaatcacatcatcaccccactctctttccccttattctctcccttactcctctctttccctttcaacatcgtcgtcatctaaggcggctcttgttgtacacaagatggttgggacgggggcagcagcggcaacatcttagacaatggtgtagtcagaggcggctgcaacaatagtgcggccaccaacggggtggactagtcggtttgtggctaatctaggctgggaagggagagggagagggagagcaaggtcatcagaggagcaggaggcgctgcagtggcggaggagaaggaacaacgaccccgcgggcccttgtgatcaagtggtagacatgatgaggagggagatggtggtgtggtggcgaggacgacatgttggaggggaagctgtggtggctggagtcgctaaggtcggagccagaggggctgccaagggcattggtggcagataacgaaaaggtggtcgttgctgcttgtttgcttgagcgggcggcccagaagcaagtcgtcggcagtggcggaatcgttgtctagcggcgcgaggagtgcatcggatgaggtgtggtacttgcacttgagggtggagttatggtggttcttgatggcattgttggtgcggatgacgaggagcctaacgatggtggcccacttgtttgccgaagcaagcgtgggcgaggaggatggtatcatcctcctcgggcatgatggggtggtgctctacccacagtgacaactggttgcacaccagaggcgccacgacttgctggacctccccgggatggacttctaatgagcgaccagtcgcgcgccttctgcttcaccacctgccgctgcagcacctcgtccttccttgggttccatcatgatgatgaaagggagagaaagaaggaagggagtgaagaagggaaagagagggtcatgatgtgggtcccaccgaactcactgacatgtgggtcccatctaactttaagtgccacgtcagtcgaaaacgtcatccaaacagtcttgggatcttatttgcactgattgggagttgaggtatgcgttatatctggtattgcggtttaggatgaatttcagacttgacgacatagtgacagatataacatgtctgcaataagttcactttaggttccttatagacttcaaattgtatccttgaactgcaatactagatgtaacatgtctctcaacttataatatcggagtacccgagatcccagagtagcattatgtctaattttggctgatatgatgagttgactgcagtcaactcgacaagtcattgtgggacctacatggaccctacatgtcaatcacatgaaaaatataaaaagaagaatagaaaatccatgaaatgccattgacaaacaccctaatcgaagaaatgccatcgacgaacgcgacttccagga

SEQ ID NO: 17642 - DNA, 1855 bp, Oryza sativa
ggcgcgttggcagcaggcgtccgcacaacagtcccaggcactgacgcattgggggaggttggccggcgatggtgaagctactcttcttctgttgcggcgcggcggccgccgccgtgccgggccactttgcgagcacgcagcgacggcgcgttagcagcaggcgtctgcacgatagtcccaggcaccgacgcattgggggaggttgtccggtgatggcgaagctgctcttcttctgttgcggcgcggcggccgccgccttgccgggccactttgcgagcacgcggcggcagccttcgacgccgcgtacgacgacgtcgtgggcgcgtaacgtgggttcatgcggtcgcggacgcgtgtgttcctcgtcatccaccgcgccccgctcgagccgcgcgtccgctgcccctactgcggcgcccgcgtctggagcatgaccaccgccgggctcgcccgcctctcctcctcttcctccagcgacggcgagcgaagcaccgactctgactccaaccacagcgacgacgagacattcgccaccgccgatgtgagcctcccacttcctctggctggccgcgtgtcaggccggcgccttcgagacagaccgcccatgtgacgcatcaagcattagcggtagttttttttgttttaccggtggattgggatagtattatttggagtgagggcaatttagtcattcttgtaaaatattttgttctaacagtgtggactaatagtgtgatggcatttctgagagaaatagccttgtatgatggcattttcaggaagttgcgcttgtcgatggtatttttgggattaaggtggttatcgatagcattttatagattttctcaaagaagaaaccttctctactccctctgtctcctcacatctctactccttgctctgtagccaccacatcttggatgaatccgtcgtccctataattgctcgccgccatcgttcctgttcgccgcccgttgtccttccaatatggagatatttaactatttgccacttttagatttggcatttaactatttgccacccatatgtctatgacacgtgggtctacatgtatctatgacatgtggatccagtggcaaatagttaattgccacatctaaaagtggcaaacagtagaatgccctgagagagatggggaagagagtggagaaagggagggagaggaggaaaaagactggactgttgacatgtggggcccacgtgggttcctcactgatttagctgggttgagcacaatcgacttgccacttcagctgaaatatgatgcaatactgccatagagcttaggtactctggggttataagttaatgggtatggtattgtgatgtaaggaagaatatgatttaaactcctgtacctaaaagttaacttattgagaaacctttagaactcatatgagacggaaaatgtactcctctacattttggcacgtttggcatagctccagctcggcgcgggccagcccagcttgcccgcaaggccgccccgcaaaaaatcccgcaaggccgccccgcgagaaggccgcatagctagatgggctggattgacccgcgtccgcgtggccgccagtagcccactaactccgcgtccgtatgttcccaaccctagttcggcgtttccacatgcgagatcgagcctggagcggctcgccatctctgccgccggtccgccgcctcgctcgctcgctcgccgtccgccgcctcgctcgctcgctcgccgtccgccgccgccgccttgctcagttgctcgtcgtcctccgccgccgcggcgccagcacgcctcgtccttcccctctctcggctcaggtgagttcttgcctcttcattttttttt

SEQ ID NO: 17643 - DNA, 2697 bp, Oryza sativa
  unsure (1)..(2697): unsure at all n locations
aagagcatcagaagcacgggagcaaaaatttgaagaaatcattgcacaagtcggaattgttgaagagaagcgtccttcacttgatgtctccactcgttggaattccacctatttgatgctttcctcatccttattattcaggagggcttttgattcattggatcggtttgatcctaactttaaagatgctccacaatttttcgattgggagaatgcagaagttctttgcaaacatctcaaggtcttctatgatgcaactgttgtggtttccgggacatcatatcccactgttactcgctactttcatgaattttggaaagtgaaggtgatgattctaaatgagtccaacaatgaggatgatcttgttgctagcttggtttctaaaatggatacaaaatttcagaaatattgggatctacagttcctgcagatttgggttcctgttatttttgatcccagatttaagttgaaattccttgagtttaggctgaaagcaggttttggagataaggcaactggtccaaatggatatctccctagaattaagaggacagtccgtacttggtttgctgaatattcttcacaaatttgtggtccaagcacaaccaattctcaagaagcatcaactagtggggtgaatgttggtggcagccaatttgctgactagaggcaatatcttcatgatcaaagcaagagtaaagtaaagactgagttaactagatatctcgaagatattcctcaagaaaatgatttccctgatgatgattttgacatactctagtggtggagggtgaactcttgcaaatatccaatatcatcacgcatggcacttgatttgcttgctgtccctgcatcctcagttgcatcagagtctgcattttctactggataaagaatcattagcgactataggagtaggttggctagtggaactgtggaggcattggtttgccttcaagattggatgcgagccgatggtatgaagcctactttagttgtgcattgctacttatattatgggccatgaacttatttatgttgaacttttgtattctgatgttttaggttttggtgatccatattcaattcaaactgatacggctgagggcgatgatgttaatatgcaactattgggtattcaaattacttgattttatatttctgtatgtctaattgaatatgggtactatgatgatctaataataatttacaatttattctacatttgcttcttaaatgagttgctagatctggaaaaagagttgtgtacacatgctgcattaccccctcaccatggtcataaaactgtaactgaaaattgtttctgttccttaaatagtactacataattttatcttcatttctaggtagtttggacctctctttttgtgggggtcagattcacttctattctgttagatagcttttaaattcaatccaagatgttctggcactggcaatgtagattatgttccaacttttaacccctttttgttgtcactgggcaggacattaaatcatttgacatctcaggcaaattaccatgtgagttctatgcaatctgggttctgagaaattttgctagttctggagcagtggtaagtggagcttgctttgtttcccagctcatatcagtgtttcccacacatgtcagattacatccaaaatttgtacgatgtattggaaatttagttgagcctgggatttctggacttcttttctgccgttgagcctgaaattcatatttgattttgcctggtgaattctgcatgagtgacaggaatagatgcaaggattaggcggctttgttgctgtcaggatatgcatgtcttttgagtccctttttttttcccctttatgctgttgttaagctatgaatattttggaaggggatttttttagaacaatttgattaaggatcggtggatttttatgccaaattgtagactctgcttttcgctgcagtcactgtctttcagaagatttcagggcccaagatggttactaatatttactgattttctgtttcatctgaagattcacctctgcaagcctgcatttttgcttatactgaagaactctgaatcttcatgcttgcataccatatatcgcaattttttttcctttcatcttggtttaattagcagatgtaattgttgccacagttgaagagaaggcagtaatttttcttgcattgacagtgacaactaatgctggatactaaggcagtaatttctcgtacgaattgaagcccatacgagagtgattacacatgattttacacgcataaacaccacacacacatttgcgggacccgcctgcaagccgccgggcaaatgcgggcgtgcggacgcgggcgcagcctgcccgctccagccgtgcgggcaatgcggacgcggcgcgggctgtccgcaaccgcgccgtctgcacccctaccgtctgcctccgtgtccgcttccgcgccgaggaaatcgagctgccattgcggcgtggcgcggcagcggcatgcgtggggagcgagcttcttgagcttccccgcagctgcggcggcggcggcggcaaggaatcgagagacggagaaggcgatggcgatgctgacgccgcctcgggcggcgaggggaggaggaggaaggangagagcggcttccattgctcgccgccggtagactgcgcggaatgcagcaggggtagtggata

SEQ ID NO: 17644 - DNA, 5359 bp, Oryza sativa
cattgaatcttgtattcaagttaggatttggttgaggagttgataggcctctaaactattaatcaaacaaaaaaaaagaaccaaaagttgacatatttagaaataccataagaatatggtacaatttgaaaacgtcggtgtgcaacaatattattttcatttacatttccataatttttaacatttttatcagtaaacatttccatattgctcgatcaataaaaataaaaaatgaactatttccatgagcctttttactatagggatatcggtggcttgtttgtcaactttagaaaagaggatcgggagtttagataagaaattgatgatgagatcaccatgagaatttaaattttagtcccaatcttttatttggtaaagatggtaggaatcgataagaagtttagttgggagattagatcttaaataaaaacagatgtttgagatttgtttaggcaaagtaaaaaaatgaatttcctctaaattaccactccctaccaagtagttcctctaccaagtttcaattcctcatcctcatcctactcaaactttcttgtctcccaaacaaacataatatttttatttaaaaagtagactaaacataatagcctcactcttctatgctcccaagcatcagctaataatatctctactcgtacagttttgcttgttttgaattttttttcgaaccttcttggtacgacgacactatttcggtcactccgttgttcatggatcgttctgcgttgcctagtctctcctaaaaactacacccaaacaaacggtccctaaaaactacacccaaacaaacggaccctagaagattaacgtggaggaggtggatcctcggccgtagagaagcacttacgggtgggcgttagggcgcatcttgaccgtccaagtagaatctaacgtctgggattgctggccagttgttcgggttttcctgtctctgattgattcctgaaatacattggagatcaagcacgagataatccgctacgaacagcatcaagcggcggccgttgagctgagaaaatatactgaaaagttttttcatggttgtttcgtgcataatgcctaactgagggcttgtttagttcacaaaatgaaaattttagagcagtcatatcagatgtttgaccggatgtcagaaggagtttttaacatgaatgaaaaaactaacaactagattgaaaaactgtagcacttataactaatcatagactaattagattcaaaagattcatctcgcaatttccctcttaactgtacaattattttttttaatctatatttaatactttatgcatatgtctatatatttgatgagatgtttttaggaaaaacttgtggggaaccaataaatgacacggcaagtaatcacttgtactcctcgatgatacgaattaccagtactcctcgatgcttaactgataaatgacacggcaagtaatcacttgtactgaacataagaaaatagacaactcggtgccgctagagtaatactggcatcagcagagacattccatgggcttaatttaattttcttttgtccggaactagtgacagtgcattaggagttcattcaggaaaagacaaaacacatactgcagtatcatacctagatgcatccaacttccaattctctgagccagcaaagatagggcatgttctaattcaaaactgcaaacaaactatagccgactcaaccaaagatagggcatgttctaattcaaaactgcaaacaaactgtagccgactcaaccaccaaacatatgagaggcagtaagggttgaagatccatggatctgttcaggcgatggtaacatcaactcttccggccacttggtccagatcacgccttccctgggaggtgatgagtcttccgctgacatagattagcacacgatcatcattataacagaagatacgccaagaagtaaagcatgaagcacttgtaaattaccccttggggtcgacatcgatgatgcccatcttctgcagctgctgaaggatgttgcgtgagatagcgccgctgctcttgcagaagtgcgggggacgtgagccattcctctggcggccaccatagatcttctggaagccacctacaccaataccctgcctcaggtagatcttccttgcaatcgaggctacagaaaacaagcaacaaagtcacaatcatattaacagtgttatgctcagatccctcgttgtgattccttaaaagaaagtgagacggccaggcattcatgttgacaaaggaacatgaatgctgtaaaagaaaagggtactcaccagccctcgtgtagtaccagtccggatcataaggagggagctccttgaacctcgcagtcttcacgatgtcaacccactcagggagctccatctataagagaattttaattgtcaaaacttagaacaaagaacatacacaaaggccaattgatgtaaatggtttcctatcgtagttgtaatttgacggtaacataattacaaagctttatttcttttatagcatcaagagtgccaactaaagtccacagcacagtgcaacaaagaatatatttaacatgaaactaaacagaatagataatcacggaatttgtgaccagcgtgaatattccacaacaagcggtacgcaaggacttcatgcagcagtagtcaaatatcatcacattacatttcttatgacttaacgtgaaacatttttatgcatgcttaaccaacaataaaccacatcttgacaataaagagtatttagctcaacacaaaagaacaagtaaaacacaggacgacctggtaaaaagatattcgaaggttgcctaacaacaggagctcctggctggctacaaacaactgtccaaattagagtcgagatctcaatcacataacctaatcacgaaaaatcaacatactgcaacgccgcatcaacatcaacgtaaacgaaatgaaggacacaactacactaagcaacggcgcatccaacatcaacgtaacgaacagatcggatgcttgtccctaagctaagccgcagcagcaaaaggaaaccgtgattgcatccgcacaaggctcaacaacaccgaatctccataggggcgggggcgaccacatcccatccatgatctaccaagaactcggatctgcgtggaaagcgcaaggtaagggcctggatggttggttggtcggttgcttaccttgccggagcgcttgaggtgggcggagtaggccttgacgaactcatgagggttcacgtccttcaccgtcctcgccgtcgaatccgccatcctgccgccgccgccgccgccgccgccgtgggggggaggagaggagagaggagggagtgagggtgcggctgcttggggggctagggttttggggaggagcggatgggagcggatttatacagcggcgggtttggttgcggggcgtcggatggtagatggacggctgatatggcctgagcgcgtgggtctagggtccgcggatggtttggtttgggctggaggtggtgtacgtgggctgagttgggctcctcatgactcgtttggggattaccaataggaataagttcactggaagtccctcaacttaacagcgagattttgtttaggtctctaaactacaaaaaccagaaatgtgtaccctaaacttatagaaacaatgcattcatggtcctagtcagcaaaaaaatttaaaaaaaacgtggggcccacatgtcagccgccctctgctcttttcctctgcttctcttctctttaatctcttctctcttatcttcttcggtgaggggaggccggcggcaggcagcaggtggcgggtggcgagcggagcgacggtgggcaagcccggcgacaggcgccgggagcggagcgacggcggcatgcgagagcggcagcggtcggcgggtgctgggcggagcggtttgggagggagagggaggcggctggcgagcccgttcgagctcacccggcctgagcgcgagctcgccccgccgtaaattggtgtgctggtggaggtgtgccaccggtggacggcatgcgtgaacgacgacgaggaaagggggagagcaacggccgacgacagagaagacaggcgagcgcgacactgggctgatcaccctcgccgaccaggcccctcgctccgcagcactcgctcgccgccgtatgcccactgatgctccgcgctaccgcgctcgtggaggaggtcgagcagcacgatgacgccgccggcggtgaagaactggagcatgacgagcgccgccactctcgcccaccgcccatgtccagcttcgctcgcccgtcactccgctgccgctctcgctcgccactccgcctgccactctcgctcgccgctctccgcgccgcccgccaccctacccgccgctcccgtcgtcccggccgcctctctccccctctcccgcttcttccatgcacgctgccgcgcctgcatctgtctgcctgctccgcgccgcccgcctgcgcgctcgcttgccgcccgccaccggcctcccctcaccaaagaagagaatagagaagagagaaaagagaatataaggagaggaaaagaggatagggcggctgacatgtgggcctcacttatttttttttattttttttctgactaggatgccacatcagcgaaaccacctatatatactgccataggaccttaagtgtacggtttctgtaagtttaggggtacacatttctggttttatagttaagggacctaaaaaaaatctcgttgttagttgagggatctttggggaacttattccccaaacttattccccaatacgtccactttagggcccctcaatttatcgccgagtctaaaattcgtctgtgaacccgtaataccaacatgacacgtctctcaactcctaaaaccagtgcaaataagatcccaaggtggtttggacagcgtttttagctgatgtggcacttaaagtcacataaaatcgtgggacccacatgctagtgagtgttcggttaaaaataaaaatttatagtgtgaatcacatcatcaccccctctcgtccccttattctctccattactcctctctttccctttcaacatcgtcgtcatctaaggtggctcttgttgtacacaagatggttggggcggggcagcagtggcaacatcttagacagtggtgtagttggaggcggctgcaacagtagtgcggccaccaacggggtggattggtcagtttgtggctgatctaggctaggaagagggagggtgagcgagagcgaggtcgttagaggagcaggaggcgctgcagtggtggaggaggaggaataatgaccccgcgggcccttgtgatcgagtggtagacgtgatgaggaggg

SEQ ID NO: 17645 - DNA, 615 bp, Oryza sativa
attcctgcagccttatttctcaaaatgctctcatcatggagagatcacaagttcctggtcatatgtccccaagtgcagagtctccaagagctagatctctgtctccagtggcaaggttcgtatcaagtccgtctactatccttgagctggatgttgaaaatcagccaagggaatcaagtcaaccaacacctcatgttgtgactcatcgttctggttagcacctaatacatttgttctaaaggactggaaatttgatcctgatgtagcacgtgcagaacttttaaggatgattgttttgcaagaacttccttccagctttgttgaacaccttggttttagaagattttgtgcaagcttgaacccgtactttagggtggtttctagaactactataaagggtgattgcttggctgcctatcaagaacaaaagttagctttgcttgaggtactgaggaaaacaaattctcgggtttcactgacggctgacatgtggtcatctaatcaaaacctaggttacatgtgcataacttgtcacttcattgacaatgaatggaatatgcaaaagaggatcataagattcactcaagtgcgtaccccacatgatagtatagctct

SEQ ID NO: 17646 - DNA, 890 bp, Oryza sativa
attcctgcagcccttgaacatttgaacacctgcatgaagtattaaatatagactaaaaaataactaattatacatattacgactaatttgcgagacgaatcttttaagcataattgctccatgatttgacaatatggtgctacagtaaatatgtgctaatgacggattaattaggcttaataaattcgtctcacgtttactgacggattctgtaattggtttttttattaaatgcccaaacaccccatacaacactctatataatacccaatgcgacgtgccaaaactttagacacctggatctaaacaccactctgttccttctcctctataaatggcaccggggtggtttgtcggcaccaaaggcagaaaagaaagccaatggcgtcttcaggcctcgcagttgcagcaacagcctcgtcagcctggctctgctgccccaatcatcacatccataccagcagcagcagatctcgcaagcatcttcttctccatggcctgtacgggtctgcacctgcacgtactaggtatagtagctgcaactttattcacaatgtgatgtcacgttattatatatgtttcgtcgtcaatggcggcgaaccttgcaggggacgacggccgccggtgtggactgcggcggcggccaccgcagcagcgccggcggacacggcggcgtcggcgcggcgggagcaggtggagatcgcccggtcgctgaacgcgtgggtggaggagaacatgctcccgctgctcacccccgtcgactccgcgtggcagccgcacgacttccttccctgctcggccgcgggcggcggcgaggcgctggcggcgttcacggagggcgtggccgagctgcgcgcgggcgccgccggcgtgccggacgaggtgctggt

SEQ ID NO: 17647 - DNA, 861 bp, Oryza sativa
attcctgcagcccatctcaatcgggccactttaaagcccatcaccgatgactcatatcggtgtcgggcttttgttgatggccgtgagagataacttttacttaggtcatttttctatataacttttttttgaacagttttgtcaacgggggatacccgtagaccggatatagagggtactagggtacgctggtacaatgatctacgtaatacgacatctagcagacagaaaacaaagattatactggttcaggccccttgatgggtaatagccctaatccagttgatatgggattatatgatggaaaccacagattacaaagggaatagcggaactcgatgataccgacgagatcgtaatcgatcaggttcgcttagatctcccggcgacttggctcctgtagacttcaactccataggctgtggtcgatgtgttggctatgagattcgatgccttaggtcctcctggggggtcccttttatatcgcaggtcaactggtctccaagtaggactcggagacatcggacccggcatgatacaatgatgacccagttctgtccgagtaggactccttccatctgtaaactccgcgatgaatttccttaacgtatgccgaaaacgtccgtatacgcgcaagtataccatatcgatatgtgacgtatatcgaagggtagagggtataccttacccataaccctgacagtagcccccgacttctgcttaaatgaactcgtgtaaccgatcatgacttctgatgtcgaggttgttgtcattctcggtgtgaggaccgagagacgaggagtaatcgacaacgccaagcgaagctcaacagtcacgagtgaatttaaattgaagtccgaa

SEQ ID NO: 17648 - DNA, 1556 bp, Oryza sativa
gttatttttgttttcatctcctttactcttccgtctggatcggcttgctttgttgtgttctcaggagagaagagcagtttgccttagtcgtttccatgctgagcagacctcgagagtgcgcttgctgaccaagatcgtcgcatccaatattggaggacgaacgttgaggtagcggaacttgagaggactatgctggaagtgaagaaggaccaggccgtggaaacactccgaggtcgcgaggtgtggttcaactcgtacctgaagagttgctgcacgtccatgacaagagtctgtagagagctccgagtaccccatggggatctcgaggaatcggcggccggatacatctcgtggctgaacagtgcctgcgccaagctcgaaggcatcggcaagcgtatcgacgaggccctgaagcaggagtgccgtcaatcgagccgatatgccggggggcatgtattggcttgcatacgagatcatcgtctgcagctgcacctcgagttcctccacgaagggttttctcgttctcggagaaatcctacggagatagatcacttggcgaagtcgatggtgccgctggcggagaaggtcttccagtccatggaatggtgttggcctccctggtagtctccgtatcttgtgacaaatgtcttagggaaaagtgtaatataattttggatttttacggaattgtaagaagtactttgtgaaatagaaaagaaatctatctaactaagctttcttactctatacgtagtgtgtaagagtgtcttctcacttcgcgacttcgatcagtcgtttgagttatacactctcgctagcccccagccttgtcatcggagaattcttcttggaagataaggctcttggacctttgacctgccttggttgaacaagccctgatcctagcccccagccatgaagtttgaaaattaatttccgattacacggcttggttaatacgcacggcgagaactcttacacgaccagatcttacatggtctttcgtctctacaggatccgacaaggccttatccgctctgggcgtccccagccgatgttcccttaggttccttggaggccttgtcaagacggcgtaaagggacatgaggataggttttaacgctaggtgtcatctgggtaagggatcatcaggaaggaacacttttattgtaatctgtacctgaaaataggctttattggagctgtaagatgtcttacaagtatggatactattgacatatacatagaatttacgtaattgatcaatgttccaggaatttgccaactcgcccccatagccgtttgcaatcttgaatgcgcctggccgcaagacttgtgtgatcgtgtacagtccttcccatttgggtgagagcttgtttcgccctgcttggctttgaacccgtcggaggacgtagtcgccgatcgaaagcgtgcgtgctcggatgcgcttctcgtggtaagggcgaagggcctgttggtagctggttgctcgaacggcaactcgttcgtgatgttcctcgagtagattcacatcgtcgtttcggggctgcaggaat

SEQ ID NO: 17649 - DNA, 1676 bp, Oryza sativa
cgagtagtctttcgtactcggctatgttattggtcgccctgaagttgaggtgaattgcatgcttgaattgttctcccgaaggtgatgtcaagatgaatcctgcccctgctccttggctgttgagcgcgccgtcgaatgccattgtccacgtttcgctgtcgattttgttgtctgacctgttatcagtcatagtccaatcggctacaaagtcggcgagtacctgggacttgatggctgttcgtggcacaaagtgcacatcaaattggcttagctcgagtacccattttgcaatgcagccgacaacgtctttgtttttcacgacttcaccgagagggaaggaggatacaactgtgaccctgtgggcttggaagtagtggcgtagctttcttgatgtcatgattactgcgtagagcagtttttggatctgtggatatcttgtctttgcatcgtggagagcttcactgacgtagtagactggtcgttgcaccttctctctctcgacaacaatgacggtgctaacggaatatggcgtggcggcaatatagagaaataattcttcattaggttggggagcaacaagtacagggggatttgataggtagcgcttgagtgcaatgaatgcctcttcggcttcctgtgtccatacaaatttgtcttgcttcttcagtagagcgaagaaaggttgtcctcgctctcccatcctagcgacgaacctgcttagtgccgccatgcatccggttagcttatgtacttccttgagtcttgtaggtgacttcatgttctcgattgccttgatcttctcgggatttgcttctattcctctgccagagacgaggaaaccgagcagcttgcccgatggtactccgaacgtgcacttctatggattgagcatgaggcgatatcgtcggaggttgtcgaacgtttcccgcagatcgtcaatcaatgagtcgcttgtattggtcttgacaacaatgtcatcgacgtaggcctcgacattgtttccgagttggtcgctaagtgcgccctggaccgtgcgctggaaagtgtttcctgcggttattagtccgaacggcatcttaacgtagcagaataccccaaacggcgtgatgaatgctgtcttctcctcatcctctttcgccatgctgatttggtggtagccggagtaagcgtcgagaaagctcaacaacttacaaccggctgttgagtccaccagttggtctattcgaggaagagggaagtgatccttgggacacgccttgttgaggtcggtgaaaccgacacacattctccatttcccgttggccttccacaccatgactgggttggctagccattctggatggagtacctctccgatgaaaccaactttgagaagcttgtcgagctcttctcgtatggcttgttttcgatctggtgcaaatctctgcagtttttgctttactggcttggcgtcgggtcgcaccatgagtttgtgctcaatcacctccctgggtacccccggcatgtcggacggctaccaagcgaacacgtcagcattgtcgcggaggaaggtgatgagcgcgagttcctatttctcgcctagtgatgccccgatcttgacggtcttgtcggggttggcaccggagagtggaacaatcttgattgcgccgtccggtttcgacgtcttgtttcttttg

SEQ ID NO: 17650 - DNA, 2273 bp, Oryza sativa
attcctgcagccctgggcgtgtgctcgaccatgtcgaggctccgcttgtcgcattgtattgccagcttaacattcccttgaatagtgattattcccttcggtcctggcatcttgagcacttgatacgcgtagtgagatgcggccatgaacctcgcgagtgcagttctcccaatgatggcattgtatgttgtatcgaattcagcgacatcaaaggtgatctgctccgttcggaagttatttgcttggctgaatgtcacacgcaacgtaattttgcccaatggtttggacgatgactgaggagtgattccatggaagggttgaccggtgggtgtcaactcgcttcgtgggatccccatcgcgtccaaggtgctggcgaagagaaggttgattgagctgtcgccatcgatcagaactcgcgcgaacttgatattccgaatagttggttcgaccacgatcggatatcgctctgggatgacagcggtcttggggcggtcctcttctgagaattctatcttctgttcagactacttcatcttgggcgcagctccctgtcatgttgaacaaacttcacattccactttcttgtattctcgctttgaggagtatgccgtggaacctccgaagatgtgcgagacatggagatcggagtctgggtatgctgagtccgattcctgagtagccgcctcagcgtccttctcgaccacacgtactcgcttgcctttttccaatgccatgtgttttgcgagcgactttttgaagacgaggcaatcttctagagagtgtctgtccgacttgtgtatagggcaccatgttttcttcgtgtcgctgccttgtgggtctaggcgcttgggagggtccgcgtattctgttgcgagaacttccgcttgagctttccttttcctactcttgcgatttttcttcttgcttgactcaggtgcgtccttggctggtttcttctctcctccggtcttcggtttgtcgttcttgcgtctcagtgcgtcgtccgcatgagcacatcaatcgacaattttgaataatctccgagtagtcatgacgcacctcgttgccaactcctgggtagtatagcgatctctgaaaccggacttgaacgtgcggattacagaagcgtcggtgatttcggggattgtatttctgcactcatcaaagcgtcgaacataatccctcaaggattcacccgagttctgtgtcaacgcatgtaggtcgtcttcgatcgtgtggcgcttgtaagttccctggaagttggcgacgaactgctgccacaggtttgcccacgaagaaaccaagtagggtgggagatgcatcagccatgaacgtgcagagcctttcaatgcagttggcaaataatttgccaacgcgttgttgtccgcttgggcagcgtagagtaccgtggagtaaacctgaaggaattcttctgggtcggtactcccatcgtacttctctattgctctaggtcggaatctctcaggccatcggacatcacgcagcgaacgactgaaagctctacacccagcgctgggggcggtgggttgtcagcgatcgtacgtccttcgtggatgtctatctgatgatgaggatgaggaagatgacgacgatgacgatgggtcacttggttccgctgtacgattacgagggtgtcggccgggttctcgagaatcctatcgtcgtctcccgttgttgtcccgacgccgatctccatcgtcgtcgtcattatggcgacgtcctcgaccagtatcgcccagcacccgccgttcgcgatcgtcgtgatcgtggcggttgtggcggttatcacggtctcggtcttcgctcgaacggcctcctcgttcttcgttatcgtgacgtcgtgaagagacgcgatgtcgggaacagttctcgctgtctcgtgcgcgtcacgcctctcggcggccattcaagtgatcgcggagatcgccggtgccgcgaggtgaaggggtggctcgatgaggcgattcccgctgttcagggttttcgccattagcaccgccagttggtggctgttccgggtgcgctacagcagcggcctctttgaacgcgttgctgaggttggtcactgattcccgtagccgttctgtccaccgtgcgagatcgtcgttcagaacgggatcgtagggggtttccctcagtattgcgttgacggccctgatgtgctgggccggtgtagtcacttgattttccgcttccgcattaacgcgcactgacgtgctggtcccgtcaatagccaatacctcgcgtggcgt

SEQ ID NO: 17651 - DNA, 1812 bp, Oryza sativa
attcctgcagcccgccaatacctcgcgtggcgtactcgttgacgatgagccatagtcttcgagcaggtgcaggactgacggttcgtggggatcgatgtcgattacctcaacgaatcgatctgagatcagcgttgctccttgttccttgtcctcatccctgagggggatacgtgactgttggaccttaggaggtgacgtcttcatggcactgagaaataccttgcagcttgagaggtcgtgattctttgtcttgtgaataggacaatagacatcacgagttggagaagtacgctgaattccacgctctttgcaggcacgaatttcagcgtggacgttgagaaaaacctagcaggcttgcaaggtgtgttttctggttttttggataggacaccaggaccttgtcacctcggaagtcatcctcgtcggctcgtgattcttgtcggaaagacaagatttggccgcactaggatccttctcgggctcggatgtcgtcgacgttccgttctccgcttcggcgggaggatccttcgacatggagtcgtcctgggttgtagccactgcgttctcgcttccgatcattgatggaccagtcgagatcagcaccatggtgtaaaccggtaagacgatttcgccgacttgagtcaataccagcattgttgaagcaggaactccttggttgaggttggtgttgacgctgttgtcgacgaagctggatgacatagtagtagaaccttgagcaccaagttcccctacctggcacgccactgtcgacgggcgatacccgtagaccggatatagagggtactagggtatgctggtacgaggatctacgtaatacaacatcaagcagacagaaaacaaagattatactggttcaggccccttgatgggtaatagccctaatacagttgatatgggattatatgatggaaaccacagattacaaagggaatagcggaactcgatgataccgacgagatcctaatcgaacaggttcgcttagatctcccggcgacttggctcttgtagacttcaactccgtaggctgtgattgatgtgttggctatgagattcgatgccttaggtcctcctgggtgggtcccttttatatcgcaggtcaactggtctccaaataggactcggagacatcggacccggcacgatacaaggacaacccagttctgtccgagtaggactccttccatctgtaaactccgcaatgaatttccttaacgtatgccgaaaacgtccgtatacgcgcaagtataccatatcgatatgtgacgtatattgaagggtagaggatataccttacccataaccctgacaagtttgagtttgaatttgaaaatatgacaacttcaaacaattttttaaatactaaatgatttcaaatgaaaaaactatcaacaacaaagttgtataacataccaatatttacaacttttatttttattttggtatttttctatataacattgttttgaatagtttgaatttgaatttgaaaatatgacaacttcaaaacaatattttcaaatacgaaatgatttgaactaaaaaagtcatcaacaacaaagttgtataactcatgaagatctgtaacttttattttggtcatttttctatataacgtttttttgaacagttcgaatttgaatttgaaaatatgacaacttcaaataacattttcatatactaaatgatttcaactaaaaaagtcatcaacaacaaagttgtataactcatcaaggtctataagttttattttttgtcatttttctatataatgttttcttgaacagtttgaat

SEQ ID NO: 17652 - DNA, 1099 bp, Oryza sativa
attcctgcagccctttctctcatgatcaactctacgttgcactctctaggggtgtctcgagggggacaaccagaattttggccaagccaaggatagacattgaccccactggaaaaagcacaaagaacattgtatatcgagatgttttattctgaacaggtatgagattctttatattcatgtcaacatgactttctactttcctgaaattgaaggttcactcatctaatgatttaattgtgcacctgtcacttgctattaatgttttaaaacttgctcctgtcacttaatggtatttcaattaattttgccaaatattacattttgattgagtaattaatattatatctgcagattgtctaaggttgattagagaataccatgttcagattcttctgaaggcccagttctttatattattcattggactattgagcttggttgtttctggaggaccaggttgcatggatggtgagtatcatattgtttacaccaagtgttcattgatatggaggaaaacctgatgtactgatgcacaagagtatttcaaataatcttgccaaatattattttctgattgagtacttaatattatttgtacaggtagaatgtggttgcattgagagtaccatgttcagattcttctgctggccctgttctttatttttttttttcactggactattgaacctggttgtttctggaggactacggagcatggctggagtatcatattgtttacaccaagtgttcgatgatatctggaggatcatattgtttacaccaaatgttcgatgatatctggaggataacctgatgtggattatgagcttggctttgtcttgacaaataatagatgagttgctgcttgtaagagaggtctcgatgatctgctaattgccactgtttagttacatggggtgaaataattttgtgcaaacatgactgatgtatatgaaaatacgtctctgattgggatcttgtaaacttatttgatttgggaaggactgcaacacttgaaatttttattggaaggacaattcagaaacataattgggaacatttgctatattattttatgatcttatcgggctgcagg

SEQ ID NO: 17653 - DNA, 910 bp, Oryza sativa
attcctgcagccccattccgtattccttgtcgagatccaccaaccgttctcgagtgatcgagaaggcgcagaatctgcgacggagctttgtcgacatttgtcgtactcgccttagtcgatcttggtatagaaccatagagacatggagccttcgtcaatgtcgaatagaatccatgtgtcccagcaaatcttttggaaatgaaagaatgcgaggcacctgaatcaaagagaactgttgctggatatgagttcactggaaacgtgcccaacacaacctttggtgctacctgtgcttcctctgcagacacatgattggcgcgggcctggatgaacctgggtccagtgcgattcagcttcggacacttgctagcaaagtggtcgtgcttgccacagttgaagcagggtcctggctttcctacagcccccttcttgggctgttctgactgagctgacacagctggcgaatctgactgagctggtgccattagtgggggtggagtcgagttgtggttgtgctgcttactgttgttgtgactgccaccgttgtaatcgttgttgaagttactcgggtgatagggacggtgctgacagacgatcagggtggaaggcccacctagctgtcccgtcatgaagcgaggcttctgtttgttcccctgaggaaagctgatctgagctgcctttctttttcggtccattttgttgcgttgctcttcctggcggatagccttgtccacaagcttctcaaagtcctcatagactctggagattagctggttggtcaattcatcatcgagcccaaacaaaaacttctcctgcttctcagcatcggtgcgcacgtccttaggagcgtagcgcgcgaggcggttgaactcgtgcaggtactctgtaaccgttctggggctgcaggaat

SEQ ID NO: 17654 - DNA, 678 bp, Oryza sativa
tgaacaccccttcaccccagcagcatttgacggcacaacaacataggcaaaaactgatgcaaacatctcagcaacagcagctacatgctcaacagcaactaagaccatcggctgctgggatgctagcacaggtaaggtaatttttatttcggaggcttttttgttgtctgggttacggtttatcatctcagttgtcacagcacccaaaggttatgtagctattaaaagcacatttcttttcattttctatgctgctgtcttaaaattattccatttcatttacttcaaagcattgttccttccttttctagtgcttgattctccatacttttcctgtagagcgcaattcctcagctacaagatctgcagggccaatcccaacaaaaattacaggtaattctaccactgattgtttcccttttctatgtattctacttgctgaaacagtaacaatttcttacaaaccttttaacttgttgtaaaaccttataggtccctggccaacagcagatgcagtacaatcaagccttgtcacaacagtatcagaataggcagatgcaagctgggcgcatgcaacctggcatgtcccagagtcaactgaaccaaggaaatcagctaagaagtcatattagccagttcactggagctgcaaacagtgcaatgtttactgctgcacag

SEQ ID NO: 17655 - DNA, 2145 bp, Oryza sativa
accaccaaggctccatcgcgctaatcccgcggtggctcccctaatcacgataacgccgccgccgcgcctttgaacgttgttgcgccatccgtcatcatccgcacttccgccgccgtcgtcaccgcaatcagtatcctggtggtccagggtttccaccagtgccgctgccccgtctcgccctggttgtgcatcctcccaccagcgtcgcagctccgccatcgccctgcaatcggtgcctcagtggtccagggctccgctggcgacgccaccccgtcgagccacggtggtcaagccttccgccgacactgagcctccatctttgtcgctgctctgtgagtcctccagtgttgccaccgttggaagaggatagactcagcagctaggcctcccagccgtgcgcctccctctcttatgttggtgatacctgattcaactcaaatcgactcttttcaatccccttttttcctctttgtgaattttccccattagttctctagctgaattttcttattcaagcttaatggtatgcatctccttttagttatgttattcggttcttctttacctttgtggataattgcaggctatatattacgtgattggtgctgcagtttcatacatactaacattatagttgtcatgttgaatatcttgcagattatcttacatagagcaaattcaaccatgcctggtctcttatcttttttattcaggcgaaaaataacagttcctttcttactgaaatggaaaatacatgaaaccctacactgcaattttctgcaatgacagggtaaatagccatatcaagcccgtttgttgctgttgggctgcctgcctcttatttttcttctttatttctgtgatcatcaacaattactagattgtcgtcccttatggtctttcatttgattcactgcacggttgatgagttcactcatttgctgccaattgttgttgactaatttctttttcacattttcttttatctaaatatatttattctgtacttctattgggccatatatagtctgatttagtgtttgtcatttcaggtgaccttgcttcttagccaattggagcacaaaagaaaaatccaataaacaggaaaacatgatttagtcttggacatcatttctgaaggcttttgcacttaagaaacgcgaatagacaagaataaggtatgcagtaaacatgatacttctgtgtggctcactacttcactggtcctactactttagagctatatatttttgtgtgactgtagatgggttccattaatggatggctgtgagaactaacatttcaattttgtatatatggtagagcttcctcaggtggttggtagcagaacaagatagtataagttttcaggtggataaagctaaagcaaggctaagaattaaacatgtgtaatggaagtatcagggatggctgtgagaactaacatttcaattttgtatatatggtagtataagttttcaggtggataaagctaaagcaaggctaagaattaaacatgtgtaatggaagtatcaggaattcagaatggtagttggcgcatatggagcagatttgataaccgaaaattgtgtaccctgtgaagaatccattgctggttttaagttttaacttcataccgttatcatttcaaggaaagaaggtcttgcaatcgatcttcagaagagctgagaaaggtacagcttaaaaccattatttgttctatagtgaagttgatgtgtgtatactaaataacatcgtcagaatgagcaaacgctataaacaaaaatcaaccttcaaatataatatgtataagctttaaatgttaatggtcacttatgcaaaatgcactaggtaatgttgttcttcattttcaggagcgatttgtaaattaggttaatggaacaaaatattccacgttttgcccaatttctataaatttgagtacctgaattcactcacaccaaatggattgccacatcttttaaaggacaaagttattgtcttgtcatattgctgcgcaatctcgacctgcacaacgggttgtgcaatggaactaggcttatgattagagcatttcagaattattccattagtgctgagattgtcggtggtgcacatgctgggaagagggtcttcataccacgg

SEQ ID NO: 17656 - DNA, 1197 bp, Oryza sativa
ttgtcaccacaccaagttgctacactagcgctgttctcttcttttgtgtacaagtgggatttctactttcttcgcacgtgcggtgcgaaaccccattactccgtttcttcgtaccacatgaattcgtagtctttaaaactccaatgtccaagtgtagaggtaaagcggttggactaatcgatcgtcgcttgctagcaacagagcatatccaaccagaatcgaccagtcgtcgacacgtgtgaatgcacgaggttgctatggctttacgtatatcactttattttacattagttctgatattaagtttgcactataaacaatatatactagcaagttttaacttagctcagtttggattacgattggatgagaagtgaatgtactttgggaaattgaaaggcgaagggttgtgattgtttagagagagaatttcagtggagaagttattatatttcgcgataaattcctaagtctaaaaattgttatattttggaacaaaagaaataagttatattacccaatctacttgcactcattgatatcacacgactaatactacaggcttataacatatcatggcattctctggcgctcagctcctttcatatggattaaagcaaataccaaacacttgtaaaatttttctttggcttgcctttcgaggaagactgaacacaaatgatagtagggtaaagaaatgctgggcatctgatccacattgtgctatctgccctaccattgaaacaacatatcatatcatattgcgctgccggctagcttctgaggtttggaagaaactcaacatctctgaacaggcaactcaaagcacagacgttcttcacttcgttgagcaagtcctgacaattacgcccccgcatctcaaacctggatggccaatatgctttggcgcctgcgcacacaacttatgaaaagcatgcaaccatagaacattccagcagcaagatcttaccacggcaaatgtgacacatcaaatcagagaatatctatacttatggggaaatcgcatcaagccacaatgtcggcctccaatatgcagatggatagacttactagcgtagctagcttttctacttcttccatgcttcttcctattcttctgtatttcttcttcttcttccttcttattttctcttcttcttctcttcctccctctccgtctggagtatacatgtacga

SEQ ID NO: 17657 - DNA, 1970 bp, Oryza sativa
tgccagcaaacgttcccagcacatctggacacttctggccatgtaatacttatacaatattaagtcatgaattcaaatttaaaaggtttaagaaccaagtgttatgatcaaagttgtggagaatcccggatcctaaggtttttatgttctaaggtttcacacaacagagcatatcttaaagacttgaacactaatattgtttataaataatgaagagttaaattagtaatctccatataaaaataaataattcaaaaactttataggcactatgcacgaaaaagtatgtatgcgcagacatgtaatcagtatatacttatattctctggaatttaaacaggagtgtactttatcaaaccttaggaccataatggttatgtgcgctacaagttataataccaaaggatttctgcactttggctattaaatatggggttaactaaaatctactctaaattttaaagttgaaactataatgcctggttaccagtcaaaaattctattttttttgtttgaacatttgtctaacaaattttcccctgatttgctcaacattccatttgttcttcacagtttcctacctaactgagaatctgagatcacaacagccctcatgttgttactttcaaaaggaaaattctcatttaagaaattaggtaccaaacagctgttgttggtaagcagggtcaggaatccggctgctgctgctgctgaagatactcatggatggaagaaaagaggacaagattagggatgagagtgagattgggaaggaccaagtttgtcatcggagacctaatatattccctctatcaaaccagcttcttatggcttctgcttcataggtgaatccatcagatgccatttgaggatctttcatgatctcctgaaatatcaacaagagagtaacatatcacacatgcaccattaaaattttgatcactgaacatttcaaggaaaacagaaaaggatattcacaagttgtaggcactacatggaaaagaccttgggagcatatatccagaattgaagctacaaaaatgatgattacagatttatttaccaggctgattggacaaatgaaagcagaagggacacaactatctcctgttgctgattgcaagtatggccaggtggctgcaagaggcttcctcgtcaggggctcaacaactttccacactttggttaagagatcaggccgtttcttcctcgtcatttcagtgcagctaaggccaatgagtgctaactgtttggcttgaatgtacggccagtcccctgcagatttatctatcagcaagtgcaagctatcactctccaatgcctctgcaactttctctgatagagttaaggggggcatttcggtcaagagccgtaggatgataacacccagtgagtagacatcagagagtgttgtgagctctccggtggtgttgaactcagggtccatgtacggcagccttgccgtcaggtttggtgggaaggtcccaagctgcagaaacaggttggacataccaaagttgcagatcttgcttctgtagttggcatcaatgaggatgttgcaaggcctgagatcaccatggaccaaagcagtagacttgttcgaatgaaggaaaagcagagcacaacaaatctccccaatgatctgtgtgcggttgtaccaagagagaggtgcagaattatttgtgcaaataatgcggtcttcaagatttccattaggtagccattcatatactagagcggagacctccgagcatactcctatgaatgtgataatatttggatgtctccattggcgaagaatagagacctgcaataatctcatattactaatggaatcaaccaacacagagtatcacaagtggaccaggttacctcttgttgaaataacttttgggaactggacagcttgattaacaccttcatattgtgtatcatgcctttatatgtgtgcccatattcagtatcaccaa

SEQ ID NO: 17658 - DNA, 654 bp, Oryza sativa
taacgacagccctcttgctgttacttacaaaagaaaaaatacactccagaaactaggtttctgacaactgctgttggtaagcagggttcggctgctgctgctgaagatacccatggatgaaagaacggaggacacgattagggacgagattgagattgggaagggccaaattcgtcatcggagacctactaatccctctatcaaaccagcaccttatggcctccgcttcataggtgaatccatcagatgccacttgcggatctttcatgatctcctgaaatattagcaggagagaaacatatcacatatgcactgtaaaagttttggtttctgaagatttcaagaaaaaatagaaaaaggatattcagcagttaaaggagaattaggagcatttatccagaattgaagctgcaaaaataatgattacagatttatttaccatgctaattggacaaataaaagcagcaggtacactgctatctcctgatgctgattgcaagtatggccaggtggctgcaggaggcttcctcgtgaggggctcaataactatccacacctcgtttaagagatcaagccgtttcttcctcgtcattccagtgcagctaaggccaatgagtgctaattgtttggcttcaatgtaaggccagtcccctg

SEQ ID NO: 17659 - DNA, 875 bp, Oryza sativa
ttcctgcagcccgtggcaaatagttaaataactccatattggaaggacaatgggcggcggacaggaacgatggaggattcgtcagagatgtggtgggctggtggttacggagcaaggagtagagatgtgatgaggcagagggagtagagaaggtttctgcttttatatttttcatgagatagacatgtagggtccacgtaggtcccacactaacttgccgagttgactgcagtcaactcatcatatcaaccaaaattagacacaatgctactctgggatctcgggtactccgatattacaaattgagaaacatgttatatctagtattgcagttgaaggatacaatttgaagtcttgaagtcaagataagggaccttatgtgaacttattgcagacatgttatatctgtcactatgtcgtcaagtctgaaattcatccctgaaccgcaataccagatatgacgtgtcccctcaactcccaatcagtgcaaataagatcccaaggctgtttggatgacgtttttttgctgacgtggcacttaaagttggatgggaccaacatgtcagtgagttcggtgggacccacatcatcaccacctctttcccctcttcactccctttttctctccctttcatcatcgtcatggagcccaaagaaggacgaggcgttgcagcggcaagtggcgaagcacgggggcatgtgactggtcgctcatcagcaagtccatcccggggaggtccggcaagtcgtggcacatccggtggtgcaaccagctgtcaccatgggtagagcaccaccccttcacgcccgaggaggatgacaccatcctccacacccacgcctgcttcaacaaacaagtgggccaccatcgtcaa

SEQ ID NO: 17660 - DNA, 952 bp, Oryza sativa
ttcctgcagcccaattgagttgctgtctgattgccacaccacagtgccatcgtagtccttgagaaccatggcaccgtccttctgcagggtaacaacagagcgcctacatgcacagggcgtccgcggttcgcggtccagacaacagtcttgttttttgagttggtataccatattgagaaggcaaaagcattgctgtagatggtgaggaagccgcaggagaaagtgccatcagctgactgtaggacatcattctggtaatcatcaacagatagagaggattttagtggtatcttgtcacgagacatgacaattgggagcagagcaaggaatgatagagcagggaggatggagaagaagggtgccatgggtggattgaaaggatgaccaaaggagcagtatgtccaatttcttctcatacctccttgcttcattcttatattcaatagaaggttggtgtcctatgcctcgtgatgtccacaggcagtgactgtttgcatgtgttcaggacatctgatatattatatatatatatggtcattttgcttgcttgtaatgatctgatttgagcctaccaataatcatattaatagcatgtgataatggtgacagcactaatgaaaatgctactgccagctggctaggaacttgcttcgaaaagcacaggaaaaaaatacaaaaatattaattgatgcacctagttgaagtcagaaaagtacgctttaatgttcaactatgtgtatattatcttttagcttctaggcgtattgttgtgatcaatgcaaattttagaccatggaaggcaacatctagctggattgatgtgaacagtgggcagaagaccaagggaagtgtcacttattggaagaaacagtcaaatctgcaaacagtgagccaaaaaccaagggaagtgtcaattcttggaagaaacggttaaatcaatttgatgggcttg

SEQ ID NO: 17661 - DNA, 674 bp, Oryza sativa
agcccttgcgacagatcttcagtgagtttagtggtggtaccaagcctgccgaagaaggggagggcttgtatacagggactggagatgtcaaataccatctaggaacttcatacgataggcctaccagaggtggaaagcatatccatctgtctctggttgcaaacccaagtcatttggaagcagtcgatcctgttgttgctgggaagaccagagcaaaacagtactattctaatgatcttgacaggaccaagaatttaggagtcttgttgcatggtgatggaagcttctcagggcagggtgtagtgtatgaaaccctgcatctcagtgctcttccaaactacactactggtgggacaattcacattgtggtcaataatcaggttgctttcactactgatccaagggcagggaggtcttcgcagtattgcacagatgttgctaaagcattggatgctccaattttccatgtgaatggtgatgacttggaggcagtggttcatgtctgtgagcttgctgcggagtggcggcaaacatttcattctgatgttgtggtggatattgtatgctaccgccggtttgggcataacgagattgatgagccttccttcacccagcctaaaatgtacaaggtatacattttttttcttacctgattaagtcgggctgcaggaatt

SEQ ID NO: 17662 - DNA, 953 bp, Oryza sativa
caagacaacggcggcggcggcggccttctccgggaatccatagggcgggggcctggggccgccgccagggagcagcacggaagcgggaggcagcggcttctcgacggccggggcgggcttggtccagccggccgtgggcgccccggatcggacgggcgcggaggcggccccgccgcccgcggccgcggcggcgccatcgaaccgctcgtgctccttgcggagcgaggggaggttcagcggcggcgggacggagagcttgggcggctggggcttggacacggaggagccacgggagcgggagagcacgaccatgccgccacccccacccccgccgccgccgccaccggatgaggcggaggggcgcgaggggcgggctccatggtgcgagggcgcgggctggccgtaggatcggttgaggttaacggagacgaacttgccggggtgcgacatcggaggcgggggcgcgcccgcatgaaaccctagccagccgcagccaaggtccggcgcgcgcccgcgtgggccccctgggagtgggggtggtattattactacccacgcggccgcgaggtgcgggaggtggcggcggcggcggaggtggggggggacgcgccgccgacgaggaggcggcgacggcgcggcggtggcgtgggggatttgggggggaggagtttggtgtcgggccggaggaggaaagggaggggaagggagccctagagagagtagagagagagaggaggagcacggtggcacgaatctcaaagtcgctggttcggttcggttcggttcggtgcgcgctgtgctgttggatgccggacgaagccaggtcggcaaggaggagtggtggcctacaactgaatcaggaaagagagaagaaacctcaacccactaccaaagaggtaaaattagatttacgaccctggctgcgcccactatcaatcttcatggaacatgaa

SEQ ID NO: 17663 - DNA, 4698 bp, Oryza sativa
taattagtgaatttaaaatgtaatatgttctactgtcttgtggccaacacatatggttatggactattttagtaattaatgctataaggactaccttcatagtgtatagagtcagcccatatggcttcatatattgcacaatagccacttttgtaatacatcgtggatgcccttataagattgcaatgtttacaaatttgcaatgccatcactttccatcatcgttttcatatttgttcatgtcgttctccaaatgtgaaatgtttgcattgtcctatgctccttgctctaagctcgatctaatatttccctagcacctcttctcttagtcatctcgcacctgacttctcacacgccacctccaccaaggaggactgcctgccatcccactctctttactactatacgctgaatcccaccgttgttattgttccattctgaatcccaccgctaccacactgtctccttaaccaattattgcttgttcattggactagaacatcaagactgtataaaagttagtcgatatagcggaaagacgactaaccctcctgattgcttcagtcattgatcacccaagacatgccagatgacgacataggaacacacgatatttgttaacaagcttcagttgaagcctacatccccggggctctgattatgggcgctcctccccaaccaatatagctcctagccgctacgagtccatggccacgccgccatcctctccctgcgtgtctatgctacattgtagtcgccatggttacattgtggtgcccccctctctatttaagagagatgacgggttacagagtccgactctaactccaccccctaacacctattacaacttcaagtccaactgtaaccaaataggactagtatattcgatacctaatctaacaaagacattttgctatgtcatgttatatgatggttatagctgcaacaaattctagacacctttttcacattgttccaaccagtcgtgtagcagatcaacaagattaaagcagtgcgttggcatgaatcaacgtgtggcggtgggaattgacacctattataacttcaagtccaactgtaaccaaataggactagtatattcaacacctaatctaacaaactccaccttggcaaatatacgccacccagaagtagtagaatcaccatgccgatccatctgtcctccaaacttgggttgtctcctttgcagcttcaccgtaagccgcccgacgagactgcgccagacccgttgccttgaagagactctgctatctctgtaacttcttcctctggactccaccttctctcatatcaccacagtcgtcttgccaagcgaaattgaattccttcctagctgttccatcatagactccccgaagaccatgttcaactccatctactgtcttaaatttgacttgatctaatccatggccagataaccgatgtcatcaccaaatagataaatcaagctcaccagacatgaagagaacactttcttccttgccgtcttatgaatcgagctaataaatccaacatccacgccttcccacatccatagactgaatccatgatatttttgagaaaatcaccgttgccttgaatcacgcgaagaaattaccaccatagcgcttgctctttccccttcagtgacacagattctatatatccccataatacaaaccccacagatcctggatatatcatgtactgccaaacaaaccgttgactccatcaacgatttcacccgctgttgcccgggtcttttcttcagttctggcacaactccatatatctcaactcctcatcaagtcccagatatatcatgtcttcaccagataattacatatgcgtcttgaccagcctgttgccgccaatctactcgcccttcacacttgcaaactatccatctgtagaacctttttgtccttcttctgaatctgttcacaagtttctgcaacgaaccacccgtccgttgaacccggtctaaccgtccaaactccgcagtctaaccagtccgtcagtctgaccaccttgctggcccggccgaatcacattagaactatgcacattgttctctcgagtagtaacatcctcagaccataacactgttgcgttgatcctcacatggcttcaccacgctagctgccttgtgcccacgagccgctctgcgaaatcccctccttgcgccaaccactgtgtcctagactccaccgaagtctgtttgtacacgttgatctccacgcactgctggaccgcccatgacacctttgcacaatcaattcctagtggttgcattgccacatcaatcaacccatgcagtgtagtatgcatgcacacgtactgacaaccaaccatgtcaattaacgtgaccatgcacaacccttttcctcggtctgaacacttgactcctcgatttgggcttgcaccggcccactgctcaacacacaccacatgttttttcttttgaacagagccgaaaaatggttgctcttcctttgaccagatccacgcatgcgctagtttctcgataaactgccgtcgcccagcgccaccagcccgacgaatccgccgatgcctcctgcttccttcacgccgccgccgacctggtcagcgccgtcggcctgccttctgctggaatccatagccgccgctcccaacagaagccccgctgcctctccctgcttgaaggtcgccgacgcgcgcgcccttcctagttgccgctgcccccagccgccgggaacccctattacgtttgttgctctgaagcttgagtcttgtgatttcttgttaaaactatcggtattagtcctctcaattcaaaggagtgccaccccaatacgactcggtttgtatcatagattgattcatatggactccaccaatccaagtcgtgttcaactccttgttttactgttgtcggactcaacgccgcctcacgtctaacaagccgaaccacatctccctgcttcatctttgcacccgtacccgttctgctcttggataaccattgtgtgtgtatgtgccgtgcctccgtgcacagcgtccgtgcccctgcacgcaccgcagtcgcagccctcgtgttcaccgtccacgacctcgtcgtctcggccctccacgtccgccgtgccgcgccacgctcgtcggctttgcccttccgtcagtggcctccctgccaccgcggatccgcgttcgccgcgtgcgtcgggcgcgccgtccatggtgctacccctccgatctctccgatcgccttcggccacacccggtctcgtcttccggtcacgttccgccatcgccggtctgatcgcgagcgaggtcgtcgcctccgcgacgtcctcattgtcgccatcgatctcatcgccacgactgacgatctcctgtcgatgcgcgatccccacctcgtgtttcctcctccacatgtcttcttgatccaatactgaaaccttctgctctgataccacttgttataaaagttagttgatatagcggaaagacgactaaccctcccgatcgcttcactcattgatcacccaagacatgccagatgacgacacaggaacacacgatatttgttaacgaggttcagtcgaagcctacatccccggggctctgattatgagcgctcctccccaaccaatatagctcgtagccgctacaagtccatggccacgccgtcatcctctccctgcgtgtctatgctacattgtagtcgccatggttacattgaggtgcccccctctctatttaagagagatgacgggttacagagtccgactctaactccaccccctaacacctattacaacttcaagtccaactgtaaccaaataggactagtatattcgacacctaatctaacaaagacattttgccatgtcatgttatatgatggttatagctgcaacaaattctaacacctttttcacattgttccaaccagtcgtgtagcagatcaacaagattaaagcagtgcgttggcatgaatcaacgtgtggcggtgggaattgacatgcagtagtagccgttgacagtggtgggaatcaacatgcatgccgtagttagaatcaacctcggatagcataggttggcctgatcagtgtcaggtgaaagcagtgaaaatcaacgttgtcaactggtgggaattgacgataaaaggttggaatcaagggtaggaggtggaaatcataaaggaggtggatatggcggcataggccaaggggagaggaatagagcttagcacaaaggtgagggaaatatattgagtcaataaaaggcaatgaagatattttgcattcgtaagaacgagaaaaactccaatgcaggaaaacatggaaagaaggtgacaaaatgttaaatttctaaacgctgaagtatttagatggtatcattgtgtactgaatgaagcttttttttctatatttctaaaaacatattatttccatatcgccaatccaattgccctcaaaaaaagagatatataaagtttgtcttgaaaaactttgaaattatggcatttcttggttaactaagtttgagatgagatcacaagtgacagaaatattatattacaataaagggaaatgacgtcatttgtgcctattgtatattcgtttttaatatttcctttttaaaaaaacctgaccatcaatctaaattactcctcaaaacataaagtgtgtaattcaattggttagcttt

SEQ ID NO: 17664 - DNA, 1282 bp, Oryza sativa
tgatgattctttgaaagataagacagactttcctacttcaacaagtaagaccgaagtgaacaatatatctgaaaatggttcgaccaaccagagcactatgctatcagatgaatcgagaacaaaagaagacaagatgaatcatcacgagaacattgctgccaccacaaacaaaaaggcagaaacagatgcgagacctgaaagtccatacagaggtctcattgacactgctgcgccatttgagtcagttagagaggctgtcaccaagttcggaggaattgttgattggaaagcatacagatctcagacactagaggtaatactgatttgtttaaaactgcaaatggatcagatcatggttaaagatgcaactttgttgtgtttcatattaatttccttgccattacagaaatacactttgtttttatgagaaacaatagagcacatattatacttctgctcactgctgttcaatcaataacacggtcaaaaattttcatcatatagactgctgttgttaaggaatttgctttttatgcagaggcgcagggtcatgcagcttgaacttgaaaaggctcaacaagagattccacaattcaaacaagattcagaagcttgtgagatggccaagttacaagtggttgaggagctagggagaactaggagacttgtagaggagctgaaacacaaactggagagagcagagattgatgtggaccaggcaaagcaggattcgaacttgcgcagctgcgggcacaagaaatggagcaggggattgacgatgaagctagcgtaatagcccaaacacaattggcagttgctaaagagagacatcagaaggctgttgatgaactgaagttggtcaaggaggagatgagatcaacacacgaaaagcataccgttttagctagcgaaagggacatagcagccaaaagagccgagcaagctatttctgctgcaaaggagactgagaagagagttgaggaactcactttagaacttatcgcaatcaaagagtctctcgagtcagcccatgccgcgcatcatgaagcagaagaacacaagctcggggcggctttggcaaaagagcaggattgcctggcttgggagaaggaactgcagcaagcacaggaggagttgcagcaactcaacatgcaacttgtatcaaaaactgatgcaaagtccaaaattgatgaaaatacgcacatgctacaaatcctcagtaaggagctggctgcctatacagaaaacaaaatgagtgaagaagctggagtgatcgaggagg

SEQ ID NO: 17665 - DNA, 659 bp, Oryza sativa
atatttgtgtcctcacaagcaatggaaatagtaatacatatgattaatcttaatttctttggcgaggtaaagctttgcttaatagtaacttggccaaacaccttcaattgatctgccatatgtgcacaagtttcgagtaacaggaccaatacgccaagacaagaagctgaccggttagctgacatgatgtggaaataacagatgttcatgattcttctgttccatcaattaagggttgggtagttaccagtttgaacttttgtagtacttcaaacatccaaggacattctgcaagtcacaggttaaccaacagatataccatactgcccaagtcatacagcatttcatgggaaatggcagaatgcaataatcaaatcctactaagcaacaataatgtactcagaacattatattatttcccctcgaattacatatgtaaagtgttcctaaataacaataatttactcagaacattagatagatccatcaggcaaagactgtacaaacggaacactatcaggtcataaattagctgcagactatctatttcctaattaactgtagacagctccgtgatcgccccttgtctgatgcattgtttcagtgcatgaagtcgtcgattcttgttagtaaatcattgtcgagtgttgatgccgctt

SEQ ID NO: 17666 - DNA, 1327 bp, Oryza sativa
aattcatggcaaacaagccggcagttcctaaattacaagcaaggccgtactcgctacatgatattcaataaagcatacctaaatcacaagcatctagaatggaacatgcatgtgtgtcagcagcagccaacagtactggaagagattcttgcccagtcatgatcattgagatacaactgaaccgaacagggccacatgaaactattccatagtttcataaattgagtaaaatgtggtctaatatttagtttacttggggtatacttttgcttatcaagtaaaaaaaataacaaacttcgaggaagggcaaggagggtgaattaaaaaaaaacaaaatgttaatctagatttcactcttcttctcacctgattaagcatccattttaagccaacagcagcagtgcattcattcttagaagcactactattccaatccaaattgtacaccttatccagtgtctttgttatagatgaaatgttacttctcctttcttttgaagagaaaatttcaccattggagctaacattcatatggctgttaagaagagtttcaaaccagccacttccagaacgttgtgacgagataatcgcgaagaaccggacaggtgtacacttgcattcactcctaagaaaaaaaaatcatatcaaacattacacaatcaaagtatatagcatagcataaaccactgcagcacaactctcacctgctataagttatcggttgtgggtaatgcacaaagtgaacctctgaatgcaggattgcagacttattgcatagctgttctgcaacctcgatcttcactattctagacaagctatcacttcctagttgcttcatacacatcgtgcatataaatatcccgcagatcatagtcatagcgaaaacaaccattctcaatgcgaggggtgatttcttacaggacttcacaatcaatgcgtcctgcgaagaaggtccaatcaatacaagttaatcagtagaaacaaaacagagctactcagatctataggcacatcacaactaacacttgatttattttagctttctgctccagacctacaagttataatccatagatataatcaagagcgattacataatcatttttcaagcatatgaccttagaagcatctatgttggcatgacagggaaacaaacaggaaagatcagattttgaaaggtaactggtccttcattcataaactgaactaacccaggtgttacctccaaaagagggcaaatggcccatgtacctgcccaacatcatattccttaatcaataatggatcacaagccaaagaatcaaaaatcccctttttctgtgtactg

SEQ ID NO: 17667 - DNA, 1409 bp, Oryza sativa
cagcggctttctttcctctgcgtttcttggattgcagcaaaatcgatcccccccccccccacccccccgtaccatttttggtggtggattgcagttcttgtgccatcgatttgggtgggattcgggcgccgcgtggaaggaaaggtttcttctggggtgcccagttgggctaaatttctgggtagctcccgccattgtcgaagctcttcagttcttttgcgtttcttgggccttgtatcagatccgtgcccttgcgatttcttgtaattggaggtgagagagagagagagagagagaggtcgatccatggaggtgcagggagaggtggatggatcgggggtgcccctggcggtgctcctgaagcgagagctgtgcaaccagaaggtggagaggccggacatgctgttcggcgaggcgagcaagagcaagaaaggggaggacttcacgttcctcttgcccaagtgcagccgccgtccaggtcaagcccaggctgacggggaggatgcaggaggcgccggcgacgacgacaccatctcggtgtttgcggtaatgcctcaatggcctgcgtgctcttttttcttttcccgttattactgtctctgagaccaatagtccagtttgttgttgttgttgttgttgctgcgtgtttgttgcgataatgccattgatttagacctataaactgaaaattcggttggaagtcagtgtttataatgcctaactaggatagttagttatcgcattatcttgttaagctttcttttttttttcctcctgcaaaataaaatgtttggtttttttttcccatcgtcaatctctgtgcctaacatggtgcgtttgtttgttgtttgtcccttgcatagagtagcatgattgatatgtcagcctgattttgcggtgtgtttgcatcaagtcacatgggggacatatgtcagctaatattttacttgccttaactgtctctgtgtcaattatttcggtggtcagaagaccagtggtttaggaatattcaaagggagttttaatgtcaatagatgatagatctttcaggcctccaacagttagcattatatattcggttctactaacttgtctatcaacttaacatggcatttttaaataaatcattgcagtgtaaatggtaatattcaggccacaatgcaatactgtgtgatagtgctgaactatgagtctcactattttgtttcgatttttaaacttgtgtgttataacaactgaagtggccactgatcttgaattatttatcctgtcttctcttcagatcttcgatggccacaatggatctgcggctgccatatacaccagggagaacctcttgaacaatgtgttggctgctattcccccaaatcttacaagtgaggagtggacaactgcattagggctgcagg

SEQ ID NO: 17668 - DNA, 704 bp, Oryza sativa
tgctatgcttgctcaaaggtttgatttcatttgatacatgaagcgcatatttcttagacatatcacttttacttgccattatgcctacctatgagttttacttccgatagtgaaaaggtttcctcttccccttacttgaaatagttacgcacttacacttgcccaaaaaataacttatatagtcaagttcatcagtcttccccaaatttgactatagatttgtcctaattttttgcctcttaagattttccaacgaatgtatatgaatataatttcatgaaatgttgactaaactcttataacttgttcacagattaaaaataaattatccgacaggaaatatgttcaaactgcatgattgtgctgtctgccaattggtgatgaaacctggtgagggcatctctgttcatggtagcattccgaggaattcaagggttgatccttggggtggcccttttctatgttcatcctgccaattgaaaaaggaggctatggaagggaagcaacatttgacaagtatgaatgccttcatctaaagattttttttctctttgcattaggacaataattgttgaatgcttttttatttttaatttccagattctcaaccgacagtccaacctgttctcaagtagccttcaacggtgttcgatacttcagtgaatacatgctaatatcactaagaccctaacaggggtgcagga

SEQ ID NO: 17669 - DNA, 703 bp, Oryza sativa
attcagtcctatattcgtcttctagggttttacattcttcctctcgggtcctatattcattttctgggctcctgtatttgttctccgagtctttctctcgattcctatattcgtcctctagggtcctatatctaaatttaacaattctcaaatcctttttatcatttttgtatcgtgggttgtcaaaataagcaactatagtatttctacgtaaaacacccataaagggtatttcaatcgaaatcccaaaaacaggatattggttctttcgcttgctcttgatgatactgtttcttcgcattttggctaacaaatctgaattattttgaagaatagaaggatagacaaaattcaaatgaccattggacatgattcgatccggcgttgaataatcaagaatttccctatcttttttaacaaaagtatccattcagtcgttctttttatcatgccatttttgttatttatcagtttttttggaacaaaaacatggtattttcttagttgatgctttatgcaggtatctactgactttaaagatcatgaaggcataatgcatatatcagggctttgacatggtcttcgtgcaagaataaaatgccattttgtgtttgtcaacaagtgttatttattttttaatcaacaattgtttgtcttacttcaggttcactgatctaatgttttagtcttgcacctatcactt

SEQ ID NO: 17670 - DNA, 1076 bp, Oryza sativa
ccaaagttcgatcgatggtagctcgtccatggtcgaacccatccattccagaaggtcggacctgtcagagcaccgtggcaccccgtgcgacgacgcgactgtggtctgtgggcccccaccctctcaaaaccctcacgccactgacatctgggccccaccccctacttttctctcccccctcgctctcccatccacgcgcgcggagtgggacccaccacccaggcgttcgcccttatcgttgcgcgagcccttcttcttcctcctctctctctctctctctctctctctctcgccaaccaatctcctcccccctcctttcctcctcctcccgaaccaccggaatccgacgcggcgccgccgcgccaccccgttccgccggctctcttcctcacctctcctccccaggagatcgtcaatctcctcggtaagcaagcaagcactcgggtggttcgagctgtgccctgcgatcgatccccttgcggagttgcgacgcgaatatggtgtctaagtttgatgttacgttagggtttggttggttcgtttgcggcggtgttggtgcctcgtgtgtgatgtgtgtgtgtgtgtgcgggggttaatttggttcgttcgtggatgggggggctgatctggcatcgtgacggtgtcggtgttaattgttaaacctttttcatttctgttccttaacttttgccgtgatgggggtgatcttggagcgctgcgctggtgtaaatcgggctagattttggaggaacgtcacagtgaaattcgtcaataatcgtgtcgttttcctgtcgaatttttggcgcacggtttgatgctgttggggacctaacctaacctcgtgttcttgatgcgatgcaggtcaggtgtttgatcgattgcctgtgggaagcatatgggcggttagattcgtgaagttgagaggaatcagaagacgggaattgtttgaggggactgaatttgatctggaaaatggggtggtttcgggctgcgtccggattggctcgggtggcgctgaggaggaacctggcgcgtgctccggcgaacccttttgccggtcctgcgccacggtactt

SEQ ID NO: 17671 - DNA, 711 bp, Oryza sativa
tgttgttacataatctgatgtattcaagaatcttaacagttccctgtcagagtttgctgttttgggctttgaattgggctattccatggagaatccaaactcactggttttatgggaagcccagtttggtgatttttccaatggagctcaagtgatatttgatcagtttctgagtagtggagaggcaaaatggctccgccagaccggtcttgtcgtttgccttcctcacggatatgatggtcaggggcctgaacattccagtgcaaggttggagcgtttccttcaggtaccatttttctgtttctgactgcagaaatgtcgtcactagtatcttgtgttagtattagttgcattatcttatcatctgttgacataaaaggaacacaacataacagcactgcttttcacagtgttgctttctcataaactgtgttggcattgccatagttctacagttcatatattttgtataatatatgctgatgccatgtggtgatacaaagttgcggacttttaacacttcactgaaattcagcattttttttgtttttgtttgtttattagttttccttttgtcataacttgatgactgcgcatagaaatattccgcactgtgactaaccatattatattgtactaactctacttttgacttggaaactgcaccacatcatccatttgtacatcatttattctgcagggctgcaggaa

SEQ ID NO: 17672 - DNA, 561 bp, Oryza sativa
atgaagtctacaatgctctaaatggcactcagtatgagagcttcttgaatgctgactacagaatatgacagtgtgccttcacactccctgtatagatatatcctttttctggttacatttctttttaaaatagctggccttgatgtgcctggcgaaaattttgatggtgcattgccacggttgcccacgagtgttctttgataggttcactaattgtcatagcagggttttgttttttgttttatgttttctgtaactgatatgctcaggattctaatcttgtgtattgcagtgcttattcttctcccatgttaatgatatgcatgtttccagctcaaaaataagaactatccatccatcatccatgttagctctgacttggatctttcctgctcaggttaatgctaccgagttatctgatgttaataggctaatgtgctcttgacgattcagaactgtaacagtatggtactacaagactaaatttcgcgttacttcgtagtggtgttgtttctttctctctctctctctctcttttttttttttttttttttttttttt

SEQ ID NO: 17673 - DNA, 5873 bp, Oryza sativa
ggaaaaagtacaccgaaggtccttcaacttgttagtcagatacaaaatcgtcccccaaccgtaaaaccggacatccggcgtccctcaacttacaaaaccagtcacaatagatccctcggcggttgtgatcccggttttgtcccacgtggtggctgactcagcgtgggacccagatgtcaggatgccacgtcatccctcccttcctcctctctctccctctctcacttctctcctcatgggcaggtcatgccgtgacgcgcgtcgagtgccgcggccaccaccactgtgacctgtggcagcgaggggcaggcgcagcggagcgggacggtgaggttgtcgccggcaacgaagccgatggctggtgctgctgctcgtcgtcgtcttcttcgtccacaacttaccggagcacgccaggttcgacggggtgcccgcgagcaccattgccatgagctcaaccgcaaggtgctcgagcttgccccgtgcaccgttggcgccagcttccagctgccgaccaagatatcaacaagcgaagagacgacggcggcgaggaaccgccaaggcgaccagaaggtggggacccagatcgccgccgtcttcctcggctgccccgacgaccgggagtcggtggcgttcgcatgccacctcgccaagaacgacggcgccatcaggctgaccgtcatccgccttgtgctattggcgtcgtcacgcacgacggcatcgccaacgctgcatgcatagttagctaaggctttgtgctatgctagtacgtgcatgtgttgcatgagctagtggagcaagtctatcggttggttagcttaatttgtgcatgcatgcagctggtagtggatcgactggagcatgcatgtgtggcacgacctctgctgccagctccaagccaaggagaatctcgccgtcgcaagcaagtgtagaaactcacaccatcacccctccaagcacagacgaaactcactgccgaaactcgccgggcacctcctccagctcatgcacgcggctgggcggcggccggagatcgaactcatcgccatcgtcatcgcgaggcggcggtgaaggcgtggctctccttgttcgcggctgcgcaagttggccagggagccgtcgcacgtgtggctccagctccgccaccgcggtctcccgcagctccgcccagccaaacggcagccacatcggcggcgccgtcatcttcgatctccccttcctctgccgcctctcccggaccggctactggcagtgggagaactgttgagaatataggcatataatgatttaatatattccataaataaatcatgacattacagatgtatactagcattaacgcatcattagatctacacatgtaaactaagcagtaaaacatgaacatatcaaatatgcgcaacatgtcgaacacgtaccgaggtggcggaaagaccggttgctcggcaggaactactcgcggttgcgagcgtcgacgaaggcgcgcagcacgcgagcggagaggaaggcgagctgttgcggacaaacaggaagcagtcgcgcgaagcgctttccaaaaaccttattgctgccttctcccggtgcaggacgtcgaaggcagaggttccggcgacctgctctcccgatcgccggtgcacgctggcgagcgagatggagtagtctacgagtgacggcgcaacacagaggaggaggcaaaccctagattgatttcgcgtgtgttgcgtgaaggcggtggcacggtttatatagagataggtcgcttgatcagggcgcccgcacgatctccactctgcgtaaccgagccggataagtcgcgcgtaacttatccggactccacgccgttttcacgcaccggattttttggaatgtttccaacaacaaaacaaatccgaattttcctgcagcaaaacaaaactgcaaaagaaggctgcatctgcacaagggtgaggagccaattttgcggaccattcgacgcgtacgtcatgcacgtgcgccgcctgccctgccttgcagggccgagctgggcctgccctgcgagatgagcgagcgcgcgcgtgttccccctcttctctccaccacacatgcttcaagtggctaggagggcatcctcccttttaaggaggtccccctcttctagaataagtaaggtggtactaacatccacatgcatgccatcccatgaggtgggcttttgtgattttccaaagaattaatcttcgaatgggccttagcccatctattaattccaacaagaaccaccaccgccggccgaagctagccaagggcaccagcggtggccgcctcgccatctccatcagcagctacggcgacagctagatctccactccgccgtcggccgcgtcgaccctcttccctaccgcgccgatggagctgccgccgctgcattggccctcggatctcctctcagtcgcgctcctccttcgccagccgccggccgcgccggtgtcgccgcctcaccccgacgacgaccgccgcgctcctccccgtgcgacggcagccatcggcggcgccgcccgtcccatcggccctcctctccgcgccgctccttccccgtcagccgccggccacaccagccctcctccacgcgacgctgccgtcatccacgcccagaggaaagaggaagagagagaagaggggaaaaagagaaagggtgatgacgtggtctatctgacatgtggggcccacatgggtcccatgctgagtcagccgtcacgtgggataaaaccggggtcaaaaccgccaatggaccttttctgaccggttttgtaagttgggggacgccggatgtccggttttacggttgggggacgattttgtatctggctaacaagtcgagggaccttcagtgtactttttccaccagattgatgcactggtactatagctactacttgaaggcccaacgcacaaatacatttgggtctaaataggtttcaaattcgattcatgggccaattttatagtctggaatgtcagccttacacggttgttgttgcacgtacaggtctaacactacagatgtttatttatatgttgtgtgatgactaaattctgttgggtcgttaagttttatgcttgtaaatgactaaaaaggtatctcttcgtcatttgcactgtcatagaacggggaattttgctactgaaaagcatgtcatgtccaaatcttggaactgaattaagcaggaattttttttttcagaaatgccccaccaacccgcataaaggatatactaccttttttgcgcacagcgagttttgtaaggagctatagtaatagaccttttatcatgcggtattatcaattgatcactaattaatatacacaataatacagtcatggattggttgttagacagaatgatgacgagctaaaagtattgtaaaaaatgtttagtaatgtatgaccacattccttcactgtttctgccaaagagagtagaaagttcagttatatcgttgagctaatttctcaaccacctacttatgttttaggatcccagcactgtacaaataatttgagatcgcagtactatattccctcagtcgtaaaattaacataaagaattttagttggatgagacacattctaatatcacgaatctgaacaaagatcatatccagatttatatatgtctcatccaaccaaaatctctcgaagcaaaagagcacattgcttgtgttgctgtcaaaatcctccagctgcctcatgggctcatggcggtcctcaggaaaaaaataataatttgaagaaataaaatgatattgtgtccctataacttcttaaatttgtagttggcttgctagctaaacaagtatagatcgaacgaaccgaaacatgcgagaaaactaaccaaatgaacaaactgaactactactctattttttaatatatgactttgttagcttttgacaattaaacgtttgatcagctatcttattcaatcttttctaaatataagaaaaatttaagtcatgcataaaaagaacttttgatgatatatcaagtcataataaaataaatgataattataattttttcgaacaatatgaataatcaaacatatttttcaaaagtccacactgttatatatatcaaaagacgaatagtttcgttaggctaaccacaatcagagccacgctatgtcatgcctcaatcaaccatttcagtctaggaacctgtcaatccattcatgccatagtgcagcatgaccttgaattagaccttggcagcacagggcccatcatttactgtcctgacagcaccaggaaagcgtaacttcatcaggctgtgtttagttcacactgaagtttggaagtttgattgaaattggtacgatgtgatagaaaaattgtgtatgaaaggtttgatgtgatggaaaattgaaaaattgaaaaaaaaactttggaactaaacaggacatgagatccacggctcttcacaggggaccaagttatgcagatgtgggtacgaatctttgagctggcgtatcgaagtaactcgtcacatattcgcactgtgaaggcccttcattaaggacacatttcaaactgattgaagaaaaaatgcattcattctcattcatttttgttcttttggggggaaaaggacacatttcagggactaattaaattaaagttagataaactgaaaccaactactagctggtaattaattaaatcaaagtacttatagttactacaagcagcctcctgccaaccccatttttgttggtgaaggcgtggccggcgccgggactgtgcccgggcgccgtcggccgggcgtcctcgacgatcccgacaccgccgccgccgccgccgccgctctcggcggcgtcgggcgagagcgtgccctgggtcatcgccgtcgtcgtccccttgccgccgccggcggcagcttcttcgacgtcgccgccggaacgcggtgccgacgacgacgacgatagcaggtgtctctgctgctgcgccgccgccgccgccgccgcctccgcaatgagaggtcttccctgtgagcacacgatgatcatgtcggaggaaaggaagaagatgatcccaaggacgaagatgagattcagcttagaggaggacatttttttggcaaggttagctagtattagctctgaagcaaatcacagtgcaagttaagctaagctagctagtgatgagcttaatgaggagtgttatactagctagctagtgtggggattgctatgaggtaatcacacccactaatcctttgctatttatagcatatgttgtgcataactaggatatatttaatggagttaagataagcttagattgggagcatgtacggagaaggaatctttgtgcataattaaatagggctgcatatgcattagcttagctatgccgaggaaagctgctagtactatacggcttatagctaaagtcgaacacaaactctcctttttttgcatgctgcatggtaggtatttatggaactggccacaagtgttcatcagcaatgcactaaccgcgcaccatgcatgtggcaccgttacgttgcaaaatctagctagtgttatactgtacttatatagaacttgatgtatatttttgccaagtgttcaaaaagtaaataaagtaaataagagagaatgaactaatggattctagtatactaccccctccgtttctaaatatttgacgcggttgacttatttttaaatatgtttgaccgttcgtcttattcaaaaagtttaattaattattaatttttttatcatttgattcattgttaaatatacttatatgtatacatatagttttacatatttcacaaaattttttgaataaaacaaacagtcaaacatatgctgaagagttaatgggtg

SEQ ID NO: 17674 - DNA, 950 bp, Oryza sativa
aaatgatcttttgggatgttctggagtatagatggcagaccatattggtaatgaagcacattgctggcatcatgcatcatagtgtacttgagcatctccgcgaagatctccgcatcgatttttgtcagtgatattgtttctgacaacttaattagtgtgagacaccaaccatgttgcctagaatgcttgccaaattgaattgttcagcactcggtagtatatgctacatacttttacgtatggctctttaggggcattcagtacctctgtttggaactttgttcaatcactgcaacagaaactgcagttacttacatatcatttatgcaattttcattcagatgtttacttcaggaaaagtggtctggaacgctcagctagaattacaaaagatttggagtggtttggagggcaaggaattgcagtaccagagccaagtactgctggatcaacatatgcaacttatctgactgaacttgctgagagcaatgccccagccttcctttcccactattacaatatttattttgcacatacaactggaggggtggctataggtaacaaggtaatgctattcccatattggatttaagtccccattaagttgtgtaatgaactgttgatatatatactcatgtttcatacctaacctgattaaatatccattatatgtctattaaactataaacaaaatataaaccagcagatttaaatgaaatactgagttcaacgctactttcttatcagatgagatgatacattgtgatttcattgtttcatgtctcaacatgtttctcattaaatggattggcagcacggagctttttgtatggagttgacaaaagagtgtaaagctgaatatctagactgatacatttctattctgggtatcagatattcatatataaagttcctctgttagctggtgatacagggctatttaaacattt

SEQ ID NO: 17675 - DNA, 1794 bp, Oryza sativa
ttcctgcagccctcctagattcgttttttagggacggaggtagtaagtcagttagctcagagcgggtacaatagcagactataagccagctataaacacatttcgagaagataaaataggagagagaagagcagcgggctacagattcgtagccagctgcagtataggctccaagatacatgtatgtatgataggtgggatcaactataaattgtgtagtatatatttataggtaactattgtatgaatcggctattaaattgactataaatgatttggagccggtagttggctataatattaaacttgctctcacaccttatggtgctagctgaagaccccaggttcgagcaatctataggtagatttttgcaacaatttcatcaaatcagagacaaactcacacgtttcaaggccactacttcaaatttaaacagacaagccattcgtttcaataattctctatggccccagcccccaggcctctgctgccattgccattgctattgggagcagagccaatcccacatggcggggaccaatcatcaagcgagagaccatctcatctcctctcttgtgtgggagcctcctgcgacaaatgctcagctgcagctctggagaaacaagctgaatcggcagcaagaaacaattactgctagcattttggattttggcagatacacagataacattagatggatatacctggctcactcactcgtgacttgagttccaacaaccacaacacgggtatatatcaataccattcacccccgtgatgatgatgtattgatatatgcgtcgtacatttaaacgcatatacacacagtacttgtacatcaatttccagtccagcagaaactccaccaggggttggtacaggcaaaagcaaaatattgattgcaaggataatgtaagatggtagtagtagtagtagctaggattggtacaagcaaagcgaattcattgcaaggataaatggataatgtggtgaggtacaagaggagacgaagctttggcaggcatggggggatcctggctggctagcatggtgttctgctgctaagtgaattgtgtcaggctggcatcattgcgattgaacgcgtgagatcctgatcgacagcagcaagcatcttcaactttgcacagttcgaagttgctgaaagcaagagctcactccaacgagcagctccaccatgcaagccagaaaagaggctattgttgtggcctggtgttttcaatctccaggatagtgctcgctgatcagcttcagtctcacaccagaagatccttctgtaccagacttcaacatagttaagacgtgtagtcttcgacaaaaatgactgcactaagcctcaagtttaatatatctctagctttcctgtcttcaggaatagattataggttgatttgatcagttgctcatctatgaggaactataagatgattaagcgaacaatccgccccaaatgctggaaacattttgcagcttctttcaagcacaagttcctgtccttccgagaccaatgctggacagcatgacagatagactaatcaggttacataagcatataacttctgtggcaaattccagtttcgagcttacaagaaaataaaagaaagtgatcttgaggcggttaccttgctaagttcgttaagcttctccctggtatcttttagcaaaagttctacatcagaatcccatttgtaaaactctagctcccttccttccaaaattttcttggatatctgttacgtttcaaactaatacttcttcagagagcaattaaataa

SEQ ID NO: 17676 - DNA, 3135 bp, Oryza sativa
aatccatacaattttcatttcacgccacgacttcacaccatgcatcaagttccatcaaaataatcacaaccttaaatttcaaccttgcatattgccaaaataattgcaaccttcgccgcatacccaagtgagcactaaaaatggaattcctaccacctagcttgtatcccccaaacatgttcttaccgacacattttaccatcctaccaacaagtcaatatgtcatattctaaatctataattcctgaaaaattaggagattccaattgcattggaaactgaagactaagctgattaaggaacaacattgaattaggatattctaattgcattgggaaggcggggatttggagagtaggaatcgcaactcacaggcgacgtcggtggactcggctacgatccgctcgacggtgtcgaagacgagcttgctgtccaccaggtacttgacgaacccctccatgctcggcatccactccccctccaaccccgctccctcctcctcctcctcaaccacgtcgtcgtcgtcctcctcctcctcctcctcctctgacgccgacgcatcctcactgacgccatcgcccacctcctcctcggcccccgtatcgtccatcttgagggtggtccgcttggggttccggaggcgcatggcgacgaaccgcatctcctcggcgacgcccaccgcctcgccggggtactgcctcgggtaccgccgcggccgcggcttcgctggcggcgcctcatccaccgccaccgcctccgcctccgcctccgccgcgggggcaggaggggagggagcgcagcgggccaccgttagggctgctaggtccctcgttagtattagtccagtaaaggagcgcaagggccgcgctctccgcggcggcggaggaggcggccgcggcggcacgaccgccgaggcggcgacggcggcggcgagcggcatcggggggtttaacgggttatccactcgggcatcctgcacggcactgtgttgtgttagctgcgaaagcggattatcggttttccgccttcgcgtgacgtttacgtatgtcgactgttgcactacttctggtacgcgaaagcgtaacgggttctacgcgttccagggggaatgcagattggggaatccaagagatatgatgggccaatatgttttgggcttggccatttttagttttcctttctcaagaggaataagttcatttcgtctcccacaactatagtgctaaccgcaatatcttgcgactagtaataatattttgcctcctccaactagtaatacctgttcaatttatcttggaattccaagtagttttgatagcggtttttatcctacacggtattacatcaacccaaaaaagtgtaaaaaaatgcagcgtgtcccatatcacaatcgacacactggctttcttcttcccctttaccgcgcctaaggctgtgtttgcaaccccttgtttccaacccttctccctcgttttccgcacgcacgcttttcaaactgtaacagtgtgttttttgcaaaaaaaattttatatgaaagttgcttaaaaaacaaattgatctatttttttaaaaaaattagctaatacttaattaatcacgcgctaatggaccgttccgttttccgtgcgtaggtgataggttcccaacacccaccaccgaacacacccttatttgtctccatagccagtattacatatgctgatacgtgtggaggcgagctcaagcttgcttggaaaagctccctccgccggcttgccgaccaccgccccatcctcctaattgaaggaggttgtatgtttgctttaagtttgggggatgaaatgtagacttgcccctatagttgagggaggcaaatggacttttccctctcaaaaaagatataatggttttaatacgctctgtcccaaagtcccgatttgaagcccatgtatatattaaagatcaaacaacgattgcctgtttggcacatagcattctagagctggagctcaactaaacaatttcaactcaacctaaaagggagatgaaatgggttggagtgatgtgaaaaaataaactagagtggtgcacaagagttcggaccgctccgtagctctactgactccactcgtggagttatttaggagttgaaatcctgccaaacaaatcccatatagtctagtaaaacatattgaaaggaaacattttttaagctatctcaggctttacaggattgaatgattttcacgagaatttggaagcttcggatcctttggaaactttttctaactaggctttttggaacatataggaatataggttcataacttttcttttagaatgctttcctatgtagtaccaattccggaggaaatttgtatatcagcctcaaatctagttttttgtttttccttgtgtatctttttctcgcttctttaagcaattacaagttccaatgtgtaataagtcatttgacttttttttcctagtcaagcttctttaaatttaatcaagtttatagaaaaatatagtagcattttcaataaaaaacatattatcaaaatatattcaattttagatttagtgaactaatttgataatttagatgttaccattttttctacaaacttgattaaatttaatgaaatttaactagcagaaaagtcaaacgacttataatattaaacataggaataataacagttgtgtcaatgggacatcatcacatgtataattttggatgcttgtacacattatttgattgagagacacaaacggcagtttgctatagtctgcaatgctgccaaagttatacaagatcctagatgatgggcaaatcaacactataatcagatagattccaatgaatgtgcaaacagtgattatattactttattagtctatttaattatatattgttttttggtttgtattcctctttgccctctcaaagtggtctatatatacttacatagcatgcaaaatagaaatatttgcctgtgcacagcactttacgtgcgtattttatagcacaaaatgatttgtgattgtcgcctttttacaatgtcatgtactcccttcgtcccataatataagggattttgacattttgcttgcactgtttgaccactcgtcttatttaaaaaatttgtgcaa

SEQ ID NO: 17677 - DNA, 644 bp, Oryza sativa
cagcccgtaaaatttaggccccaacttaccacggccggtgaccccgagcgaagcaatcgggcgatggagcaaacgaagccacaaccagtcgcccacactgaattccaatgcccgatgcttgccatcatacgccgacttgtgtgtctgctgcgcttgctccaggcgatcacgaatctcacgcaaaaattcatctcgatcttgcatcgcctgttggactgccagcagacgagtggatcccggttcataggcgcgcagcgtaggcggctcacggccataaaccacacggaacggcgacgtgcgaagagatgactggtaggacgtgttgtagcagtactctgcccatggaagccaccgtagccagtgccgcggccgatcgccggtaagacaacggagatacatcgcaatgatcttgttcgtcacctcggactgaccgtcagactgaggatgaaatgccgacgacaagttcagtcgtactccggccaatctgaacaactcccgccagaaagtgctggtgaagaccggatctcgatcactgacaatagaagctggaacaccatgcagacgaacaatttccgagaagaaggccgctgccaccgaggttgccgtgtagggatgagccattggtataaagtgggcaaacttgg

SEQ ID NO: 17678 - DNA, 1625 bp, Oryza sativa
gctgtgtcttgggtgtacagttgtacacctctgatcagagtaaaactattcgaatagccgtgcccgcgattatgggcggtcaaccagattcaccgtgattagtctcaccctagtttagtctaatgaaattggatagtataggtggagggttgggcctgttgcaacgtgggatagcgttggacagcggatgatcaatattaattaattattgcaactgtttaattctttcaacttctgtttataaatgctcgctttatgcaaatgaaccactctagctctcctttgataattccctgcatcatacccctattccggtatgacttgctgagtacagtgggtagtactatgtcttgctctatttttccccaaccccagagtgcgagtatgtgtccgatggcgggttctccgaggagtagacttcgtccgtgccgtcgagggtgcctgtggagtggtgttcccgctgcagttcaagtccaggcttagccccagttatcttttgtttttccgctgcatttatgtaagacttttatgatgtttgtaagacgtggatctgaatgtcaacattgtcgtttgtgtaccccggccggtcctggacggggattttaatgcacattctgcttggaattctattcgggaatttctgggcgtgacagtcgtcggatagggagcatgacaacaatgaatcctgacagaggcggatctagaaaattggtccgttggtgtcacaacgtgtctatcggtgtcatagtatgctaattatgcttagagcataatgttatagtatatgaataagctgttttgttataggttttgtcgaaagtcgtcggtgtcggctgacaccgacgattatactgtagatccgcccctgaaccctgagcatgggagcagcagtgggatctacctagggttttggaattttatttgtgctttttgctgattaatttctttcctaaagcatacggcataattctcgcgtgaaaatccctttttgtgcacggttgtgctgttcatctgcgaaagtttctatttttattgacatctaggggtaatcggttgctttctccgtttgcaaaaatacattttagtcgctttgaaaaatcgactctgtgctagtgtgaccaccttgactaacctgaacctcttaattacttataaaactgtagtgatttgtaagcaattccgtttgaacaaatcatcgtactattttaaacaggtatgtcacacgcatagggatgaaaacggtcgaaaaaatcttatactattttttatttccaacaccggaacaaatcttatgatcggtgcaaaccggaaaaaaaacgttagaaatttccgaactgttttcacccctaagcacgcataccacgcgcggttccatgtccccacgtgttgacggcgaaccggcatttccacgtagtcactgcaggcgggacccctctttacgaattacgatcaatgatctgtgcacaggaagcccaacaacctcccggatcacgatctctcactgacaatggggtccaggatgaagtgtgacccacatatactagtacacatggccacgtcagctccattcccgtcgcgtcactgcctctcgcgactgcatttaaattcaccaaaccagtgatgag

SEQ ID NO: 17679 - DNA, 1387 bp, Oryza sativa
ctcgccatggtccgcgtcgaggacctgccggtgaaggtgatggtgctgaacaaccagcacctgggcatggtggtgcagtgggaggacaggttctacgacgccaacagggcgcacacctacctcggcaacccggcggcgaacggcggcggcgaggtgtacccggacttcgtgacgatcgccggaggcttcggcatcccggcggcccgcgtgacgaggaagggcgaggtccgcgccgccgtcgaggagatgatggcggcgccggggccgtacctgctggacgtcgtcgtgcctcaccaggagcacgtgctgccgatgatccccagcaatggcgctttcaaggacattatcgtcgacggtgatggccggagttcgtattagttctgaacttcaatatatgggactatccgtacatttatcgtctaaaaatgtgttatctataaatatagtaccatagtaatgtaattacattgtaactatatataattgttctataactttcgttagttttgaaccactccttttctcaatggactaagcagtgttgtgctgattgtggcatccaagaggcaaagctcaaataaattcatgtggtgtatgatgttgccgtcggaatgttctctgctctcgttgctaaaaacttagagtaaacatttgaaatcttttcatatatctactagtaatgttcccgtgctaacgctacggtctcacttgaatggcttgctaccaaaaccagaaattgataagcagtaatataggtgatatagcaggaaaagataccatgtcaaaatgcatataaatattattacaaatttggtcattgacataatactacatttcatcagagttactggtgaaaaataatgtctcgcggttataaagacaaggcaacaaagataataaatggatgaattcgtatcattgaaaataaacccttgttttgccgcccaagtcgttgaagatggtaattgatggctttgttgcattatttaacctccctttctatgatcaagtcttaagcaatcatcataaatatggaaggcacgtggattaaaatctgggtaaacaatttgaaaggattaaaaaaatgaaatggcgattaagacttgagtcctagtaaaaagcaaccaagagattcgtctgctggacattctgtagaatatatctttcaacattaagctggcacctataaaaatgacaataccaaaaaatgtagtagcagaccacttagtttgtttcatgtagaagtagtgatgtcattagactagatataagacacctaatatatatacctgtattaaaaagtgaactccaaatcaattgtcttgtgtttgtgagctgaatcaagaagctcatggaatagcaataagtggaatagtcacacgggggg

SEQ ID NO: 17680 - DNA, 4783 bp, Oryza sativa
ttgagtcagggttcataccaagctataattgttggacatcccacggagagcaaggtgttgaaatggaagaagatgaagtggaagacgacaatattccggactttgctcagtacttggatttgaaggaaatcaaacgggcgaggaggaaagggatgctgatggtaactacgttgcggatgatcttggtcagatattgcaggacgccaaggaggactgcgaaagtgaaaagggggcccataaattggacaagatgttagaggaccacagaacttcgttgtacccaggttgcgagcaggggcacaaaaagttagataccactctggagttcttgcagtgggaggcaaaaaatggggttagtgacaaggcatttggcgatttattgaaactcgtcaagaacattcttccggagggaaacaaattgcccgagacaacgtacgaggctaagaagatagtctgcccgctaggactggaagttcagaagattcacgcatgtccgaatgattgtatcttatatcgcggtgaggagtatgagaacctagaagcatgccctgtttgcaaagcactacgatacaagattatacgagacgatccaggagaagttgacgggcagctaacaaagaagagaattcctgctaaggtgatgtggtatttccctataataccacggctaaggcatttgttcaggaacaaggggaatgctagaatgatgcgatggcacgctgaagagcgtcaacaggacgggatgctgaaacaccccgccgatggttcgcagtggtgaaacatcgacagaaaatttaaagaatttggaaaggacgcacgaaacatacggtttggtttgagtacggatggtatgaatccttttggagagatgagcagcggccatagcacttggcccgttacaatgtgtatctacaacctcccctctggctatgcatgaagaggaagtacataatgatgccgattattattcaaggccccaagcaacttggtaacgacatcgatgtgtacctaagaccactggtcgaagatcttaaactgttgtggaagaaggaaggtgtctccgtgtgggacgaggacaaacaggaggagtttaacctacgagtactgctgttcataaccatcaacgattggcctgcacttagcaacctatccggacagtccaacaaggggtacaaggcttgcactcactgtatggatgaaacagaaagtacgtatcttaagcactgtaggaaggttgtatacatgggtcatcgtcgattccttgtagcaaaccacccggtacggaagaaaggcaagcacttcgaacataaggctgaccaccgtacgaagcctaaacatcgcagcgggaaaacagtgtttgctatggttaaagatcttaaagtagtgttcggaaaggggcctggaagccagcctatagagagcaaagatggtcacgcggcgatgtggaaaaagaactctatattttgggagttaccctattgggaattcttggacgtacgcaacgcaatcgacgtgatgcacctcactaagaacctttgcgtaaaccttcttggcttcctaggtgtatacggaaagtcgaaagatacactggaaacacgtaatgatctgaagcatatggaacaacgcggcgaccttcacccggaaccaaaggagaaaggaagccattacttgagtccagccagttacactcttagcaaggcagagaaggaaagtatgtttgaatgcttggagagtataaaggtaccgtctggatactccacgaatatcaagcgaataataagcacgaaggagaagaagttcacaaacctaaagtctcatgactgtcacgtgttgatgacacaactgctaccagttgtaataaggggtatccttccagacaatgtccgggcaacaataacaaagctatgtgcattcatgaacgcaatttcgtagaaggtcatcgatccggatagattagaagcccttcagaatgatgtggtgcaatgtttcgtcagttttgagttgatatttccaccttcatttttcaatataatgacacatctgctttgtcaccttgtgaaagagatcagtattctcgggcctgtgtacctacacaacatgtttcctttcgagaggtacatgggcgttctgaagaagtatgttcgtaaccgtgctcgtccagaggcaagcatcgccaagggttatggaacagaggaggtcatcgaattttgcgtagaatttatcgaagatcttcgcccaatcggggtacctgaatcacgccatgaagggagactacggggaaagggaactctcggaaggaaagcaataatgacggtagacaacaatttattccgtaaagcccatttcatggttctgcaacaatcttcattggtagctccttacatcgaggagcacttggctctagttcgcgccaggaacatcggtaagtccgatgcatggattacacgacatcacattgatactttccccgcgtggctacgacaacatcttatgggtaacaagtcgatcaaccaacaacttaccttcctggcgaggggatcgtctgggtcgatcgcaacattccagggatatgagatcaatgggtacacattctacacgagagcccaagacatgaagagcacgaaccaaaacagcgctgttcgtgtcgatgccatgggacacgatggaacaactggcacgtattacggtgccatcgaggacatatgggaacttgactatggtcctctcaaggtccctctgttccggtgccaatggtttaggttgactggtggaggcgtaatgattggtgacagtgggatgacaacggttgaccttaacaaggttggatactcggacgaaccttttgtcattgccaatgatgtaacgcaagtctttttcgtgaaggacatatctagcaaaggaaagaagagcagagggcctgacgagcctaagcgtcacgtggttctcccaggcaaaagaaaaatcgtcggagttgaggacaagactgacgaggattacgatcagttggatgggcaacccactttcacggtgacgattgaccctagcatcctcctatcaaatgaagacaccccttactcacgtagcgatcacaaggagggaacaatagtgaggagaaagtacgtgcggtcaaccgtcaccgcgatctattgctgtaattattatgtacacgatgtaaactattttggatgtattgattatccatgtaaatcaattgatgtatggatatgttacttacgcacgattattagaggttttaacaagtttaaatcatgtatatgctagttatatgcgatacttacaatttttaaaagttttaaatcacgcaggtggcaatttcatatgttaattagagtttttaacatttaatttactatcattcatatgctaattatatatgactatttgaatttttaaaatttttaaatcatgcatgtggcatttacatatgttaattagagtttttaacaattaatttaatataattcctatgctaagtatatatgatgattacaatttttattaattttaaatcatgccgtatgtatttgagttttaatataagattgttaaaacataaatgtctcatgacttagcagatgtttcctgtatgaacagatggctgatcgcgatgaggaacagatattgtacgatacaatcgcggagggaagcagccagtactggaacgaagaagaggggaacgaggatccaaaccagtatttgaacgaggaagggaacgtggagagggatgcggaggggaaccaggaggggcacgtggaaagggatgtggaggggaaccaggaggaggaggctagtggaagtcaaccctccgttggacagaagagggcacgcgggcaacgaggtgccgcgaagaagcttgagggtcggcacatcataacggaagtggaagaagatggacgacctagtgccccggcagaagccgccaagaactatgtacgtcacagcggttgggttgtgtgggataacgtgcctgtcagtacggtgtactagcgaagaacaagggcacgcggagatcatgagagctttgtcccagatttggagaaagagatgctgtggaccacaatgctcgagacattcacccttcccgcgggtacagaggacaaagtgaaaaggtggactctgaagaaaatggcagaacagtttcagaacttcaagggagatctgtaccagatatatatcctgaaggggcagacaccgaacttcgacacattcccaaaactaagggatcaatgggacgagttcgttgcatataagacaggtgaacaagggcaggcgatgatggaaagaaacaaagaaaatgctgccaagaagaagtaccatcaccacttggggtcaggcggctatagcgtcgtgatgccgaagtgggaggagatggatgctagcttgcttgagagtggtatcgaaccggccaccgctaattggccggaacgatcgaagttctggtactatgctcacggtggaacgctcaacccagctgatggctcactggacttcggcgatcagatacgagatgctgcgcgtcgactaacagacgcagtggaagcctcttctcagggcacgttccgaccagacagagagagggacgagctgtcactcgccctgcagactccagagcatccaggacgaacacgagggaaaggggtgattccttggaagattgggttcaaggaggacatgcacatgtacaggagtcggatgaggagcaagagagataccgagtcgaagattgcagatctagagttcagggtatcgagctacgagcgca

SEQ ID NO: 17681 - DNA, 569 bp, Oryza sativa
ccccgatgtcgacgtgcacgatcttggccctgctcgcgaacgcctcgactttgccggtgacgcggtcgtcgaagcgcacgccgagcgcgaggaggaggtcggcgttgtcgacggcgtagttggcgtacacagtgccatgcatcccgagcatccgcagcgagagcgggtcgtcgctggggaagttcccgatgcccatgagggtggtcgtcaccgggatgcccgtcagctccacgaagcgccgcagctcgtagcccgacgcggagcacccgccgccgacgtagaggacgggcctctcggcgtcgccgacgaggcggatgacttcgtcgagcaggttggcggccggcggcttcggcagccgggagatgtaccccgggaggcgcatcggcgcgtcccaggatggcacggccatctgctgctggatgtccttggggatgtcgacgagcaccgggccggggcgacccgtggacgcgaggaagaaggcctcgttgatgacacgggggatgtcgtcgacgtcgaggactaggtagttgtgcttggtgatggagcgggtgaactcgacgatgggcgtc

SEQ ID NO: 17682 - DNA, 4574 bp, Oryza sativa
ctgatttatgccttgcatgctttccaggactagcattccatccactggatgggattttgcaagccataccgcatgtgtttgcgctctaccttatcccaacacacttcaggacacacattgctctcttgttcatagaggccgtgtggacaactaacatccatgactgcattcacggcaaggtttggccggtcatgggtgctggctatcacaccattcaccatacaacataccgtcacaactatggccactacaccgtgtggatggactggatgttcggcacccttcgagagccagaagatatcttgaagaaggattaggatcgaattgttaagcacggcgcgacgttcgcctctcgtctttgtagcagtcggaagaagggggttctatgtatttatcctgctcgatgctatctgttatctttcatgtaccaatgtgctgtttcagtatgctaggtgaacataaaagtgaactttagtgagttcatcatccctggaatgcaatggaatcgagagatatatcctgggtaggttccaggtgtttgtaccattcctgaatttctctgtacttctttgtgtcaaagaacatgatgaacagttgtggccagcttttgtacagcaataactgttttattgtaactgctgccatccttttgtatcatgaatttttctccgtttgttagtctggtagtaaaatttcttgaaagcttatattgggctttagcctttagagagttagagatgaatttttgtgatgggtttaaattagggcccaatacgaactggccctgaaattgaagccttgaggcccaaacagtctgctggattgccggcctgtttaaggcagggaaagaactcaagcagtgcagtgcaaaatgaaaaaaggagccagaaaatcatctcccagtcaaaaattcaccttctcatgactcatgaactgtgaaatttccgatcgaaacgtgtgaaactttctccaatttagaactccaaaccattaatcctaggtaaccttgttcagctgttcaaaacaaacagcagccatataatcacgtcgagtcgcactgctcgtgtaagtcgcgttatattacgggagggaaatttgggcaaagatattgctgtctcgattgatgtctatcactcacaatctttctctgtcgtactagcacgacggtggagtgacatgctttttcccagttgctgctgcttggtcggtccagtaacgtgcacaccaaaacctcgttaattaggttgttacacccgacagtcaaaattaaatacaggttaatgagtcatcaggtcatgcagtatgtttggtaaaagtctagctttcctgtaattgcacgctcgaaagtggcatgccatgattcaagtgaattcgtcttttttgttaattcagtactactcccaggaatataattgctgccgaatccgttgaatcaggaaatgctaaatatgattaaattgttgtagattactagatttgagaggagtttgtatgttgcatctgaatgcaagataattaccggtggacaaacttcatataggtctaggtcggtctcgtgcaagtgacaaaatcaacgcgttttgtagcgtgtcatgcatatatgataggattaggatgggtctgcttgctcgtcctgacgaaagaaatgaaagagatacatatccaatggctactggctagtattatctctttttcaaaatgcatgacgatactattcatttttcacgcaacgtttgattattatcttttcaaaaatttagttaaagatataaaaatataagttaagattatattttatttgataataaaacaaggcacaacaaaataaataatattgatatattttttaataagacgaatggttaaatgttatagaacaacgttataaatttaaaaatggagggagtatatattttcagtctaagagttaacctcttttgtttcctctgcttgtacccaaaaggaagtttggcatgaactggtgatcattggttgctaaagaagctgtagctttgttccaagctattagtatacaaaagtagcgtccttttctcctcctgttttgttggttaccaccaacagtatattccatgcacctttgttcatgctaacccctcgatcgatccgacgtggttgatttggtaggtctcataaaagaattaacgctagcttttgatttgtctacatgtatgtgtcgctgttaatctcagtattagcaagatcaatggcaagtctacacgcggagatggagcgaatgacaccgacgtcggcgaagaattaacgctgcatgccttgatttcttcgcctgcgtgtgacagggacatgaacacgatgtgcatatccttttctgaacttttacgctgagaaatactgtagtaaacaagacctgattcgatcggagatatttaaccatttgtcacatttaaatgtggcaattaacattttatcaatagaaccacatatcatagatatatgtggatccacatgtcattgtgatagaggtgataaatagttatttgctaaatttaaaagtgacagatagttaaaagcccgatcggatcgatcgatggaaacgacctactgcatcgtcgccgtgagctttttgctgcgacatgtttggggaaaaacttgtcccatcgatcaacacaagacgacgcgtttgtggtttggttttttgtatggttcggtggaatctcgtaacacggattgttccggtaatattccactgctaattacagtacagccgaatacacgcttttgagtgtttctgaaaggccaccgtgatgctaacagaacattatcttcagtgtttgcctattttctttagataatgaaataaatttcggcttttcttgtaacggagctataatcacttattacacaattcgtccgagagcatatataatctagtaactcacgatgtaaagactaatactcccttcttccctaaatgtttgacgccgttgacttttttaaacatgtttgaccgttcgttttattcaaaaacttttgtgaatattattcaaaaacttagagtagtagtatatttaacaatgaattaaatgataaaaaagaattaataattgcttaaattttttgaataagacgaacggtcaaatatatttaaaaaagtcaacagtgtcaaatatttagggacggagggagtactttatcatttaatgagactagcatttattcggtgtttgcttatggatcggcgataattttgttaagtttgcacactatcgcactatgatttggttcgatcttcttttaccgccgctatttttaggcttgttgggagtgtagtggagctccgccaccacttttcctctttagaggtgtagcgttttttaagtaatagtttctttaccttagcagtcttttttttctccttttttttctcctaggcaattatgttttcttctaatatattgacgtgtagttttatttacgtgtgcacaaaagaaatgagaatgttctacatgcatcaggccgactttagttccaaactttttctttaaacttccaacttttccatcacatcgaaacttttctacacacaaacttccaacttttccatcacatcgtttcaattttagtgtgaactaaacacatcctcaatcatttactgtcttcaagtaggcatagtaataagcctccaatggtccaatattccaagctagctaggcacatcggccgtatcgcggtcggagaatttgcgagccagcgaagagaactttttcttcgtgcgatgcgatgaactgctgctgcgtcgtacgttccgggccggacaagtacgcctcaagcggatgaccaaactggttaattagtctttggactctagatccgtccgctcaatttcatttcgccgtacaagtcaccgcaccttccatgtgcaaagtttgatttgaattacgaaaagtcgggagaaaacagaccgtggtacgttgaatgccgaatgaaaaaaaaaacctatactttaatggttgatatgatatgaagtttttcttgatctgtttgacaatcaagaagcatgcctattttcaccgttgaaagaaaaaataattccttttacctttgcgtaaggtgaggctttagtcatctggactttgtttgttcggtctgtgtggaggccaggtttttaattattttttaaaaaaaatactcccttcattaataaaaataactcctttgtggaagctcattgaaactatatcaagacaaacatttctaaatgctactttactcacattaaccatccatcatttttcttatctcatcttaccttccactctaaccctctctaaatgaggtgcatgatagtcttctagtttgatctttatttttgcagaaacccatgaaagtgcttatatttttaacgaaggggagtaggaaggaagtctacctgttgcatatgtggacaccttgtttaccgtttcatgaaatttcattacctttaaatatgtaaattttatttataaagggtgatattttataatttttatttatttgattctctttctttgcttggccctactcccttcgtcccaaaaagactcaattcctgggtt

SEQ ID NO: 17683 - DNA, 20233 bp, Oryza sativa
  unsure (1)..(20233): unsure at all n locations
aaaaagcccaaacgtctaatgaaccttaaatctagaaattctcctaacaacatataatttgtggataatacttctatacctgtgttattcatgattaaaaagacattgctaacaaataaactaggatgaaaaaattctaaaagtaatttaaaaattaagctttaaaattaaaatttttacagcggcttgtgagctgaaagacagacgataggaagcattccatatgtcgcttttttgctgttaaatgttatcttaagatgaccttagcgttctctgaagtatccagattcctgaattcctcttcttgtttaaattgaccaaaaaagcatgagagtttgaatgcctttttcttgtcctttttgttggatggatgcgcacctttgagatacctacttcactagtttgtttgtttttaatggtgttagccaaatggtcatatttgagacacgaattttcccctgattagttcttgagaaaaagctcaaacgtctaatgaaccttaaatctagaaattctcctaacaacatataatttgtggataatacttctatacctgtgttattcatgattaaaaagacattgctaacaaataaactaggatgaaaaaattctaaaagtaatttaaaaattaagctttaaaattaaaatttttacagcggcttgtgagctgaaagacagacgataggaagcattccatatgtcgcttttttgctgttaagtcattttggatatattttttttggacaatcttttggatttatgaatctaacaaaacaaacaagagggaagatgtgcacaccaatgaaaatgatagatgcccatcaagtctacacgcgtcgtaagactgacatggagattctgagcaagacagcgatcggcatatgagcatggctgcaagttnaactaccccccccccccccccccaacgatgaaaacgactttgtcacatgaataaatccaaaccgcagatatgttcactatatgcatccatatattaatttaagaaagaaattgtttaaaactttggcacgatgcatttatatatgtgatcatttttcagatcttgactagagggatattacaagtctcggtacgcgttttcatgacaggagcaccttggctcttagatcttctgttcgttaagaaaatatggtttgctcaacaatgccattaacacagacaaaatccaaagtttcagttttgtcacattggtatagcatactaattgctcccttcatcactccacaaaatttcaaatctaaactcgatttacaaatttagaaacctaaatgatttccaacctaaacatagctcacattcgttggctatggttaataacgtagaaaataaacgagacaactaacaaaattttatggtaggatttttatatttttcactattgaaaagccaaatctgtaaaaaagataacgacgaaaaaacaactagaatcatttaaaatttataattttagctgtggatcataaaccagcaagcaaacaaatgatggtttcatcatcaaattgatcaagtgcagggcagcacaactgatgaactgatggccaaccacaccgcgggctacaaagtggggatctctaatttcacagcgttagtacgtgactacgtgctaactatcttgagatttggagcatttggcccaagtcaaggtcttttcctacgtgtaacgcgtactcccatgccaatcagccgccgatgcgccatggcaagtaaccgcgtggcccaccatgcaggttactacttgtactgatttcatttttattctggtctttctcgaggacttgtattttatactaccagcaaactactaaaatcattgttgtttagttaaatccatcttgagagagagagagagagagagaggtccatctctgcgattgtcatggctacaggtctagtcatgcttccaagttccaactgtagcgtagactggagtgttattttttttaattagatgatgaagtgttgtttggggttgtacttgcaatgggctagttgcattaacaaaagacatttcaaagatcaaagagtgatcgagatactaaaatggcggttaaaacgcgtctttcatgcgccacttgcatcaccagaatatgaggaagatgcctaccacgacatgcttgttctagatttcagaaatttaaaccaaatctcagtatttgatcactatccctctttagcacaagttgacacaaccacacagcaatgatgatggattatggaatattcagattgtagagttagtactccaaatgagtactaacatgcttcactagatcatgttattgcttaaaacatgctttatttttaatggtcatttgtgattcaacggttcaggcatatcataccaccggtagtagttgcatgtagatggagcagacttttgtgaggctgtcagttactccatctttgtctgttgacaagaccatcagttagtttagttaaatcggtagcagatccagaatatgccataatgaaccttaattgaaaacacttgttaatttaccaggaaatgggtcctgcttcaggagcagcattttttgtcaactgctctagccgaaattccacctccaaattcaaaagttttcttgcttggacaccttcttgacaatttaccagttttggtgtttgtgtgcttggactcatgtttgttattgtccattttaaatgtcgactacatcagcccctgtaatcgccaaattttcaactctgtttagagagacagacagtttgcttctctgtatcacagaaataaggttcatgtatatgcagatgtacaaatgtaggagtacaatgcaagtagcgaacagtttacacaaagagaaacatttgtttaccaatcattacgatggtttcttatcatattcaacacccaaatcccatcgttcttgtattctccactagtcttgggtcatccattcttcagacagttttgtcagaaaagcaacaaagctaagaacaaatactaatgcaatccagagacaaatttaattttcctagaatcatcaataaaagtacattaggaatcctgttctttctgtactgtctacatgacggcggacggccgcctgtcacataatctttcggcgccggagaggagcgagacgacgacgcgacgacgggagagcgacgttgacctctgcgagcccatgacatggcaccattacatcactctctctctctcgctcgctcgctactccagactgaagcaacctccttcgtctcgccttcccggaatcttcctcccaacttccatcctctcactgttcgaaccgccattgcggctgcagtataaatcgagccgtccgcacactgcaactcctcctacgcaaaccaccccaacctgcacaacctctcctcaccgaaccaaaatctcacagcttcgcttctctctcgcctcccgaagaaaatagctagagaaaaaattcgcggatcaagaaggaaaaagaaaaggaacacttgagcttgtttggactgacaacaatggcggcgaagcggcttcacgacggctacggacaggaggaccagcccgacgacaagcgtgtgcgccgcatgccgtccttctcgacgtgagctagctttcttctccttcgctattgctctgcttgtgatcgttcaaggggagattggttctaattaacatgtgtttgcttttcgattccagggtgatccgtgaggccttgatggtgaagcagatgcagactctgttcgtcgcactggagccacttctccgtagagtggtaagcaggcaggagatgatcgatttgcagttgcacagagcttgttccaactgttcttggattgcagtgtgctaattgctctgtttctttgttacttgcaggtgcaggaggagctccaggcaggtctcgtgcgcagcccgcgttacatcgagaggtgagaattcacaacgaaatccgcaagaacagcgtcgaacagcagcaagaaatccgaatgatgtataacattgtttgatctgtattgtcaggatgtcgcctgagacgccgccggctcagccgccgatgtggaagctggcgttccggttcaagccgcagctcccgatcttcaccgggagcaagatcgaggacgtgaacggcaacccactggagatcatcctcgtcgacgtcgacaccggcgcgccggcgacgatctcgcagcctctgcgcgtcgaggtcgtcccggtcctgggcgacttcccgccggacgaccgcgagcactggacggcggaggagttccagcagaggggcatcgtgaaggagcgctccggcaagcgcccgctcctcaccggcgacgtcagcctcaccatgcgcgacggctgcgtcgtcgtgaacgagctccagttcacggacaactcctcctgggttcgctgccgcaggttccgcatcggcgtccgcgtcgtgccgggcagctacgacggcccaagaataggcgaggccatgaccgagcccttcgtcgtcagagaccaccgcggcgaacgtacgtttcgtcagagaccatcacgagttcaccacactacatctctctcctcttctctgaattgtttccctgacgatttggcgtgtgatttgcagtgtacaggaagcactaccctcccgttcttggcgacgatgtctggaggcttgagaagattggcaaggagggtgccttccacaggaagctgacgcagcacaacgtcaggaacgtgcaggagttcttgcggctgctcacggttaagccggacgagctgcgcgctgtaagcttccaccgcatttgatctcgcaaatcacaatgcttctccaacgcatgggtggattctgaacattgctctgttctttgtgttcagatcatgggcgacggcatgaccgatcgcatgtgggaggtgacgacgagccacgccaagaagtgcgtccccggcgacaaggtgtacatgtacagcacgcagcacggcaccgtctacgtcaactccatcttcgagctcgtgaaggtcgagctcgccggcgtggagtaccagctgcaccagctgaacaggggtcagaaggcgttcgtgcatcagctgctgctggcggcgtacgagcagcgaaacaacctccaagaggccgacgccatggcgctccactgcaacgacgttcctctgctgcagagtaagtatcggttactacagatttgctcaacatcgagcgttagtttcgcagtgttctcatctgttcttgtgcttgaacaatctgcagatgcagcggagataactatcccggcgcttggagacacgcagctgtggattcagaacagtctcaacagccaagaaatcgacttccaggtcgacgagatcccccaagctaactttgcgcttcagtggactggccaaatgtacaacatttcaggctaagaacagtcactgatgaacagtaactaaggctggggactttaaaaggtttcagaaatagggtgtacattgtcttttcaagttcgcgtctgtataactgtgttcaagtgacacgaaggttaagggtaggtgaacaacagcttgagcggccctcactgtctcgcagagaatgtggccaatttggccagcatcggcgagagcaagaagaggcgagcaagttaattctttggtttaattggtatcctttgttgcagtttttcttcttcgtgtttagtcaagtagtagtgttcttctcccaaaggttgcattgttaatgttggggtgtcgcaacatggagaaggagaacatgtatgatgataatgcagaacctgtaagagcaaaccggtcgttctgcgatgttaacattttgctgaagtttttgtgtctgtaacatcaagtcccagtaaataaataactcattttttttttgtacacagagtccactttgtcttcagatttctttagcagtggtgcctgaagcctgaaactgaaacacaagcttgacttgcattgcatatctgaatctctttatttccccgtttctgaacttagcttggcatgcacatgcatagtttcagtgggtgatatacggggaaaaatgaacgaaacgtctaaaaccaaaattaatgtatgaataaaaaaatataccagtattattaacggttcaaaatctaatactgtaaaatagacttacgatgaaagaaaccacaactccaactagtttcaaaatttaaactgtaactctaaaattaagtttcaaaattaaaatattgattacaattgacaggtctttgtttttttttaaaaaaaagtttacaattggcaggtgaaaggtaactgtggggccatcctctattcctgacccgcccaaagccccacaaacaacaaacaatttggagcaagaaagactgggtgccaggcgagtaggcgacgtggcctgagaagtcaagtcaagagatagagagagagagagatagtttgcgcgttaaacatcagacgtgggcgcaaaactgtactgcgacaagcaaccctaggaaatgaaagcagagggcagagcaaactccgggatctcttcccaactccgggattcaacaaaagcaaaccgcgttgcactctttttttcttcttcttttgtttttttggcgattgactatacactagaggacgaggaggagcataagtaagtcaattgttgttatctaaaacacatattgttccaattatcttcacaatgtatcgtagccgatttttgaccgtcggatatttggatctatatccggctcctccttatcctacaattaattaggtattagcaaaaagttttttaaaaatgattaatatgctttttataacaacttttctatagatttttttttaaaaaaatgtagaagtacacgtatgaaaccgttcaaaaaaaagtacacgtatggaaaacaatagagtagacgctgggaaactgtaccatagaatacacccgaatcctcgatcttcagttcatcagatcacccacggccaataatccggcaatttcctacttttctgggctttatctaaacctgattgtcatccctcgaaaacgtaattgtgcaaaaaaaaaatattatctttgatgtcgatcaaatggtgaaaaatatcgattgggattacgctaaaagcgataagtatgcattatttatctttagcaattttgttatgcttaataggccggctctatcaggtcagttcagattgaagggacgtgcaggcccagagaaaagtatccaacctcaaggcccgaacttccgatatctccactgcactgggccgctcaaagcccagttcaatttagcacatgaaaacccacaaaagtaacaacagaacgggccgaaatcggtatgctcatgcatgatcatatacacacgagacatggtactttaaattggtcgtttatttactgcaaatctgtaggtagcaaatacaaatccaataccctcttttacggtttaaattaccacacacggacacgccaaggccctataatcacaacataaaacaacatcacatctcttctgatcgatctaaaaaataatcccaatcccaatataatccgtatatatgcaatgcacttaaccgttctatgtactacacgtatgaacgtatgaatcccccccgatgatggagttggctggctagagatccatgtcgagcacgagtgggccatctcccttgccgacgtcgaactgctggtacttcatctcgccggcgccggtggtgagctgcacgacgtacttgccgtggaaccccctgaacttgaagtggccgctgccgtcgacctgcccccgcgcgtgcgacgtccactcctgccggagacccacgtagcggtggccggcctcgttgagcttcccgtcggcgtcgacgaggtgcgcgtgggagcgccacatgttgccctgcatgaacccccacagcatgatcccctccaccgccgggtgcgcgaacgcctcccggagcacgatctccaggtcgtcggcgcgcaccgcctcgtccgccgccgacacgtccagctccgtgatccacacggggagacccgtgacggcgagcctgtccagcgcgtcgcagatcacgtcgcccaccgggtgcgtcacgtggccctgcacgccgatgccgcccaccgccgcgccgcgcttctgcaggtcggtgaccagctccacgtaccgctccggcgtcgcgttcgggtcgttggcgctctccacgttgtagtcgttgacgaacagcgccggcgacgggtccatctgcgccgtctcccggaacatgcgcgcgttgatgtcgtcgcccagcctctgctggaagaaggcgccgtggagcatctcgttgttcacctcgtagtgcgggaacctgccgccgtaccgcgtcacgaggctgcggaggcggccctccacggcggcgcggagctgatcgccgttgagcgcgcggacccacggctgcacgacgttctcgacggcccagaagatgcagtggccgcgcacgggcttgccgtggcggtcgcagaaggcgatgagctcgtcggcgtcggagtagctgacctgcccctgcaccgcctcggtgtagtaccacttgagctcgttctcgagcaccgcccagtcgaagtgcttggtgaagaagtccacgaacgccgggttctggatcgccgtcttgttgatgcacgcgccgatggggaagctgttctccacctgcaccacgcggatcgccgtgccgcccgttcgccgccccagcttgagcaccacatcacgcttgcgcacctatgtagtagtttttgcagaaatttcgagtgttatgatattttgttactatattgggagaaagaaattcgtgtatgattgggtggatctttgattagatggggtgaaaatttttgtgcttgagtgagtgtgaagcaaatgaagcaaagtgtaatgttttcctttcattttacaatgttcctatgcaaattttatggtcatttgctcaacgcaatgatcatgtacgtgaattgtcatgtgggccattgcttttgcatgcgcttgagtgcaacgtactactcactttttgttgaggcagttcatagctcgtcatgttgcttatgtcattcatgtgatcacgttgcgtagtgctagatttttttttatgtaaaaagtgctatagattatagttatgtttttcataccttgtcagttttcttcctgaggtgcctgagcctcgcgatcttgttcacggcgaatacctgcaggtccatcaccttgagatccaccccggccggcggtccatggacgaacaccttggcgcagcgcggcggctcgtcgtcgtccacccggaaagagcccatgatctcgccccatttccccgcttccgccacgaccacgccgccgccgaccgggcgaccgtcgtccgtgcaaacctcgacgcgcacggcgtggcagcacccgtccgccgcccccgcgccctgcaggccgacccacccggccacgcggtacgtgactttggccgccggcgcgcgcgagagctcccggcagaggccgtccctctcgccggcacggtgcgccgccagcacgtaccgcccgctgggcctcggcctgggctcgtcggcgtcgtcttccgtagcggacagaggatgcggcggtggcgtctccggcgccgggtcgtcgtgcacggacagtgtgcaggagccagacggggtccagccggccactgccaggccgccgccatcctcgcagtgctcgacatggttcatgaccaagtgcgttgtctcctgcgggcgccaacaacacatggtgtacactagtgtcagagaaagacacatgtcgcggaacaccattcagagattgctggcgcgaaatgggtgtggttgaagaagaaatcctatagcagttcgatatgggtgacgcactggctagcttattgtcacttgtcaggatcagacagctaatttatgtgagacatctgtaacgagctactccagctcgtgtagttttgcttggctttaaagcagagaattggaatgcacctacaagggcataactactctgaattctcaagagaattggaatgcacctacaatgcacctacttttgtgccatgaattcacaagaccattgaagttgcaataaagttttaattttcaggttgccagagtcccagagaagaactaaacaacaagcaggtttgccagtgagctctcagctctggcagtaatattgcaaactttgccaccaaccactgtaagaattggtgtgttacaatctagtagagagcagtcagacatggtaattaagctctaattaagctgagtagctgacagttgagaacttgcaaagctgagagcatcacatacctcggtgaacgccatatggaccgaaggagtgcgaggggaaaactctgaatctgcagcaagtctcagctagcgtttgtgcttttggctgctgggttccggtggcaagtgagaccgactgtgtgagagatgagacgcacgcaggcgggcaatttataaggctgcgtagctgccggtttggtcggcaatcacacatccatcgcgacacagcggaaaggcagagtcactagccaaaaaccggtgtttcatacagcagagactactaaaaccaagcttagctacctaactcatatctttctcctatcttttgtacaaaactgaagattgggcaatgcagattagtcgtcacactggaccgtacaagtcgctgacgagtggggcccgattgtctcggatgattagtcgagaagataccgtaggtaattcggtcactctgataaattagcttcttattaatctgtcatggtaatgatcactagcaacatccaagcgtctccggatcctgacacttttcttggctttgggaggagtaaaagtggatcaatccttcggtcgttggtgggacaattgcattttattatattttgcatggatcgttaacctaaagctaaaaatgaaagcctgtccatggaagaaaaaaaaaacagagatgtcctcctgatgggcatgtactttcaacagacaatcttctcgtctctgctagtacgactcgtactagacaaacgtcgatgtgaactgcaaaagatttctactagcttttttgtgaaaaaaaatgtgaactgcatgtttcaccattggagtagtgctacttgcagccgtcccaactggatctgtctagcttttcggtgaacgaagttacaagccatagccatggcgtcaagctacgagaatcggccgacgcaagatcgtgacacgtctagaagagcagatcagaatacagcatatgcatatggttgcatctcgtgttccagacttgcacacttgagcttgcatagcctcatgtctgaagtctgaacatcgaacgaatggaacgaattcaacggatgaatcttgacggcacaaacaagccgccgaccggagcaaacattgtgaatcgtgatgcatttttacatgcaaatccttgcttagaaagcatcgaagcacgtccacgaattgatcacaaaaaattatagaagttaatgcgtaatgaacttgcatatgcatggagatcgcacgatctgtatatctagctttaataaatattttccttgcaacatccaacacatatcttcatatctcaaaagacacttaaacagtacctactattgcattggataatctagaagaccaatagatctagagggatgaactaatctagcaaaatacagcgtgtgacgaaaatacggtgatagtaatgaatgctataatacttttttgcaagaacaccagtaggagtatttgtttggcaacaaattttactccatttaatcgtcgcaaaaaaaaaggttttgttaaatttcgttgagggccttaatatatgttgggccaatgcaatttgggccttttaagccttcgatccagaaggcggtggacgctggtcatgttttcatttggaagtgcctctgttcaacggtcaaccgccataacaatttgtggtttgaattattttcgaagagtttttataccttttttaagagatgccatgttttttttactccttttaggaagtactgtcaacctctcatctccaatcattgacagcggtggaaacaacccccggacatgttggggcttccagagacctagataaattgggtggccactcacgctctattgttgtcacttttactattgagtgctatctatttaagtgaaatattggtcgatcatcgtgaaacgctattaatcgtttagacttgccgttgggaattaactgaacaagctctaaatgaaccgtgttttaacttttaagctctataaaacaacaattgagaccatgtttagtacaactccttgtcgcctcctctaacctctaaactttactatacgcctgcgcggactatctttttatcggttcaacacacctaaaaggaatataaatggctggaaattgagggggaaaaacattttctgaacctaaccaaatgtggtagtacaaaacatcgcatattcgttatattatatttaaaaaaagaaaatcatgttctataaaacgaggattagcccgtttttaccttatttcttgattaactttaaccagtacaataccttacttttctcatacaatacccaaatgttgaaaatgtaaaattgtagttgttgtatgtgaggtacaagttgctttgccctctgtccgaagtggccgtgcaatctgttctctgctctcacacagccaagagtggaaggaggactcattcaccagtagacaattaggatgcccaatggtggagaagcatccaccacagcttcctggattaggggcaggcgaccacgatatgatcaattctctcctcatattgctcgtagagaacacagagatccggatgcggtaagcctctggggcacagtctgtcagccgtccaacaacgctttagggcaactagccaggggaagtaatgacatcaagggggtgcaagagacctccagataggctcttgactgaaaggggattcgaccgaagaagaaagcattgtaggccgagctggaagagtagtggccagaactctcccacttccagataaagcgatcaagtcgatcctcgagctggatcgattgcaactatttaaacttttaaggtctattaaacaacgattgagaccctgtttagcacagctccttgtcaccttagaaatataaatagctggaaactgaaaggaaaaaaaacattttctgaacctaatgaaatgtggtagtacaaaacatcgtatatattgcacagataatcccgttatattatatatatatatatttttaaaaagataatcatgtactataaaacgaggaatagcccgtttttactttatttcttaattaactttaaccagtacaataccttacttttctcatacaatagttgaaaatgtaaaattgtagttgttgtatgtgatcgaggtaaaagttgctttgccctctgttcgatcaaataatcatcagtataaactgtatggagtataaaataatggaagtaatcgtcagacgtccatatccagcacaagaggggtgtcccccttctccacggtgaacgtcttgtgcatcttccccgtcgccgtcgcgagctgcacgacgtacgtgccgtggaagcccctgaacttgaagtggccgtcgccgtcgatgtggccgcgcgcgtgcgacgtccactcccgccggagatctatgaacctctcgccggcgtcgttgacggtgccgtcggagttgacgaggcaggcgtcctggcgccacatgtggccctgcatgaaaccccagaacatgacgccctcgacggccgggtgcgcgtacgcctcccggagcaccacctcgaggtcgtcggcgcggaggtcgacgtcagactcgcagacgtcgagctcggtgagccagacggggaggtcggtggtggcgagcttgtcgagcgcgtcgcagatgacctccccgacggggttggtgacgtggccctggaggccgatgccgccgacggccgcgcccttctgctgcagcgcggtgatctgctcgatgtacttctccggcgtggcgttggggtcgttgccgccctcgacgttgtagtcgttgacgaagagcgtggcgcccgggtcgaggcgcgccgtctcccggaacatgaaggcgttgatgtcgtcgccgaggcggtcctggtagaagctgccgtggagcatctcgttgttgacgtcgtagtgcgggaacctgccggcgtagcgggtgaggaggccggtgaggcggccctgcacggcggccgtcagctggtcgtggtcgagccccttgatccactgctgcaccacgttgtcgacggcccagaagatgcagtgcccgcgcaccggcttgccgtagcggtcgcagaagtcgagcagcgcgtcggcgtcggcgtagttgagctgcccctgctgcgcctccgtccagtaccacttgagctcgttctcgaacaccgcccagtcgaagtgcttcgtgaagaagtccacgaacgccgggttctggatcaccccgccattgatgcacgccccgaacgggaagctgctgtccatctgcatcacgcgtacggacgcccccgatatgctccccgccccaccgaacttgagaacgacgtcccgcttccgcacctgcaattaactcaccatcatctcaattaattcacgtacgacgcattgcatggactaattaatcttgcgttaatttggcatacgtggccgcgagagtgacttctcgttacgtgtcaatgatgctcatcgatgtcactatctaaacaacgaattatccattgtagccgtttatctactcacttgaaaattcgatcatttcgtactgtacgtggcacatcatgtgtcatgtgccacgtcgaaagtatgttggtcccgcctaatcatatatggtatagtaggtgctgatgcaatggtgaatggtgattgctcttgaaacgtaaaaatggagatgaaaccaatcgcctagctactgatcgttctcaccaataataaactgttttaaatttggtgcccatcgggtgatgtgagtgctcaccttgtcagtcttcttcctgagtttcctgaaccgtgccctgcgatccgtggcgaagatttggagatccatcaccttcacgtcgacgccgtcgggcgcgccctggacgaacaccgtcgcgccgcacgggctcgccttgagccggaacgcgcccttgatctccgtccacctgccggcctgggcgcacaccgcgccgccctcgacgacgcactcgtcgtcgtcgtcgaggcggaggttgacgcgcaccgggtggctcccctcggcgccgtcgccgaggctgatccacccggccacgcggtacgtgacgcggggcttgagcgcgccggccaccgcccggcgcagcccgtcctcctcgccggcgcggcccgccgcgaggatgtaccggccgctgggcttgtagtcgtcggccaccgtgttgatggtctcggtcggcaccttctccggctcctcattgtgcacggacagcgccgtgcactcgccgaccgccgcccagccggcgagcccgtcctccagcgtgctgttctcgagcaggttcacgtcgaaaaccaccccctgcaaacaaaaagctcaaccataatcgatcaccgtaaataatgctgcttttgaaaaggagtgagtacatagctggcaaagtgatcaatcaaccaattttgttgattgtgccgtaccttggtgcaggccatgatcgtggcagcaggagcaggtgatcgccggagtctggaacgacttgttcgccgtggattggtgatttgcggtggcgagtcacggcgatcggacgagaccgtatataaaggtccgatcggtcggccgtcaaaatcattgcgacatagttctaaagcgtaccgaccgccaaaaatattgtgcaaactcgaagcaaccaccaccacagcgagagacgacgacctctgcttctccttctctctctggctttgctgcgtttgagtaacagtaaagcttgggcaagcaaggctgcaattgcatgcgtggccgtctcgttgggtccagggagctgtgtgactggcaaagtgggacccacatgagacgtgccccacatgtcagaggggggtgctttgagataaggtgttctttttagtaagcatcattaccggcacatccaagcatgtgtcaaggccgggtccgtgcttttcttggctttgggaagagacaactaaaagcgatttgtttagtcgccggtaacgccaaacgtggaatcattagggcacaaaccaatcggagattagattcgacatggactttttctgtccacgataatctctcgtttttttagcactgttcgttaggaggactgaactcgtcatgtactgctaatctcatcatgctactgtgtttgctaattaatttaccggtaattaagcagagggcgcctagagctagccggaattgagaacttgggataagaggagaggagagtgcgacggcggcgtatccaagttgcaggcaggcagccgccccacgacatgactacgacgacgacgacgacgataatggaggatcaattaggcgtagggagtggaagtacgaagcttcaagacacaaacatcggctactaaaacgtgaggtttggtgacggatcgtgtggctgtcaatccaatgaaggaactttgtacttcatagccgcaggtccatatgaacatggatccttctcgaatctttgtttgaatcgatcgcatgatactctctttgctacgaaaatacgcaatggaaatgtacatgtttacaacattgaaaaagtccactttgactcccttaattatcggcagaatctaattcgtaaccctcaaccgcaaaaccggataagatgactccccgaactattgaaaccggtgcaatttgactctctcagcggttttggagggcggttttgctgatgtggcgctgacgtgttgatgttgacctagtctccgtctcacgtggcattcaaattaagaaaatatatgtgggacccatttgtcattcacacaaagaaatatattatgggacccactgacatatggagcccacatgtcatcctctctctctctctttttcaccggtctgcaagagcgagagctggacaagcggcggcgaccgacgggaggcaagcgacactagggatctagggcagcggcagcggcggtcgagggagtggtcggcagcggcggcggcgaggccagatcttcctcctccttctctctccctcatctctttctcccctgtttgtgtggccagcaggagtggtcggtggcggcgggatgacgacgggacggccggcggatgacgcctccgccctgccgtgcagcagccgggcaacctcattgtggcgcaccggcaagaaagccctcgccgcgcacggcgacgacgccgcaggtgcccatcttgaggtacatgatgggcccgtacttgcgcgctagcgacgccaggtcggtgtgcggggccgggccgacgagcgggagcgcgtcgaggacagggacgcccgggggtccggggggaggcggcggccgccgccaggggagggcgggcggtgtcacgccccgaactagtcccgaccggaactagcccatgacgctccaaattaacctgttaatcgataccagtcccaggaaacagtgctggtatcacaggaagacagattatcacagcaacagaggtctctttattatagagtaggagtacaatcaagtcgggctgcggacagatcccgagctcacaactgcattacaaaagggaggcggaagccaagacttggaccaaacaacacaggcgcgacttgggaactaggccgaaaccctaaaactcatcgtagccggcttgctcctggaagaactcctcgtcagcgggatccgcttcatcttcttcagcaactggggggattatttatatagagcaagggtgagtacgggagtactcagcaagccatgggaaataagtgtttaatgcaggcttcaaagaaagggctgttgtttttgcaattgattttatttgaactcttttctgaaaacaactaagtgagtgcttctcaaacgacacggatgagacagtgcgtctcgtccggtcggagtatgtgcaatgtatcagtctttaaaattgatcaagattggcacccggccaacaactttcaaacggccacccgggccaacaactttcaaacggccacccgggcctagctgatcccatcagctgcagattttccaaacaacgatccccttttcacgacagcaatttcacaaggcagtagtcaaacaaaactacgctaggaatcacctcacatccgcccatgaccgtgggcacggctgttcgaacagtttgttgacctctgcagagggggtacactttacccacacgacattactaacccggatcacccagcccgtggggatcagccacgtcgggagacctccaagctttcatgacaaggcatttccaaagccgacacaggtttaccatatgccgatgagaggggtcccagaccaacaacaggttaggtcccagaccatactgtgccaagaagcccagaggtcctccccgacaccaccccggcgaatccacatgtctctcggcatcaaggctcccctgataagctagttactcaaccaggggtgtcccattccacccatgtggtcgtacttgtcttatgttcggatgaaattccaaggaaacggtccttaagtgcaagagcgggaaaccgtacacccgatacgttccccggtccgcggttttggaaattcatttagttcgcaagcactgacccaggtgtcgggttttccaagccttttgtaaaacccaagttttacccaagaagtttttcagattttaagtttgaaggcgaccgtcgatactcgcatagggtgcacgaatatcgaggcgcaactagatggttacaaggggacatgatataacaattaacaaaggaaggatcaaatgcaacaaattaggtaagtccgccaatctgccttgcagacgggacaaacagattaagtgcgatcctatcaatgcataatatttttcaagcaacataattaaattcaaatataggctcaagatgttcaaaggtggcttgccttgctcgagatctggagcttgatcctcgaaatcctcgcactgcgggtcttcggactccaaaactatacgcaaaacgggacaactcaacaaacggcgaaaataaagccctattaatgacctctaagcgtgccattagatagatctcgagatttgaggaattttggaagttgaacggagtcaaacggacttacggttgggaagatattgaatttctaagattattggatttttggtctaaaggaaaaggatttaattaaatcctttttgaaaaagaaaagaaaagaaaagaaaagagggagggaaattagacttccctcgggcggctagggtgcggcccgggagaaaaggggcggctcggccgagcttaatgggccggccggcccaaaaggcggcccagagcgcgcgcgggaggggaggagagagggagccggtggaccgggctcacctcgcgtggtcccgggtgggacccgcttatcagcggctcggctcaccgtgcggagggagtatgcagcgtgcgctagggtttggggaagggacgcggtgcacgcgcgcggttcatggaggacgcggatgcggcgggcccacgcgtagcctcacggctcgcggtggaccgcacccgcgagcggggccggagggagcggctgaccggggtcggctcgacccggtcttggccgagctggcgccgacgtggcgcctacgtggctgccacgcgggccggcgggaggtagacgacgatgccggccagaacggacggcggacgacagcggcgagcggcggagcaaaccacggcgatacaggcgaaagcgagcacaccgggtggttgcacgagacgaggggagacgagccaacggctcggattcgccggagggagcttgatggcggcgaattgcggcggcggcaaccggcggcggaagaagggggaaacagcgacgaggtcacgaggggccgattcccggcggcaaaagcatctacgcggctacgggaatccgatgctagcgttgggttaggaggaaacgcatcgagggaggccggcgacgagaggcgcttccgagctcgggcggcgagcacatggcgagcggcggcaacggtcggggcggcgccggctagctacggggaggctacttgtcacgaccggaaataacccaacgggcgttccttacgtgcgtgcattaatccttgtcccaggaggcaaggtacaccaaaagttaatacaattcagagtttaacaagcg

SEQ ID NO: 17684 - DNA, 4312 bp, Oryza sativa
agggagtacaaaggagttatacaataaagggttagggtttgcagtaaacagcatttaaaggtaattagttgctcaaagctattttgtaaacgcgaatctagaactataccatattgtttatcaaggccgtgaacccacacgaacctgccttaacccaaggcctacgatgattcagaccgaactggcaacccgaccctgggtcccagctcgtcccaagccaacccaggccaaccattccacattttagttgctaagcaggttttaagaattaaaacactaacttgggtacattactcggcttgcccataaccgagggcgcggctattcgaatagattatactctgatcagaggtgtacatctttacccacaagacacatcttcctcacgtgtaaccacgtgccacataccaccacggtatacagacggaagacgtgacatagtttccaacccatcctagccatagacaagagtaccgacccaatcccacctacggccggaacccccgggacaggcaggcaggactgagcccctagcagcaggacaccggccctgtgccatgacatctcgactaccgggccgcagctcgtgtagccttcatttgccctggagaatgtccatcgacccccgacttcatccatctccatccgtgtacttttgtttataaccagactgagccacaaactaagccttacccactagacatgtggaagtacggtagtgctttgcaacagaggcccgaagaccggtccttatatggccgaggtgctactatcaaaaccatgcaccccgagcccagcctaaaaccattttggggattttgaatagagggggcggtgtgaatccaattccacaataatccaacagttccaaaatgtcaaggtgatatgaatattcccaaagtctagagttgtaaaaccacctaatgttacctaattaaattgcgaagcatctacctaaaattaaactagtggtgccatgagtagagtgtccactagttggggttttgtttactctagggtgaacaaggaaataataacaataacaataataataaggtcgtaacaaaggtaaataggcatggctaaacaaaacaatgataacgcgggaatttaaataaagcgataatgcgataatttaaatcaacataattttgcaaactgggattcaatatgttcaaagatgatgtgacttgccttgctcgctttcccaaacgtcggcttcaacttccacgaagagcagatcttccgaagctgcagcgtctacacgaccaacggaaaagaaaaggcttttactctaataaactccatataacaagcagaaacaaagcacaaaaatgggttcttgacttcttaggaaaaaattagagacttgaacggtccaattccgagttcaaatggccaagttatggccatttgaagtttatatgctctttaaatgaatatttgcgaatttcttcatttaaattttaatttaaaatcggatttattgcgtcagccgaggggaggggtgcgcggaccgggtccacgggagtggggcccacgtgtcagcctcacggtccacggtggaccgggtgcacgcggcttgcgccggccggcgccgtgggtcccacgcgtcagccgcacccgagggcgcgggcggctgacggccgggccccacatggcagccgcggggcgcgcccgaagacggcctcgccggcacggccgacgggatgcggcgcgcccgcgcccctatggtcgccggcggcggccataggcacggcggagcggcggccgagagaggggagggaagggggaaacgaaatgggcggtccatggctcaccccgggtcgacggcgacgacgggaacggcaaccgaagcggagagaggcggcggcgcggctcgggtcgacgaggacggcggcgttccggtggtcggcggtcgaaacgaaggggtggacgaggtcggcgaggacgcggcgaagccgaaggaggcgatgccgaagcgggaggaggtccggtgcgacgacggcggcggaccggagctcggcggcgacggcggagagagaggacgacggcgcgagctcgattccgacggggagagagagcggcgagcggcggaaacggtggagataggcacggggagtgtttatatagtgttgggagtgagagagggcgaccggatgaggaggaatcggccgcggaagatccggccgccattgatgcgccggcgaagttcgcgggagggtttccaaacgaatccgagggagagagagagggaaaagtggggggggaaagagagagggaatcacggggagtgatttccccctctttattgcgcgcgggggcggcgggatgcggcgaaatctgcggcggcggcggcgctagggcacgggcgaggcggcgggtgcggcgcgaggtaggggatgacgggtgggccccacccgtcagcgaaaagaaaagaaaagaaaagagggagggaaaatagacttttctcgggcggctagggtgcggcccaggagaattggggcggaccggccgagctaaatgggccggccggcccaaggcggcccaagacggtcgcgcgcgcgggagggaggagagagagccggtggaccgggttcaccgcgcgcggtcccgggtgggacccgcttgtcggtgacacggttcaccgtgcggagcgagcacgcggcgcacgcgcgcgggcgggggagggacgcggtgcatgtgcacggtctgcggaggaacggatgcggcgggcccacgcgcagcctcacggctcgcggtggaacgcgtgcacgggaggggctgaccggggtcggcccgacccgacctcggctgagctggcgccgacgtggcgcctacgtggctgccacgtgggctggcgggaggaagacgaaggcccggccgccaatggacggcgggcggcggcggtttctccggggcgccttgcgacgatgaggggcgacggggcgtacaccgggacgacgaggaagaaggagagggagcgagccaacggcttggattcgccggagggagtctgtcggcggcggatttcggcggcggcaaccggcggagagcaaaggggaaaacggcgacgaggtcacgaggggccaattcccggtggtgagagcatctacgcggccacgggaatccgttgctagcgtcggattgagcggagctacgccgagcgaggccggcgacgagcgggtgctacggagctcgggcggtgacggcggcgagcacactgcgagcggtggcaacggtcggggcggcgccggctagctacggggagactactcgagctactaccgaaaactaagggggggagatggagcgaggaggaagaacggagggaggcatcaccgagatgaggaggggcgctgtgacgagaggccgacggtgcgggagggatctctccggcctcgggccggggaagaggaaggagaggacgcgcccggagtccccttccgcgtcctagtgcgcaccggctcctccggcacacacgcgacggctgcggtcggcgagagggacggcaatggcgcgggcgagaaacagggaagattgggaggggaaaaggggaagggagggcgcctgggtttatagggggcggcaatgtcggtttggaaaccgactttggcggtcaaggcgcgagctggcgctccggctagcggccaaaatggcgacaggagggagggaggatgacgccggcgggaggaaaaggggaaaaaggagggggagaaaggggcttgcccccttgccgatttgggaaaaaggaggaggggagcgggggcgtcgcggcagagggaggagggctctgcttccgtcccttggcggcttgcgcgcggagtggcggggccgaggcgatgacgacggcgatgtcggcggggcggtttggagcggagcggtgacacgggcgacaggcgcgggcaggcgctgacgacggcggcgactaggcggttggccaccacggcacgcgcgcgcggcttgcaacaggaggcgcgacgggtagagtggcgcggctcgggcacgcgcgctggcgcggacggcgcgtcacggacggcaaccacgcgggcgcgcgcgcgcgaacgacgcgcggggagcggcagcgaggcagcggaaaggagggctcggctcggcgcgggcagctcacgcgctcgcgcgcggcagagcgaggggaaagggggggcgctcggcgcgagcggcttacgcgcacgcgcgcggcgcgcgggcggggcggagcggagcggaggggagcggaaggggagagcgagagagagaaagggagagcgagcgcgggagggaagggagagagccgggggagagggggagatgg

SEQ ID NO: 17685 - DNA, 31030 bp, Oryza sativa
ttgagatcttgagaaggcacggacactagacgacaagcaaagaaacaaatttcgcaattagggtttttttttttggagataatttttccgctaggcgccacgacggaacgggcgctacagggaggagcttgggtttataggggcggcaatgtcggtttgggagaggggaaccgacattggacggtcaagccgacgagctggcgctccggctagcggccaaaacggcgacaggaggtgacgccggcgagagggaaaaagggagaaaagggggagagaaagggggcttgtcccttgcctctttgggaaaaggaggaggggagcgggggcgacgcggcagagggaggaggagctctacctccgtcccttggaggctagcgcgtggagtggcgggggccgggcgatgacgacggcgatgacggcggggcggtgtggagcggagcggcgacacgggcgacaggcgcgggcaggcgcggcagaggctgacggcggcagcgaccaggcggtcggccaccacggcgtgcgcgcgcgggaagcaacgggcggcgcgacgatttgagcggcgcggctcgggcacgcgtgctggctcgcggggctgagcggctgcgcggctgcaggcgcggcagggcagcggggccgggtgacgcagacggcgcaggcgcggcacggacggcgactacgcgggcgcgcgcacgcgaacaacagcgcgcaggggtcgagtcggagggctcggctcggcgccgcgcacgcgcgcgcggcgcgcgggcagagcggagagtgagcccgggagggagagagagagagagagccggggagggaggggaagatgggccgagagagattcggcccatccaacctgggggaggcgaaatagacttttgcggagggactttcgggaaggatttggattcgggattgaactcaacaatagatcggggatttaagatctgagatgacacggacactagacaacaagcaaagaaacagatttcgcaaatagggtttttaagagatagttttcccgctaggcgccacgatggaacgggcgctacaggcggtaggagcagagggagaggtggaggaggaggcagaggaaggggccggagagcacgacagggtcggtgcagagcacggcgagctccatggcatctggagcgacgaggcggggcggcaacggcgccgtgggggagggatgggcgaggacgtcgacgactcgcggggagagagaaagagaggcggcgagggggactccgctccgggctgggtgaactctggccgggatggggttggaggaggcgccggccaccgccgctccggcccccgtccgccgccgccgacgatctggcccctgctccggccttcgcccgcccgccctcctgccgccgctagcccccatcccacgctcgtaaacagaaagagagagaaagagagggggaggttgaagaaggtagataagaggggatgacacgtgggccccacatgtcagtgggtcccacaatatatttttgggtgtgaatgacagatgggtcccacatatttttttaattcgaatgccacgtaagcgccacgtaagatgaagactaggtcaacatcgacacgtcagcgccacgtcagcgaaaccgtcctctaaaaccactgagggagtcaaatttcaccggtttcaatagttcggggagtcgtcttatctggttttgcggttgagggttacgaattagattctgtcgataattaagggagtcaaagtggactttttccttacaacatcacgtatatggaaacgatggaattaaaatgtaagcccaacccagcccatctcacacacaaaatggaagggctttatgggcctgctaattaacttgaggaataagtttactacaggtccctccactgtcaaaaccgttgaggatgtaaaatgaacttgtattgacaattaagggatgttgtatacccggttttgttgttgaaggaagtgaaccaaattcatcaacaagttgagggacgtaatatggattttccttcagttgatcgtctgctctattgggctaggtctacgttttaccttgcgttggaaaaagtacaccaaaggtcactcaacttgtcatcgagttacaaaaccgtcctcctatcgcaaaaccagatatcagtcgtctctcaactaattaaaaccggttacaataggtctgacccgattttattctacatggcggctgagtgagcgtggaaccaacgtggaccccacatgtcaggatgccacatcatctctctcttctcttcatcggttcagagaatgccggggaagcggagcacgagcaccacgccggtggccggagctggaggagctcctgcggctgcctctacatgaacttagtacggggtcattgactgcttcatttaccaatttcccccccccccccccccccaaaacaaaagctgcgatgaacattgctacgcaaggacatgccgggaaaaggactcattgacctctagtgaagatggaaaatggtgatgagaaattggagattgacgctgtctagacatgaacttagtacggggctacggcgacagtgggcagccagtacacccgtgcagaggagtaaactgttgcaactcaacttgggtttttttcgacaacaaacatctcgtggattgagagttcatattggtttcttgcacagattaattgcagagcaacaagaagattgggggagaacatggcactataatcgaattaaaatataccaaaagatcaaattaaagaaaagaacagtcaaacccactagatccctgaaaaaaaactgaatctcacctagctgtcagaatcttcagagcccccttgattcttcagctcggcttctcagacacgagataactgaatcgaaccatggaagaaacaggaggaaatacggagaggaagaaagagtcttgagagaggagtggcgacgcggagagaggaaatacggtgagagaggagtggcggccgctgaggcaagccaccgccgtcctcgcccgcctcgggacgtcgccgaagtccaactgcctccacgctgagtgcgcaagcgctgctcttccagcccccaggacaggagcaagcgagcggcggccccgagtcgtcgtcgtgctccgcgtcgccaaccgccgcccgtcgcgccagccctcctctcagccgcgctcctcccctgccggccgccggcacgcccgccgcgccggcactcctcccctgccgagtgctgctcgagaggagaaagagaaagaaaaggaagggaaaggaggggaaagagagaggatgccgacgtggcatcgtgacatgtgggatatacatgggtttcatgacttggccgtcacgttgaataaaattggtgtcaaaaccaccaaagaatctattgtgaccggttttgatcagtcgaatgacgtgggatatctggttttgtggttggaggatgattttgtaactcgataacaagttgagcgaccttcggtgtactttttccccttgcgtttggtctatttttactaggcccaacttgagagaggcccactcagagtgaaggctagtctgggctgggcaaccgagtagacagtccggaataagtccactttccttccctcaactcatgcgcttggttgaatcacatccctcaactacaaaaccggatataacccatccctaaactccgaaaaccgttgcaaatcgactcctcgaacggttttggaggcggttttgtcctacgtgacagttgacttgctgagtcaacaagcgggtctcacatgtcagcagtctgagtgccccttgcaagtgccaatgataaaaaaataaaaaaaggtaggacccaccagtcaacctcctcctccttctcattctccctaccttatctctctctatctctctctctcgcaggcaacggctggcgagcaggcggagccgccggagtagaaggctacccgcgcgcggctgccgctggcgacctcctccctgttcccgcgcacggccgatgaccccctccacccacgcgcggccgtggccggcgacctcgtccccacgcctgcaccgaggcccgtgacagcggcggcggccggcgacctcgtccccgcgagcgtgccgcggccggctacccattcccccgagcgcgtcgttgctggtgagctcctaaccatgcccgcgcgaggcctccatcggcgacctcttccccgcacctatgccgaggccagcgacccctcacccatgcgcggtcgcggccagcgacctcctccccgcgcacgtgccgcagccggctatccctttccccgagcgcgccgctgccgataagctcctaaccatgctggcgatgatctcgtccccacggcggcgcccatcaagcggaggatgccggcggagcgatggcgacgacaggctgcgggcggagcagaggggcgggcggagcggcggcggtggaggtggccagaggaggaggaggtcgccggcgagcacggtagctgtggcaggtgcgacagcggttgacgacgacggtctactccactccgtcggcatgctccgtccaccgccgcttggcctgccccgctcttccctgccgcggtggggttccagactgtggcgaggagcgcggaagcgtggtcggggaggcccatggaggagagggaaaagctgccgccgcccgcggttcctctcctcccaccagctgccggcgaccgcgcgccgcttctgtcccttctgatgcttcccgcggttcctgttccaccggccgccgctcgtgtctcctctcccacccgtctccgccgctcctctcccgtcccggtgaggtcaacgggtgcggcgacatccttcttatctgcccgccctgctctgcccttctacttcctctctcgccgccgccgaagacgacgacggcgacgggttcgacaacgaccgcccgctgccctctcccggcggcaacccgccactgcccagctccgcccctctgctctggccaccgtcgctccgcccgccccgctcagcccctctgctccgctccgcccgtggcctgctgctccgtccctctgctctgctccgcgcttactcagcaccggtgagttcatactgcatagacacttacatgtgggtcccaccgtgctgagtcacgtcgccaaccgagtcaacgacgccacgtcggacgaaaccaccagccaaaccaccgaggggatttgccaaaccaccgagggaggggatttggtctggttttcaaagctgaaggagccgatataccagggacgtgatttaactagggacgagagttgagggaggtaaagtggacttatccctttcagtccaacgcagaacaaacatttcggcccaacgacaagagctcaagaagcatttcggcgaacggaaaatcatattccaaatttaattggcacatccgcacatgaaagcatctcacaacgaggtggtgcatttccctcgtcagccacagcatctgacagataagcagatcacttacctgcatcactgcatgtacattgacaatctgggcaaactgaataaaatgtactggtagtagctacagattacactgcatcttgagatcaatatctaaccagagaggttaatgacagaagttatgctgacaagattgcatactacttactgcagataattgaccaggtacaaaactatgtggttaaaggagtggacgtgaagaaccaaaattcagtagtgatggccagtcaagtagatgtagcagccttttctggccggtgcctgcatgcatatgcaattgacattgctgcctgagatagactgaaggtttcagagggctaatggattttgaggcataacaaattggactctgctttttatggtagccttcttctagatcatggaagctggttgctttgaaaattgtcggatggcggtgatccaacagagatgcagagtaacagaaatctactctgccgtagactgtataatctcccgtgtttgttgaactaactaccatatctcaaatctgaatgtataatctgccagtgtcaactgcgtgcttccatttcaacccgaggtgtaacatgtgcacacaaaagctcttctctgaattccgcaaataaactctgcttaatttgcagatgagttcgtagttgtcactgttaccgctatgaaccccgtgtggatggtgggggaaattgacaggcgtcgtcactcgtcagtgccgtgaagaagaattaaccaaaactcaatctgcatgcaagtgtccatggttgcctatttgttgctcttctagaagtagtggcacttgttgctcttgcttgccagttgccacctcgatcctctagtacaatgttactagcattggtgctttgcttacttttgaatcttttgtggcttcacaatggccgtcaagatcataaaaatagagggccgttttggattgaagccaaaacggtgccttaccaaaattttagtaatttaaatagtaaatatgttagtttggtttgaagccaaacccatacacaatttggccatattctagaatcttcttcaccatactactaaattttggctccatgttggtatcaaaccaaaagtaggctaattaactttaccctaccaccaaaatttacctagattttgtcacactaccaataaatagttagggtaccaataaatagttagggtagagaaccaaataggccaagaatccacaaaccacacaaaggaaatactcaaacacaaaaactgaagtatgacgagatgagctttgtggaagagaagatgaccagcaattctgtcattaaaagttcggccaaatcttagctggtccagatcaaagtagcatacatcagcagatcggtgtacacataatcacatataataatatacacggcgctgctaattacacatggaagcatcagtcatggtctcatggattcagatcgatattactacccttttattacatcatttctaggtcaaaataatgacaaacagaagcgagcacatctagatgacctgacactgttttactccgtcttggccttgtcagcgccgccggttgcagcggcatcacggcacatcatcttcttgaactcctcgaacccgacgcagccatcgccgtcgacgtcgacggaggcgatcatcctctcgcactcctcggcgctgcagccctcgccgatccggccgaggaccttgccgagctcggccgccgtgatgcggccgtcgccgtcgacgtcgtacacgtcgaacgcggcgcgcagctcggcctcgtgctcggcgtccccgcgcccgcggccgtggaacgccgcgaactcgccgaggtcgacgaagccgtcgcggtcggtgtcgagctcgttcatcatggcggccacctcgcggccgccggcggactcgctgggcggcggcgcgatggcgcgcgtcaccgcggccagctccgagggggagatcctgccgtccccgtccgcgtcgaagcgggtgaagaccctctcgatctccgcgtccgccggcgccaacgccgtcggcctctcaacctgctgctgctgcggcatcttcttctcggtggtgttcgacatggttgcaagacttgccgtaagcaaaagcttgagcttaattagctgagtgagcagtgatcagaagtgtggctgtggtgagctagagctcgcaacaatgcagaggggagctattaataggggtaggtgcacggcgcacgcgccattgacgcgcaccgacttttcatctctttggataaagaaatgcatagtcgtacaggagagagtctttttgtggcctttccctgctgcataggccggcgtggcaagcgcgtctgccacgagtcgccctcgtgaacatgacacgttgtcggctgatggaagtggtgcgaatctcgggagaattgatgcaaatttttcgaccttttgcaggcagtttcttcgaagggggtgcacatgtatggagagtacgaatcaccggccacgtcttccgtgtgaccgtgctgaagtatgtatactacggagtagtatagtcgggcaacagtttgctgtagctttcatggcctatcagtccagaagagctgtgtacttggtggatagactacacgtgtccacggagggaagaaaaatgagagatcatagtagtatatagctaactttgccatttcaactcaaaatgaaaagtaaactcattctctttttgaataagtccattttacctccctcatctcttgtccttcgtcgaataacatccctcaaccaaaaaaaccaggtataacgactcactcatctccgaaaaccagtgcaaatcgactcccaagacagtattgagttcagttttagcttaggtgccatctaagtggcattcaaagtaaaaaattaggtgggacccatgtggggctcacctatcacccttcccctcgctctttcatctcctcctctctcacaatctcatgccttcaatcggctcgagcagcggcggcgggtgtgggggaggagctcgccgggaggccacggccggccgggcgcaggggaggaggtcgccgccgggtggacgcgggggaggaggtcgccgggaggtcacggccggcggagcccgggggaggagctcgccgggaggccgcggccggccggatgcgggggaggaggtcgccgggaggccgcggccggccgggagcaggggaggaggtcgccgggtggtcgcggccggccggacgcgggggaggagctcggcgggtgaccgcgactggtcgggagtgcgggacgaggtcgccgagtggccacggccggccgggagcgggggaggaggtcgccgggtggtcgcggccggccggacgcgggggaggagctcgccgggtggccgcggctggtcgggagtgggggaggagctcgccgggaggccatggccggctgagcgccggggaggagctcgccgggtggtcgcggcgggccgagcgcgtgggaggagctcgtcggaggtcgcggcccgccgggcgcgggggaggagctcgccgggtggtcttggccagccggtcgcgaggggaggacctcgacgggtggttgcggccggttgggagcgagggaggacctctccgggagtaggagtagatgagtcgtgtcttcaagccctccgaggcccgcccccgaccgacgttcgtcgccaccggccggccgaatcagcctcttgcatgtgcggttgcgagaaagagattgaaaggaggaagaagataagaaaaggggctgacaagtaggccccaccatttttttattttagcatttgtcacttccatgtgggacccacttctattttggtgatatggccgccacatcagcatatttggaccaagtcaacctgccacatcagcataaaccgcttacaaaaccacccgaggagtcgatttacaccggttttcggagatgagggagtcgttataccttttgtgtggttgagggatgttattagacgaagggcaaaagatgagtgaggtaaaatggacttattccttctctttttatacgaagaagaaattctaaggtactccttcacaaatagtgccagcccagcaaaagtccaatccagctccgtgaattgaatccattatccatctcgtatagattatcagcccattgtgcaatcctaacaggcccatttaattttgaagcctggtccagtccacgccaccaacggacgcgccgtcgatcagctctagagatctcgcgccacacccagcacccgctgcttgccatatgccggtgacctccagaacaagcaggaaacctcatcactcacccactcctcgacccttcacgacgcatccaacccatcctcacttctcaactgattctcgtataaatccacccccctcgaacaccggatcatcggtcgccaaaaatcacacaaacctgcgtgcaaagccatcttgatccagcgagcaaaacaaaacaaacgttggaattaaaccgcgaaaccgagagcaacaaactaaccaagcagtaaccaacagcacaatgtcgctagtgcggagcggcaacgtgttggacccgatgtcggtggacttctgggcggacgccgacccgttcggcgccgtgcgctccctcgcggagcggtgccccgtgctcaccaacgtccgcgtcgactggaaggagacgccgacggcgcacgtcttcacggccgacctccccggcgtccggaaggatcaggccaaggtggaggtggaggacggcggcgtgctcgtcatcagcggcgagcgcgccagggaggaggacgtcgacgggaagaacgacgagcggtggcaccacgtggagcgcagcagcggcaagttccagaggcggttccgcctgccgcgcggcgcgcgggtggaccaggtgagcgcgtccatggacaatggggtgctcacggtcaccgtgcccaaggaggagaccaagaagccgcagctgaaggctatccccatctcgggctgatcatatcaccgtccgtgttcggctgtttgctgcgtgcatttggcatgatcacaaggatatgccaataataaactgtgtttcaagcaagggaaaataatataattgtcatatgtagcccgtacgtacgtgtcgctcgtgtgtatgcatgtgtgtactagtagtacgcactacgtgtgttacagtattgaactgtcttaatttgtcgttgatgatcagttcttcgtcagatatgcgatcatgtacctgtctaccgcggatatgggaataaatctgtattgctagtcgtacaagctagttgatcgattcatttcactagttaaagaaatggaggacatgcgtgtatgggtcaggggagcgtaatggtattgggactagctatccatcacacgacagatttttgagtctaaatcacacagattttagatagttagattaggctcatttaatcacttgattagaagagtctatgcatgtatcaacatatattaattatatatattgcatatattttatttattagatctttacatcgcaaaaaaaatatcaccaactcatctactaaaagttaaagtgtaattacactaactataatgtaattacagtgtaattatagtgtaattacacttacatgtcatatcaactaaatttacaaatgtaattttagttatataggactgtaattttatattttaaaggaaataacaaatacacatttacttacacattattttttactaaaattatagtacacttatatatcgtatcaactgaaattacgaatgtaattttagttatataggattgtattttttttcactaatcagcgaaatgaaaaaccacgtgtttagctaaatcgaatagggaggaggaagcggaataagtgagaaaacggttccggacacggcgcactaatcaaaaaattcgcacggaaacatgggcccacgcggcctcaactcccccttgcgccctaatcagcacaaatcgtggcgtagatcatacggtcgaaaaaacatcaaatacgaaggaaaaaatcacgcgacaaattaatatatagcaaattcataatttaaatatttcaattttagcatcacagcgttggcccgtaatgcatgcatgttaattttcctcacccatcatctgtgggcccatgtgcgaagggtcagctggcccatgaaaacacacagatctcaaagcatatcgaaccgtcaaaaattctagtgatatctcacgagaaatctgtcgacagacgtttagcaaaatcgaatggtattttgtttttctttctcaatttcgcttcggcccacgggccatggcgagagaaggctgatctcatacgaggtggtctccttgtgggaaggccccagagtggcttgcatgaagccttgggtggtcttcggaaaaagtacattgaagatctatctcaacttgtcatcgaattacaaaatcgtcccccaatcgtaaaactagatatatgacatctctcaacttacaaaatcgttcactttagatcttttggtggttttgactccggttttatccggcgtgacggctaagtcagcataggacccacgtaggccccacatgttaggaaagagagagggtgatggcatgccctcctaacatgtggggcccacgtgggttctacgctgagtcagccaccacgttagataaaaccggggtcaaaaccatcgaaggacataaagtgaacgattttgtaagttgagagatgtcatatatctggttttgcggttagggggacgattttgtaactcgatgacaagttgagagaccttcgttgaacttttttcgtaacggaattgtcagtaacgtgctaggtcgaaacctctcctccggtaatagcccaaatatagagaaaacaccaactaattaggttttaaggttagggtgggtttgggaggtgcttaggggaagacagggtttccccgaacttaattagagggatggttggagtgacggtggcccatcgacaggcaatgaaaaggcaacgacgacagcaccacttgaaccatgggcgaggagagccagttggtaggcgggggtcaagtagttgactagttaaaaggagaaggaagatgtcaacatatccgacgacgtatgttgttggagccgagaaaggcaagacggggctaggaatgtcgcggctagggtagggtggaggaggaagggaggggtgtaaggaagcttcggcaatggtagatcaggtgagggatcgggagaaggaaagagggcttgtggcagtggcggcgggagcgggagtgtaagaaagaagtgaatgatatatcgcacaaaacttaactcgatctttgccattcaacattttattcactttttttaagacaattgagaaaaaggtaatgaacataaacaatggtaaataagatttgagccgagtttgaatcagcctttttgtttggcatttcgaactactgaatgatgttttttttttaaaaaaaagttatatgtagaaatttctttttataaatcaaatatttttttcaagtttattatggttagcacttagtaattattaatgtgctattcccttattgtgtggtgcgaaaaagccccgccagtcagccttgtttaatgaagcctcggttctaaaagatactaaatctatgtactttgaatcatcgtcaaatgaaacgtacgaacgagtacttaaaaaggtggtcgaccaattgctaaaagcaagttcacaaacgaaaattatgaccttaacatcaggtacggccgtatccgcgtatatggccacttttaacgtctggtacggccgttttatttcctcgcactgaaccggtccggtgtttcaagtttcaacaccaccctgtcgatctacagtatactgtaagtgtgaagatattaacgactttcgataaaatttatggttaaacaacttttaataaaacttatagactgtgtttagttcacactaaagtttaaaagtttggttgaaattgaaacgatgtgactaagttgtgtgtatgaaaggtttaatgtgatagaaagttgaaagtttggaaaaaagactttagaactaaacatgaccatagttagaccctgtgtagataggactaaaacttttaagttcctatcacatcgaatgtttggacactaattataaatattaaaagtagactattaaaaaaacccatccataatcttgaactaattcacgagacgaatctatcgaacctaattaatccatgattaacctatgtgatgctacagtaaacattctctaattatggattaattaggcttaaaaaattgtctcgcaaattatctttcatttatgtaattagttttgtaagtagtttatatttaatactctaaattagtgtgtaaatacagagactaaagttaattccctgatccaaccaacaccttaaactgtttgttcataactataatccgagtacaatgctgactgtagacacatggaacgaaccaaatttctgaatcatccgtcactgactgctgcgtgccaccttctcactgggtggagccaccatccaccggtttactttcaccatgctagcctgatgccccctagtgccccgccgctccacaagtcaaaccgaaacgccaacgcgtctgttcgccgtactgcgcgccgacgacgttctcccctcggtatgttgatggatcaaagcaccaatgccacgttcgttagttgcggcccagtgtcgacgaagatcgtctatcagccatgcagatggcatctgttgccgcgcgcaattgtcatcgcaaatggctgtcaatcaaatctatcaactgaccactcgtcgtcttttctttttttttctttttttccgttctgaaactttcacattttcgtgcaatgaggtaataagattgatgctttgtccggaccgtgaggcgtcgaggttcaattttctactgatgatttccacgactagtatgccggcgccgaagctagagtgctagacatcattacaccaacctttttttttctctgatctggtactcacttgtggtgcaaaatctgataattttagcattgaagttgacatctaggagaggatattttgtggatttaaaggtaaagagaggctcttggctacttgagtgctaattatcctgtgtcatgttccgctgttcgctacttccagaaggagcagcactattgtcacgataatatatccacttgcccaagagcctaccaagcagcctcgccagattgatatgcttccaattgtctgaagtctgaatcttggccaaacaatctttttcaatcgttttaccgcaactctttccaaccaaagttacagtcaccgtattcaatagagttgttttctccgggcaaagcttctgaattatgtcatgactacatcattaagcgatggcaagtgatgtgacgaatttcttggataaggctccataaacctacatctcatctcttaagtgctaagaaaccaacataaagcgcaatgaaatggattgacatgtggtggtgataattattccttcgcgtggctgccaagtgacttgtatgaactaatccggtttttgctaagcactgcaaagaagtcgaatatggaagtacgtttcctactatcaaacttaaattcaggatgtcacatttgatctgtctggctaatggccaccaagcattcctgagggcaaaccccaaccagaggactgaaagcaaagtcttcacctgcaaaactctagagtgcattaattaaggaagaaattgaggtctcgacgtgctgtcgatcggtacccgtcagtgaggaatggtctattctgcacatattttcatcggagtttttttcgtggcccaaaacgtttccccggcacggggaatctgtgatctttgtaccgacttttgtgtccattacaaactttggtgaatcagggacgtactaaacgtacgtgccatctgatcaaagaatggacaattcggaccgggcacggtggaaaaacatggctgtctgaaacctaccgttttggctgaattattggctctgtctccctgtttctttcttggactctctagggccttctactacggctttgtttagttcaagctaaagtttaaaatttggttgatattgaagacgatgtgaccgaaaagttatatgtgtatgacaggttgatgtgatgaaaaaaaaagcaaagtttggatctaaacacaaactactactcagctgcttcctgagagggccaggaaggttcatgaatgaaaaacacatgctacttgccttacttgcagcttggaccagcgtcgtcttctttcttctacgaagtattctcttctgaaaattgttgtttgattcgcatcatctgagtgtactgagtccctccgattcaccgaacaagtcgcaatttgcacatatcagtcaaaactttgcagctgaacatatattttgcagcggtttagtacgtaaccgcaagagcaagctactgaaacggggagtttgaaaacgataaagcaagcaagtgacgcagatgattacaagacatttactgcttttctgcctaacacaaaattgatgatgcacctaccggtccggtaacaatacttttctgaaatgaaagctccggtaatactactactcaaacaagataagctcagagaccaatagccctagaaatcttctgcaatagtaacaagggagatgtgattgacgacgcaggattcagacgcgcacgtggtgaccggagcttgcacaagacgccggagagaaagtgtgaacgaattcgacatcacccccatcaaaacccttaactgacggagagcgacgccgcaacaccacatccatcacttgcctgcagatttgcatctcatactgtccggggacacgaggggggcacacctatcaaatgtagggtagtactaccttgcagctgagctacagtacagcggagatcgatatatcgcgacgtgtacggccacgtcacgaccgatcgattcatcgagagggctagatgacgcagaaatgtgaacaaaaaacttaattaaacgtcgtcttcgcgagggtccaaaaggcagtatttaggtgccgtacagtgactgcacgactgtgggggcctcgctgtttcgatcgtttcacacgctggagaagaagaaggaatggcgccgatcgccgccgtcgatcggtgggaggaaggtgaagccgtgcccgagctttcgtcgtctctcgttggaaagctactgttttgacccgttcacaccactacgcttccagctataggcagtatgtacggtgccacgcacggctctcgtcctttatataaaccaactacctcgccattgccaccaccagcagcagctcgccatccaagcatcaaagcttctaaactgaagcttaatctatatataaggagagttcattttgattttggtgaggaagaagtagtagaagtgaattagtgatatcgatcagagtgtgaagaagatgtctctggtgaagctgtttgatacgttggcgttcgacgcctggaacccgttcagcatctttgggacgacggtggcggcggacgcgtggctggcgagcgacacgtcggcgttcgccaacacgtacatcgagagccgggagacggcggaggcgtacgtgttccgggcggacctgccggcgggggtgaagaaggaggaggtgcgggtggaggtggacgaggggaacgtgctggtgatcaccggcgagcgcagcgtccggcgggaggagaagggccagcggtcgcaccacatcgagcgcagctgcgccaccttcttcggcaggttccacctccccgacgacgccgtcgtcgacctcgtcagggcgtccatggacggcggcatgctcaccgtcaccgtgcccaaggtggtcactgacaagcagcccgccatcgccgccgccgcacccgtccccgccgtcgtcgcacccgctgtcgaggcgaaggcaatcgaagccagcccgtagtgatgcgatgaacacacacacacacacacagacagtcagtcaatccaacgatccgtatgtatacgttgtcgtcgatgataagttcaaagtgcttgcgagtaaggtgcttgctgtacttttggtttaattacctttggtgtgaaatgctttctcgatgtaagacaagaaagctagtagcaaaatcatactatttgcttgatgcaatacatgttccatcttagttcccttacgtattttgtgtgttcccatatgaacattatcaatcattcttttttttttttctgaacgcgtaaaaaaattacacgtcaacatattaaaagaaaagagtatacagcacaatcaatcacactggtttatatcagggaaaaagagaaaaagcaaaagaagaagcttcagcttcttcttatcaatcaggctgcgtggtgatcgatcagtagtcccaggtccccattcttttcgtcttacacggtattattttttcagaaagttttttaaatgaactttctatactcgaatatttgggaaattttcatgtgccttcgataatattctaagctcagtttgatccacgtcggctgtaaagactaaaggaacgtgcccgtgggccgtggctgaataacagtccatgttaggctgttactacgaccactaatctactgggggtcagcaattcggaacagatacatcacgattcacgagccccccaaaaaaatctgaagctgcaccagacagactgtttgatgaaaagcactagaggtagttgggtcgggtcccgtgaggacttgaggttgatgaatggcctcgcaacaagtagcacgacaattgacaggctaaggtctggaattaatgggtgaggtagcgacgcacagttgcagacagcagaccatttacaccaccaactaggaagagagaagcacggattgccggggtagccagcgttgctcccacgaaatctatctatcgcacgaaacggattccagtggcggcagagacgttttgccgatcgtggggtcaatcaatcaatccgaacaagttgggaacgagttgaaacacacaagatgggaagaggagagagagccatagaggggatcgtgggttgaccgactggatgccggcgtactctccgtggtggcgcaccaactttttgcacgccttgccggctgtgctctggctgcaggcgcacggggagggggactcgtcatctggcacgtcggggaatcatttgggctgaaactttgatgggctgaattttgggccttattctggcgtagtattgggttgggatcgcttcgcttaaggatggttacgttataaccgggctgaagatttttcgaaattgctaatcggcgcagttgcgctagataaataactagcgcgcgtttccgttttggcccatcattagccaggcctaaggcccaaccacacttttgacttttttgtttttcttcctgaaagcaccgacgcatgcatgtgctagtatagataggaattaccgcgaaggggcagttgggcaagtgagacaaatcaatctacagcttaattaacgctataattcttcattattagttctaatttttattaggtgccgtgattaacatgagcactcatatctgaaaactttcaacccattttttaaaactttcaactcgttctatcaaaaaaaaaactttcaactcaaatttgaaaatttcaactctaaattttgaaaatttcaacctaaattttgaaactttcaactcaaattttcgaaaactttcaattaaaaattcaaaactttcatctaaaattttaaaactttcaactcaaattttaaaaactttcaaatcaattatttgaaactttcaacataaatttgaaaactttcaattcaaattttcaaaaactttcaactaaaaattaaaaactttcatccgaattttcaaaactttcaaatccaaaattgaaaactttcaactccaatttttttttaaaaaaatcaattcctattctagaactttcaagtccaaaattcaaaacttttagtttcaaatttcaaaagtttcaactccgaatctaaaatttaaatcttcatgttagctagtactgtatttattagagttaatcatgcgattaactctaatcacattattagtatcagtaggaggggagcacttacatgggttgaacgtagcaaaagggaaacaactcctagtcagctccacgcgctcgcgacttgatcttctggcgcaagcgcgcgctaggagcccccaagattttttgctgggccgatgatttggaaaacaaacaggatgacgtacggagcacacacacgtctaaaaaatttagcattgtcaaactttgggtttattttggcgataaaccaagcataccccataatgaaacggaagtgagggcatattcactttgatgccatttttaaccttatcaaattttggtaaagttgccaaaaaatatagctatatttagtttgctgccaaattttagtaactatataaaaatcctaccaaaattttgataagttatcaaaactaaggttttttggtatcaaagtgaacaggccttaaataaaacatgcacgtctcagcgaagggaacggaagtgaatgacacttgtgcaaatcggccggacactttatttactcattcattcagacgccatgggacaattccaaggaccgaaccaatgttgtgctccggtctaaccagaatacattacattggcggaggccacgacacaactgccacacagacacgagactcgccacacatggacctgacacgaccggactcgagcacagcacgacgtatatagcttctctccttctcagccagagatctcaatggccttcacctcgggcttcttgacctcagccttgggcacggtgacggtgagcacgccgttctccatgctggccttcacctggtccaccttggcgttctccggcagcctgaaccgccgcatgaactgcccgctgctgcgctccacgcggtgccacttgtcgttcttgtcctccttctccttgctgcgctgcccgctgatcaccagcacgttgccctcctccacctccaccttcacctcctccttcttgacgccggggaggtcggccttgaagacgtgcgactccggcgtctccttccagtcgacgcgggcgttggcgaaagcggcggtgtcgcggtcggaggtcgccgggacgagggagcggaagacgccgtcgaaggggtcccagaagtcagcgaaggggtcgaacacgttgctgcgcctcacgagcgacattgttggtttgtcgtggatcgctagctgcttaggtttctttgtatgaagtggattggaggaagtttggaacgagtgtttgtttggagctcgatcaaatgcttcagtcttggctcgatggatggaggttggggaatgaggcaggatatttataggttcacaactaatctgtcctgaaatctctggacttctctggttcttgctcgtttcgctttacagcacactcgatctgcttcgcttccgtcgctccagtactccatcagcctctacaaagcggggctcaccttaatttgctctagagtattcatttttcccccacatatcttgcttctttgatgtaggttactttgattgcgatcaaatcttatcgtgtactccctcagtctcaaaacaaaagcagccatgaatttcagtgttcaactttaatcgtccatcttatttgaatttttttttatgattagtatttatactgttattagattataaaacatgaatagtactttatgcgtgacttttgttttttagttttttaaaaaatattttaaataagacgaacgattaaatttgtacacggaaactcattgttgcatttattctgtgatggaggggatagcgagtatggaatgattgattgagaacgagaaactacgagaaccaattgcccgctagtgtgggccccaggcagatgggcagtactgatcctgaaccgtttggaaatatgtcgtgaaactatggagtccttttggcataccaaattacaccagttttgaagtattacttcactgtacatcgtagagtgagtactagatcattccagtgggtttcgggaatgcttcaattcactgctttcactgggagcagtgagtctcttgcgaaacatatttttaacggcaacttgtgaaagaaaaacacatttgagtttgaattcacaaccacgttattttacaatgcaggtcatgcccatgactgaaaggtaaaaatcactgccaaagcattgcttcgttggtaagttttttttagtgaattacactttttgggtcacgtctattgcactttggatcaccccgatttttttctctacccatgttcatcctataccgcggcaaagacataggtggatgatttcgccagcgtgtcagagttgacatcctccaggtcgtttacatgttaaagaagaggttttgggtggttcaaagtacaacggacgtaaatttagctagtccaaagtgataagactgaactagtgatgatccaatataaaactacaacagtaacaggtggtccaaagtgtaattcactctaaattttatatgtactacctttcttattagggttgtttttggtttggtgccatgaattatattggtagggccaatgtaattgatgcatttttcttccttttcctaacttctattttttttttgaaacacaatacaatgcagacgtctacaacacgtacacactgacccgtatgaacatacacgcgaacaccctactctatgagcaccttcaaaagactggccctacataaagtcaccgtagacatttacgggtatatcgtctaccactgaaagaataattagccataaatgtgagcacccgtatcaaatctagaatttgaactcgagttccatcacaagaaacctaacctaacctgttatgctacgcttatttcacatctcttataaatttacaaaaattggttgctaaatattcatgcattggtcagaagtgataaaggccatattttttttatccaacaatgtttataccgatactaaaatttgaatttgaggttatatcgctgtagttcttttttctaacatcgatatttaagtcatgaagaacatatatgtatataacgatactaaaatttgaatttgaggttttatcattgtagttctgttctaacatcgatatttaagtcatgaagaacatatacatagtttaaccataaattatttaatcgctaatatatcgtttgatgaattataagtaaatgtaaacgggtaaacatttaccgcgtatctactaaacgtttttttaaaaggagggcaaaagctttgcctcgtatattgatagagatggagaaaatacagggcgatagaattatgtacagggctagtctaaaaaagaactaagcccgcaaaaggtgatggttaagtgatatctcccaagattccgaactcttgaagcttataggctcctgctttgacccatgcccgaccttcctcttttatcttggcgaggatggatgccagtggcgatgcagagtttcgaaaaattcttgcatttcgctcacaccatatttcccaggagaccaagatcaccagagtacgcaggggaatgcgggggttgttgagagaatctaccacaaggttccaccattgttctaccgagtcgcaatcgctccatttgatcatttggaggttggtttgagtccacctttgtatttctgtccagacccgctttgtaactctacagtgtgccagcaggtggactgctgactcgtcaattatgcagcacaacgggcaaatcttctggttttgccatcctcttttctcaagtctgtcaactgtccagagcctattttgggtggcgagccaggagaagaatttgcattttggaggggcccacgctttccagatagtttgattgaaggcagacctcgtggcccccaggaattggagcctgtaggcagactttgctgagtattgaccattggctgtcaaatcccagtggatgctatcttggtcttcagtcagggggttcattcttctgatcatagtccataggcggacggactgctgaacgtgatccgcctcagtgatgcggaggatgtcgatgtctctgacccagttgctttcctgcagggcatcatggacatatctgttctttcgttttgaggccacatagatgtctgggtgattttctaaggagtttggttctctagccacttggagtcccaaaagcgagcagttctaccgttgccgattgttatggttgttgcggccgaaaaaagctccctatcttcctgactgcacggaaccgccgttcccacccaaggcttctctggggccgtccattcataccatagccacctaagccgcaaggcggaggcgaagcgctgaaggtccattattcctagtcctcccaggtctttgggcctgcagactcttttccagttgaccttgtatttccccctagaaatgttttcccctcctgcccagagaaatttccttcttattttatcaatgtcctctaaggttccatccggaagcttcagggaggttaagtggtaaatgggctgcgctgtgagaactgttttggttaaacagatccttgcggccgctgacatcattttcccttgccagggggccaggcacgattgacacttgtctagcagcggttggagatggactttcttcagccttcctaccaccagtggtagtccgagatatttcatggggaaatttgttagccctgccaagaagatgctcgtgatggtgctgagatcgatggtgctgcatcggattgggatctactaaacgtttcaaaatgtactaaacgataaggtgtcaaaactgatctcttaaaagttttatggttgaagttgcattctaggtataatatgatgttgttttttgtaacttaaaccttatataaatcgtgagttttattaaatttacttaaaaatatagtgacctgaaacttatcgactcttatcacattccatttcttcggctgaagtttcaaatcagaccaccgcacacctaggagtataactgttgtcaaaagctagtataacacagtatatataacatcggaattcaaaaacgtttgcatgatgtttgcaacctgaaaagctctttatttattcctcaacgagcaagaactaagaaggcgattacacaagtactcacaaaggaatacatgaaaccggccgactcagccactcggactcccaacgggtacgacacaccagcagcagaccatacttgcacgaccaaacaaacacacactgaaatactgaattactgacaccaaacatgacttcttccctcaccgatcacatcttcaggagcttaaccggagatctcaatggccttcacctcaggcttcttgacctcggccttgggcacggtgacagtgagcacgccgttctccagtccggccttcacctggtccaccttggcgttctccggcagcctgaaccgccgcatgaactgcccgctgctgcgctccacgcggtgccacttgtcgttcttgtcctccttctccttgctgcgctggccgctgatcaccagcacgttgccttcctccacctccaccttcacctcctccttcttgacgccggggaggtcggccttgaagacgtgcgactccggcgtctccttccagtcgatgcgggcgttggcgaaggcggcggtgtcgttgtcggaggtggccgggacgacggagcggaacacgctgtcgaaggggtcccagaggtcgagggagaatgggtcgaacacgttgctgcgcctcaccagcgacatggttgctctatctttcgctttctgatgcgaagttgtgggctactgaaatggaacggaagaagcgattgcaaagagggcgatttgggagtttgggacgtatgcaagtcttgtttgttgtgtgttcctcggtgggtttcagcacaagagcggtgcacatatttataggatttgtccgggagctgcgcaatggacgttcttgaggcgtctcgagtcatctacttttgtttcggtgctcctgatttgatctgctcccttctagaaaaggctttgcttcccagtccagactagtctccacactcccaagtgctggtctggatgaaatcaatgattgcctacttagatttgatgtgtactgtattaaactggagtatttagaaagaccagccggatttaatttttgttccagatttgtccagtgttaatcacatatacttaatcaggtagctgcaagacgagatgcttctgcacaacgacgaatgattaatcagcgacccactgcttgccaacctatttttttttaaacacttgccaacctattcattcagcatgataaatacggacgtttaaaggattttgtatcacaccccgttactacaagcctataacacatttgcaaacagcatatttgccaaaaaagaataatttattaataaaacttgtatatacgtgtttttagtgatcttaaagcaaagactgaaaaatgaattttgatcaaaacccccaaaatcaacttcaaatttaaagttgaaattttaaattttgattgataaatataagtataagtaaaaagataagtaaacagatattcaaccgtgaatcgcgtaataagttactccgtagtataaaatttattcctcaaaagaaaggataaaattatggctctggcataaaacaattagagcaagtttaatagtatagcccactactaacttaaaatcatctatagccaatgtaatagtcaattcatacaatagttgcttactgtactattaatacctggtcccacctatcatacatacattacgtattgaagtccgtgctgcagctgactacagatctgtagcccgctgctcttctctatctttttttatctctttaaaatatgtttatagctgacttaagcttgctattatacctgctcttaagggcaaaaccatcttttcaccccataataacgttaggggtgggcaactgggcatacatttggttcggtcttgggtcatgatcaaaatttgaggatactaaaagaaacgcaatcaacaataaatcttgttttaggacatatttcaaaagtgaacaatcacaacaacaaattatatataacaccaagtaaccaatatagtggttttaattttttttttcaagcatgatacttccttcgtctcatacatatataccatcccgtactatttttttttgggacgaaaaaatatttatctgagttttagctaatgttaattcggttaagagactcatgattaaattgaccgtattaaattcagttagtaagaagggttagaaaacgataggcaaataaacgataaatagcaatagatcaatcacataagacataagatttaatgtggaaaatcctctcaaagcaagagagaaaaagccacgggtgccaggcagcaaatatcttcactataacgggttgaggttacaacgccgaacggcggcttacaagaagtatatatgaaggtgaaacactaaagtgataaggatccgtccgaagctagcctttatacatgtggaaatgaatccttgagacgaattccttttttagcataaatgaatccttcaacctaaacacaataaagaaaaatactttcggtgccaaataacctcttgggctaaatcactataccaactaagtttgagcaaaaagcaatagaaaactagctttgtcatcatttccgcttcgttccggctgaagcctccgacgacgggcctccgcttcgctccgttggaagctagactttatacgtgtgcaaatgaatttagatcacaactcaacaagaaagagaccggaaatttcggtctcatttctgttagttcggttggttttaatttattttgtccacccctaactaacgttaaatcgacgaaaacctactaaaacaacaaataaatgataaaaacagttcgaatgagaggcattacagccttacaggagagtgaattttacaagggtaaatgtctagctcggttaactttagaggataaataaataattttcttaaaaaggaaaaaagagcacatactaattaatgaaaatcataaaacaaggagctccaggctccagtaagcgggagactagtctagaaaagagtgggtcctgctggacagagacaagggaaataagctgatctggaaagaaaagagaacatcagagagtggagatcactcgagatgcttcaagaccaagttctgaagaacctataaatacgcccaccttgcatcgcatctccgcattcaaggcagagctagtagtggtcacatcgccaattcacagtcgaatcaagcaaaccatccaaatcacacccaactcttcttcttcccatcctccagagatccaagcagcttagccatgtcgctggtgaggcgcagcaacgtgttcgaccccttctccctcgacctctgggaccccttcgacagcgtgttccgctccgtcgtcccggccacctccgacaacgacaccgccgccttcgccaacgcccgcatcgactggaaggagacgccggagtcgcacgtcttcaaggccgacctccccggcgtcaagaaggaggaggtgaaggtggaggtggaggaaggcaacgtgctggtgatcagcggccagcgcagcaaggagaaggaggacaagaacgacaagtggcaccgcgtggagcgcagcagcgggcagttcatgcggcggttccggctgccggagaacgccaaggtggaccaggtgaaggccggcatggagaacggcgtgctcaccgtcaccgtgcccaaggccgaggtcaagaagcccgaggtgaaggccattgagatctctggctaaaatggtgaaaacgggagtttgtcaaggtcaaggcgtgtcatgcatgttcactctgaactgtttgcggtgtttcactcgggtttgatggtttttactagtcctatgaactgtgtattcttttgtactctgttgtgagcgcgtttgcacgaagcaataaataaaaataaaatcagcttgtttgtatattgatcatgcatgtgtgctcatgtcgatcgccgcagccacgcaatgcgtgtgcacagctgcacaggtcgaataattagagtgtacacgttgccggcgataactagctaaactccagtggtgcggttatcttctctgcttgcggttttattgatcgttgttctagtgcccttgaagcggaactgcttgcttgtaaggagggtattaatatggcgctccaatggaccttactccccattattgttgtggcggattgcttggtggctgtctctatgatcaggatgcaaaggaggaggcgccaggggcggagccaggattttagatcgatggaggatgcaaaggaggcgtcaaccaggggcagagccaggatattagatcgatggtgtcactatcaatgataacaacttaagtaaaataaaattagtgctaattgataaagtaaaatagaattttcttttcaaaaataattcgacttgtattcatgccaactatctaattggtgaaattaaattataaaagactaaattaaaattgctagatatacatgtgcaagtgaataataatattctttctaggttaataattttgccgttttggataagaacattgtctcataaaacaactctgaccactaactgtgagttttaggctatcaaacaactttgaccacgagtcaaatattgtgagttttgggctatcaatagttaattaagctgctagctactgtctggctgtccatgctcacataggatggtgtcacaaagcaagttaatttggtgtcactcattgcaaagtaaaaggaataatgaagacaagacacaagccattggtgtcatgtgacaccaatggttgtacactggctccgcccctggcgtcagcgttggctcatcttgtcagagacatcgatactctgttgagaggaagaagggagatcatactgaagaaaattcatcgttctcagaattctgtcagtcatgttttagcaaataaagcccgtactgaatatctcactaagttctaggctgatgatagttgtaatcttattttgcaacttgtttgttctgattctgagtaatatatctccctttccccgcaaaaaaaaaaaactagctaaacgctgatgggttcgaaaaataattctccaactcccaccgggtaaagaaaaccgttagatggaagcctgtggctaggcttcaaggttcttcacgtagcgtacggcggtacgggccagggtccatggccgcggcccgtagagccacgtcaatttaaatcttagccgcacaatcgtctccatccagcggttgtatttgtctgattggggttcggagaattctttgccgaacccctacgagccactgtttcccaattacgggataacactaccgatcggtgtgactacatgtactactccctctctactctatccacaatacatgtatgaatctctaatatatttttttctcctaaactaattatctctaaaatattttttctcctataattatctgatctacgattcaattacattattttaattgttgattttttctgtccgattttcttgaggactctcgatttggagttcccttcaagtttaccggctgcctggcaaatgttccacctttccccgcaatcttggaccatttttttttgttttgtagctcatatatttgaggctggagttggtagggagagctcagagctcccacgaaagcccatgaaaatgggcatttgtcttgcatgttagcctgttaaggcgactcgggttcggaaaagaattccccgaaccccacttggtccaaagcaaccgttggatggaggcgcgtttgcggctacgattcaagctgacgccgtagggtctatggaccgtgggcgaggcccagttacgtgagcccagtttccgtttaggccaaataatgtcagcccaacgaaacgagggctggccattccaatggtatcgtttgtgtcactgaaacgaacctggatttggtctaaacgaaatcatcaggtgaaactggcattttgtgctagctgctgcctaatagctcagtcaaggtccagccgaaagcagttggagcatgcaggcaaatccaaacagacatgacccagatttcctgccatccttggcagttctcgtgctaaaagcaaagctagccagcatagcttttggttgtatagcacattgccaaggtgccaaggtgctacgtcacatcattttgaaaattttaaattcaatctaagaatatctcgagagtatcaaaagctcccaatgatcaattggatttgtcaaagaccgagcagcagatcgcttcactgtacttcgtttcctttttctacgaatctgtgccgcgaaaaattttaaaatttagcttccttttactttaaaactatccgtagattttttttaaaaaaaatattttttagatttatttctagagatgctttcataatttcaacgataagtgaaaaacagagtagcagggttgcaattttgcttcacagcaaagacactggacatgttcaagtatgctgttatgcaccgacatcgttgatgattacagaacagtgatagaagcatcaatagctagtatagtcacatactgcagcaagcaacgaacaaagaaagaaaccgagcaaca

SEQ ID NO: 17686 - DNA, 17248 bp, Oryza sativa
gaaagttttagatttgtattgaaggtctttgacatctggctaacttcgtctatgatttgccggcctagtgaaaaggccataatgttaacagcacctggcccacttaatcgaaggcgttgtaatgggcctagaagtaagtccatccagcccacggattacagcaagcgcttcaaagcgccgccgcgtcgtctccacgcctcgggcctagggcacgcgccgactcgccgccggggagaccgggcggccggcgaatcccccaccccaaaacggaggcgaaatttagcacgggctgtgcgcggtcgagcgtccccggactcatcggcgtggagagacgaggacgccgcgcgcggcgcggcaggttagatttggatccgcgcctgccgggggatcagacgagaatcggttgcatctgccactgcattcttgcagccaggtacgctttgcccgcaattccaaatgtttgtgttgcaaattcgtacatgcagttcataggaaaaaggggaggaatgcttgcaaaattgcaacctctagttagggtaacaatgggatgtgttctccctgataccactcgctaacctgaaatcatgaacacactgaacactagattacacgagattgtttgaaccctgtatttctcctaccgcattcaccaattgtctgaatttctgccaagctcatagtcaaacacttgtagtattaattagtccatcaaccaagaggggacaacttagttatccttatttcatcagaatcaatacaaagtttctcatcatccgctagagtttgatgctaccgagtggttagtagattggctatgaaatctatggattactgagtcaggcgaatactgtaggctgtccttcagcagatgcgaatcttcctttggagacgcattcttgttcatcttttccgctggacattccccgttcttgatacaattcaggacctccactacctccttaattggtggcctgctctctctgtccatctgcaagcactgaaaggccagctcggccaccagatctaccatcctctttgtttcactgtcagtctcatagccgatctctggatcaaccaactgatcaacttcatggttctgaattctgttgagagccatgttagccaagttaatgtcactgtggctcctggacatgtccacagctggttttgaggaaattagctctatcaacacaacaccaaagctatacacatcactcttatcggttagcttgtagcactggtggtacactgggtcaacataccctggtgtgccctgtggaacagttgatacatgggtgacttcaagcgggaacaggcgcgatagtccaaagtccgcaactttgacatggaagttgttgtccagcaatatgttgttggtcttgacatcacggtgtatgatttcaactgcatgaaggtatgccagtgcctcagccgtttctatcgcaattgtcattcttacaggccatgtgaggcctcgttctcctgcacggggtccatgtagatggtctgcaactgtcccatttgggatgtactcatagaccaagagaaggtcacggctagaacgagacgtgcagccatataggataacaaggttctggtgcagtaggcgggacaaaatgtctacctcatttaggaattgctctactcgtctgtagttgttcttgtaaaggcgcttcactgcaactactctcccatcccggagctttcctgaatggcagaaaggaagaattgtaactgctaagttaataggggaagttatctattatggaacaaagttcaacggagcccctgtcgcatgcaattaggcatgctaatgaggaagtgattagatgagaaatctattaacaacaagggagttgtgcaaacatattctcctacctttgtaaacagttccaaaaccaccatcaccaagttccctcgaggcactaaatccagcagtagcctcttcaagttcctcgtaagtgaatatatggggagaaccacccaactcaaggtctttgctgtatgattgcattgaagatgaactatgcatgagatctttcaaatctcgggtttgtttcctcttcttgcgtttgtgccaagcaaaaatgaatatagatacaatcaataatattccgccgcttgatccacatgctgcaataacagagacagagcactatcaatatgtgagaaccaaggatctgaagcatatcttcataattacattttgaatggttggggaagtccaagaaacaagaatgaattatactcacctattcctattatgtgactcttgcttcttgaacctgcagaagaacagacttttaataccttgcacaaatatgccatgaacaaatagaatgatcattcataatcacattgttagggtatcattgctcccctaaccccctgttgaaacgaaggacagtgcttatacaacttttcagcctaattcaacagaaatacagatgcaatttatgctttccacatgtttggaacacactaattaaggattagaaaatgaaagggtatttgctgtcaatcagatgagggatttcttcgtcagtcagcaatcagcagaagaaaaattggaacatggtattggtatgatatctttatcagatagtgtagttgaatacttcaaactacacgtaacacgtttgactaggattccataagctgccaaatgccaatgttcccatcagtgaaataattgtttgatgagaaactaacaaccaaaacagcaggaacttgaagcaaacactcataattcaaaacaaaaatatcaatatccactttgcattttatattcttatgaacattgctgtgacaatgctgtgtttaatttctttcctcgatagcaaaactagatgtcacgcgcattattataataagagtttatctagtggacattaggccacagtagcatggaaatcttcctgtataacgaaatgatgtgtcattcttttctatatatataaagaaaactatcaactagatgaacacactttggatgcattgaatcggttaggatggcctaggctgcatgttcacagaactatgttaaaatttttattctaattgataattgactggacaaatttaccgtgctcttccgattttctgaactctctacacttgtcagggtgcatcccgtcggggcaattgcaggcgaactccaggtcgtcgctgtacgtgcaattcccgccgcttacttgacatttgggacaatcccctgaaaccaccgcccactctagtagaaacccactcctcatgctggcaatatagccggccatactcccattgtgacgctgaacgatcggcacaaccgtgaagttacagcccggtggaatcccatcctcgtgtaaatggtggtcgctgacgagccggacggaggagttttggtcatcacaaggcaggctatggaagccgggaggagcagccgccgccggaagtgacttgttacacgagaggaagcgcagctctgcgttggcttcgctgatgacgaacggcgcctgccagatgccatcggagatgttgaacggcggcgccgggcagccggtggcgagcgggagattctcgtccaccacatggacggtgtggtttccggtgaagatatcaacaacgcgatacgcctcgtagatggtgtgcgtgaggtatgcgccggtggcgttgcacttgagctggaagggcggcgacccgcacggcggccggccgggctcctccagccagaacgggtaggagatggtcagcttgccgcatggcgtgggcaagcagccaggactagacgagctcgccggtgccggcaactcgaggaaggaagctaccagcagtagcagtatgagcggaggcatatctggtggacttgggtacgcaaatcaactacggaatgcagtggtgaaatggattatatgagagagaagaaggggacgagagatcgagggatgggatatgaggcgtggggcaaaaggacggtggcgaagcggttttgaccggtcaaagtctacggattgaacatactgctacattgctactactctctctgctgctacagcttcttgacgaagtactccgtactattttctccgtttcatcactatagtatttttcacgtttatattgatgttaataaatctagataggtatatatgtctagattaattaacatcaatattaacgtaagaaacgctaaaatgatttacatcgtgaaacgaagggagtatagtttttgcatatatttctctgatttcgatatccaaaggtcggagatggattagcgatgacgactgccttatcaaccaataaacaagtcactgattgattaacggattcgataaagttgacaccataaattttacgcatttcctcctcccgaaagtgatgattaaatggataatttcgcgaacgaacttaccagatgacggcgtctcttgccatgtcaagaggaagccgtcgcggatgagctgctcatagctcctcgcgtccgtgcccagcaccggcacgacggtagcattgcagccttccatgtaaaacgccgggtagtcgcccgaatcactgtaattccctcctacgcgagcaaacgtcttgttgccgcacctcgtctccacgaggtcgtcgtctccgtcccgcggcacaagcgccttattgcaactgtacaggaagaggttgagattggtggtgctgatggagaacgggaggccgaccttggaggaggtgttggtcctcggaacatggcaggagtattctttgctgacgccggagaagacaatgaagtcaccgagcttgtggatgtcagagacgagcaatgaattgttgccgtagaagatgtcgaggatctggatccgatatctgggcttgtagtagccgaggtatggagtgtcgttgtggcagataacctggaatccaagccagccgcatttgctctccgttgcctgctccggcacgacggcgaacggcgacgagatggtcaccttgccacatacagtactggccgcgcagccttcttgtggacgattgtctgccgccgtattcgctgcttgactcgcccaggcgaggcaggcgaacaagaggaacaaggaaggagagggcatcgaaaacgaagaggatgaattggtgatgtgttgttgatgaggattgaggaagacatgagagaattaatactgctacttcttcttctagtacgatacatttaactttgggaattctctgtagtggccgaaaaaattgactggataatggctgtctacggcctcatcgtcttgccgtatcggttccaattccaacagatgtgcatggtcttctcagtcatgtaccagaacaggatcgaagattggaaggaatggcaccggagtgagatggaatgcgaaaggacggtcatggtccactgctttgatcactttaattctagtttaattcttgctcatccctgttgcccagccgccacgattgggcaagatgacgaccctatcagccaatcgacagattccctgtcctacacgctgatgagcgagaaccgtattctactagtactcgcttggagatcggaagtatcaggatatacagtggattttctatacgaacttgatcctaatagtttcagggagggtgaacttaccagaagatgtcactggcggtggcaggtcccatgttatgaggaagcctccacccacgagctccacatacctgctggcgttcgccttgccatcaggcggttccagcaccggcaagaagacggtgctgtttctgctgcagccttccaaatagtacttgtcgtagtcgccctccccgtggaaacgccctcccaggcgagcaaacgtgttgttaccgcatctcgtctccacgagccccagttgttgctgctgctccgccggcggcgcctcggtgcagttgtagaagacgaggttgtgattggaagggctgattgtaaacgtgatgggcagcttggcgaaggtgttaaacactgggatactgcagccggtggagttattcaggcgagctagcttatggacatcaaagacgagcatagtacggtccccatatgatatgttgatgatatcaaacccgctgtctgtagagcttcgaagagttgcgacgccggtggagttgttgcaatatacctggtaatccagaggaccacacggcttatccgcctggccctggatgatccagaacggagaggagatattcaggtcgccgcatttctggctgcccaggcagcctcctcctccttcctcctcggctcccctcgccgccgcggcgagcatcagcgctagcgaccaggccgagacgacgacaaagaagaagctcggggacatcgagacagaaagaggaggagggggataggggatttctgaaggagatggaagtttgtgggggagatggaagtaagaaactttgcacacgggaactattcctctgtgtcgaaatgtttgacctgatacacgaacgatcgtcgtccacgcgtgcgagtttccggggtgccctatgggcagctagctgttataaccgccctgatgtgactggaccagtttgtccggactcatcgtcgtgtactcctattaaccctcttccagctagctagtgcacgctgctgtccaccattgttttctacctgttgtataacaggctactacgccctttgttccacacctactcttgccggtaagcagagactagtccactttccaaccggtcaacgcttacctgtacggatgtaactaaaactaaaaaaaaactcctacagaatacttcatgtgtttaataaaaacctacctaatttgacatatcctaatattatgagaacttgtagatacatttttctgaacctaataatataggacagaaggagtactttctgataaaaacgtgttaatatctagtatcttctctctaaccaaaaacctaatgcagattgaacacatatgtgctgcgttgctagttcctaccactaaccagtactccctccgttttagattataagttgttttgatttttggtcagtcaaactgtctcatgtttaactatgtttatagataaatataataaagtaatactcaattcatatagtttcaaatttaaaacagttaatactcaattcatataagctaatgactcatcttgtttgttgtatcttcttaattttctcatttcatcactcaaacacaatctaaggattattaagtggattgttgtacagattatctacttgattgtagttataaattaaacatttaataaatgaacttaaaacaagtgtgcaatacaatagaatatttttttgagaaaatatattttaggagcgtagagcacaaaattcatttcaacaatttggaaagtaattttgaaaaaaaagtaagcctaaaaattatgtaggtatctatcaactcctagaatcagaatctttgcaggaaaggcattagcatttggtaccatattttgccgaaatctatgtcattatcagcaaagctcacaatgctcttttatgtaaaagcacttggatagactcatagaccggaattagcttagtggtggcaatctctagtactatcgttaatgggggcaccaaggtagtatattgttttgcattttctatatattttttatttttatataagctttcattccccattgtattaaaatttcaatacaaactacactgattaaagttcataatttcatatttctagcactaccgcatttcctgttttgaatttttcatatattttttgagggaacagtttttcatatctgtttattgcattttaaagttttctttttggaaatagtagcgtttaaaagttgagaagggcagtgtgtactccttccagtttcaaaattattgatgttttgaacatgatctcacataccaagaagtgatttactccatattacagtatcaatttactattttaccatattaaatatagtattgtactcatggtaatcactacactgctgccgttggtttgaattaatcacctgtatcggtgcgagctaaaggtccaattccctagcttttttacttggtttttacttccaagcatgtagggcaaagcggtccaatataacatgctaagatagaagcattaacaattcgcaatcaccatttacaaggttaaaacatcaagatttttgtaccggagggagcagtaactaaggttaagaagccaatagatcgcaccattatgatgtcttatatgttgagctttccattgtgtttccaattatgtctgcgtatatgttgggctccaaaaatttgagaaacgtccagggtcttccggctagctccacaagatggtgaacgagacgatctgggttcaaagtatcaacccttctaattatttgatattaggtctttccttaatattcgcttctttcggctccaaaaattcatggcccgccacttctaacaactccgattgaccgctttcgaaagatataaagcgtaacttatcccgttagccttatcagttcaaagaaagcccctggtagcggctggtgcgccgtgcacgatgccaaatttagcccgtgcccatctgtccccactattttggtacttctacgcagaatgccacttggtgatcatgtactaatgatttacattgtcacctactatgagcattagtttatggaccagctcaacacactcgaagcttcaggcaactactgctaacgtcttatttgtcctaataatgaaccagttcactaatgagaatggtgaattttcgggggaaaaagaagagggggaagcagaaggatcagaaggatctctgccctgggaagttgggagacagagacaaaggaaaggacggaattcatgcgtttacccaagaatcaatcacgctgggtggtcaatggaagaaccagtgactagccgcccatgtcaactcctgcctgcagcctgcttgataagtcgtcgtcaacgtcaccaccgaggcaaaccctcccaaaatttaccaccatctctgcagctgactagccagccgcccatgtaactacccgagaccgcgagcgagcgagaggttgagtaaaatccaaggacattgacgtgggccagtaattcaactccaaatccacatgggacctacgagagattgcaactttgggatcggagtacatggctaccgatcgcaacgcgccaatttggccgtccagttaaccgtacaccgagccaaaatcttcaactagctaacacatgcgtcagattgggcgataggcaagtgtggtactcaccggggcatgtcgagcggcgcagcttgccgtcggagcagaggcacgcgaacgccgccgcggaatcgttgatgtaccggcactgaccgccgctcccgttacaggcgtcgcagtcgccgaacccgttcttctgccactccaacacgaaccccttcttgaactgcgggctgtagtttgtccccgccgtcaagttcgccggcgagtccggccacagcaccggcaggtacgagtacgtgcagttcccggctttgatcgccggtggattatcacggtcgtagatcccgccgaggtacgcgtagataggcttactgcagctggagatggtggcgttcacaaggccgtcgatctccggtggctccgtgccgttgcagctgtagaggaagcagatggcccggttgctgctgctgatcgtgaacgggctgagggctaggctggacgatatgttgaagtcggtgcggcacacgccgtcgccgccgtcggcgacccttttgtgtgccgcgacgaatgagctgctgttgtagtcgatgctgaggacgaggatttgcgagcccctcaacgacgccacgccgccgttacaccacacctcgaaagccggatggccacaggaggccagagctgacgacggcgacgactggttggactggttgaagttggggccgcctagccagaatgggtacctgacggtgaggttgccgcatgtcgccggctcgcactcggcgcgcgcgcggtggcacaggaggagcaaggaggccaagagtggcaagcacaacaaggtcgggtgcatcttgccgctcgtggagctagctgctacacaatggaggccggattggagagcagcagaatgctggaaagggaggggaaggtctaatgctcgagaaatgctattgccattgccttgtttttcttgactagtctttccgatttgttagactttttttttatcagcagaaataatggggaagtcagcatcgtctctgacttgtgaggagggagacaaggacagttttaatcttctaatcgcgatgtaaataaactagtggtgcaggtcaattgtcgacagcgttatgtcattcatgccgtatgaatcactagtgactattccttctttttctccggggtaagtgaaaacttggtgatgggtcactcatgtcgtagtgactagatggaattatctgagcaccgacttggaaatcaatttagaccttacaacttgcaaactactcgtgtgctaattaaacttcagtattttaaagaaacggatgaacaactctgagggcttcagctgaaaaatatttgcacctaacatagcgtgttatatatctgtttgaatacgactggaattccccgaaaaaagaagaatacgactagatttaccaggggatgaaagataagttagtaggttagtaattttagaccaaccgtttctcctgattttgacttttgcagggagtaaaaaggccgtgatggtaagtaactctgattaacggacattggtttggatcaacggtcaagatcggctggtggaatcacctgtcacgattctgtcctcttgtgtgggttggttctaccggcctacaagtaacctaccactaaaaaagagttttcgaggaatatattatctgaatccatcactaacacgtcgattatttttagttccttttgaatttatactaatgacacgtgtgtgcgtactattggcactccccagttgacaatgctagtcaaactgattcggtatgttttatcaacggttgagctgaaatggtcaaactgatcatagtctactcatttcggctgctacgagcagatgatttttcggctgcatgcgcggcaaaagaaatgcagaggtttcaacgagtcgcgggacaaatcactcaccgcatgtcgccggctgcaggcggccgccggggcaggagcacccgaaccccatggcgccggcgtcgtagcggcactccccgccgctggcgttgcacgccgcgcagtcgaccggcaccgacgtccactcgagcagaaatccgcgcctcacgagccccgcgtagtcacgcgccgatctcagctccgaccatggcagcacgggcaccaccgagtactggcaacccaccgtgtccaccgcccgcgcggggccgccgggatcgtacatccgattcagggacaggaaccactcgccgccgccgctgaaaccggtgcagttcaccgggagcgaccccgtcggcggcgtccgcgagcagttcgcggagaagaggaggcccgcgttggcgcggctgacggcgagcagcgagagcgcgaggctgctggacatgttgaaccgggtggcgcggcaggcggagctctcgaccaggttggcatggaaggccacgacggagctgttgccgtagtggatggcgaggacgcggaggtaggagccgttcaggctgggcggcggcgacgcggtcgcgccggtggggtcgtcgtcgtcgtcgcaggtgacggcgaaggtagggtggccgcagtaggcaggctgccggccgcgcagccagaacgggtacttgatggtcaggttgccgcatgccgccggcgcgcagctctcgccgaccagctgcgcgtgcgtcgcggtggcgaatacagccaggagcaccagtactagcgaggtgttttgaaacattttcttttacggtgtatgtgtatcgatacccaaaaagaattctaaatcccccgcgtcgctctcgcgcgagcggcttggggggcgaaaccctagccgcccatgccgccactccccctcctctttcttcaccccgccgccgaaggcggcggcgaggccttccactgtagcaaccctttccttggcgcgaggaggacagagttgggctgacgatgtctaccaccacggccggaggcgacgacggcggggcagctcggggtggcggcggatccggcacttctttggccaaatctggccgccccacgtccggatcgggagcgcgcgacggccagggctcgccggcggcgcgcggtcggccgcggggcgtcgcgggcaagcgcggggtggcggcgcggcgcggcctggtgacggcggcggatccggtggtggtcggatctggccgccctacccccggcgcgacggccggggctcagaggcggcgcgcgtgtcgcggctcggcgcgggcggccgtgggacaccatggtccagcacggggcggcggccgggggtcggcgcggcggcagcagccctcacggagggcggggccaactgcatccagcggcggcctgggcggatggacggcggcggcgaccctcccggagggtgcggccagatcgtggcccgtggtcggcgcggcgcggcatgggcggtcggacggcggcggtctggccttctggtgcagcggtggtggcgttggggtgggcatggcggctcgtaggcactgaggcagggcgtgaagggagtgatggcagtgctaagggagctggcggcagtgggtcgtcttcctcgctgccggcctgcaccctcgcccttcctgaagctcatccccttctctgtggggagtttctatgttggattgaggcggcagccggttagcgaggggagctcagaccgccaacgcgacgccgtccaattccgggttctccttcggccaaagctggcaaggaggctggcgggtggcgggacggaggaggtctgggccagttcccagggtagcggcagctctatgcagcaagtgtggtggtcggccggtggaggggcgccggcgcggtgtggtggaggcctcgtgctgatctgcttgtgaggtggttcctgagttgatgggcgacgaacctcaagcaaggttgaaaggtttccgggtgaaagcctcgcctgatgattcatcgggctggcagcggctacgcttttgggcgtcgtaacctccttgagggcgctggcaaggatacctttctcccttggcgagttttctctaggtgaaaaccacatctccttagatgggcgatggcggcatccttgatgtcgtgacctccttgggggcatcgcttttagagtctcgtctttgtggtgttgtcgttggcccggcggcgatcggccacgcatagcgggggtcgtctcggtgctaggtttttctctcagtgggttgtgcttgtgtgattagcatgtggctttggttgtgcatttcgatgcaccttcgacctcgacagtctctgtcgagttttttcttgtaactttatttcttcttaatatacttggatggcctccttcggccttcccggcgatacccaaaaagaggtataaatgtttatttatgggattttatcatcttaaggttggagtctcaatcaagttgaatgcagggatgaatatgatcgatgaggtagcggtacaagaaaagtgccgatttttctgacatctgacactttctaccatgttccatttacacactgcgtggtcactggttagcaggcagctgttaattagaatctaattttgatcctttttattttcaacaaaatgattttgatcaattcagccagcatcttttacaagcattgctcagctgacattgatgcttgccgaccaaggggaatgtataaaaaaatgcagagagtattcagaggtctaattaattaaactaatggaggtggcgactggcgacggctttggcaggagcaaaatgggtaattgtgggaggatccgtagagtttttcccttttcttttttttttagctctatagggtttcttatgaagtcttaaaaaattaaactcgaaacatttgtttaggagtatcatgatgtattctatcaacaacataactgctacatatgcgtaccataataagtgcatttctagcatttagaaatcaaaatatctggaagaaaattgacctttatgttcatcattaaggctgagttctttccccaaatttcccaactcaactccttcgtgttccacatgtatgcttttcaaactgataaatggcgtgtttttttaaaaaaaagttgcttaaatcatattgttctatttttgaaaaaaataactagttaatacttaattaatcacgtgctaatggaccgcaccattttccgtatgctggaaatgtgttcccaacacacaacaacgaaaacaacctaaataggggagtgattgggagttgagggtgtttggggttaaaataggaagaaatccgaacaagatgtgattgataagacaacaaataatctagaacactattttatgagacgtttgaattctaaaaatcaatgttttaaatagcgggctaaggtatttagcggttaacttctcaaatagctatagcgggctaaatggagctataacggctaaattgtacatgagagcaaatagctagaacccttctcaaacagctatagcgggaaatagcggccgtttagcgggagattaaaaccctgaaaaatgcacttattatggagcgaaggcggtacaaaattaatatactagtgtgaaagcactttttgaagtattattgtacttgtaaaatacttactaaacatcttatgatttgaacaactgctgaaaaaggtggagtttttatatataattgttggatagagaaaacattttgattgtgttaatttgtagtccgtctagtttgtagggatattattggttggtaaaattaaattggtcggatacatattataaaatgttaatgatatgtaaaataaaatatagaaccacatgtgtgataatattcttactttagcccgcgcccaaccacatgaagttcggggcactaataaaacaaccatagtgatgttctttatatgtggactatagacacatgttaagttcttttcaaattcatttgcaaaaaaatcaggtaccaaaatgtttctatgcaaaaattttccatttataaagttctatatgaataaaaaaatatgtataaacttttcatgtacatttctttataggccgaaacattgctcgttggaccgaaagcaatatatttgtgttggtgacaactgacacacactgctgtgcatgcattagacctatccgatgaatatattacactccagaattttagcaccaaactaagctataccatatttatggatgtgtgtattataaaatgttaacaatacttcaactaaataaaatattgagacatatttaatttgtagtcatttttgtgtcaagatttattcttgtcctaaccaaaggtttggtgctggtatatatagaaaccatggtgatagttaatttttatgggctaaagtgtgtcaatgatttaggctacttaacccctaggagtgttagacaagaatagcaatcttggtcattgactcaacgttgccacatgaactccctcaatggtaaaaaatgccatcagtcctactgacattttttctcgataaaaaaagtatagctgataaaatcatttggctaatgagtactctaacgtccctccagaattttagcatctcaaattgagttctaccacgttgatggatgacataaaggtgaacactataataatgcgaattaaatttagaaatatactgttcattcattttatttttagaaatattcggaattcaaaactttttacaaaaatataccgtcgatctcgcacaaccgttgcgcgaaagtgacgtggacgtgacatcataggcggtatcgcgctgggaaaaagcgagaccgcgcggtctcgcgaaatggaagagcgagaccgtccggtctcgcttaaccaatcagcgatacaagatttcaaaatggttaattagtgattaattaccatgattaatggttaattaattattaattaatcgctaattattattagttaaataattaattaggtcattagtcactaacctaatgtagtttaggatggtgtcgctctctgcttgagcgagaccgctcgtccttaccgcgctcttgcgccgtcaccgcgcgagaccgcacggtctcgcgccctagcagcacgagtccgcggggtctcacgctttctccgcgcgataccgtcctcaacgtcacctctgcgtcattttcgctcaacggtagagcgagatcgatggtatatttctacaataaaatttacatcccgaatatttttaaaaataaattaaataaatagtatatttttaaatttaattcataataatgcttccccattgactgtagaattgcacgtggttattattcacttattcagaaaacagagttaggttccgagaacaaggatagcttttcctgaacactaaccaatgcatcaccaccgataatattgattgagctaagtgtaccaactgtgattgagaagagagatagagaaaaatgagaagataagtaaaactacgaggtaaactattaatacataattaattaaatatgcttattttaaacttgaaaaatctattaatatgttttttaaaacaacttttctatataaagctttttttaaaaaacacaacgtctaatagttcgggaaacttgtgcgtgaaaaacgatgctctttctttctctctgtacatcatttgttgagttgtgatccaaattcatttgcacttaataaagaccaaactgacccattgggttgtgcacctggggacgcctaggggtgcgggggcggagtccccgcggtacgaatcgtcatcccttttagggttccacttcatatatatacctcttgtaagctgccgtgcagcgctgtaacctcaccccgatatagtgaagatattttgttggctggcgtccgtggtttttttctcaccccgatatagtgaagggttttccacgttaaatctcgtgtcttctgtgattgatatattattttttatcgtttatttgcatatcgttttctaacatgattcgctggccaagtcgatgttttgttcgttttggatagcctatgtaactgtagatggtcagctaattgggttggtaaatcatgcccgtgaacaaccatttttctcccaacaagggtacgatttgtcgatatgatcatctatcattccatctcgttagggctagcgaatcgaaatcaccgcaaaacagaaacgaagggaatgctgatgaaaaaaaaaacggaacgg

SEQ ID NO: 17687 - DNA, 10378 bp, Oryza sativa
ctcgagcaatcttcgcaatcgtccggccccgccgcggccgtgtagtcgagaagaaatccacccttgatgagccgctcgtagttcttcgccaccgcaccgtcgtaccccagcaccgggatcattgacaccgtgcagttccccggcagttgtctgaaatcgtcatcaggcttgtacttccccgcaagccaggcatacgagttggacgattcatttttcgcacaactcacgggcgcccaagagattggaagctgccgtcgactctggctgcagttgtagaggaagacgagctcccggtttatggggctaatcttgaactgcgtgaggccgaggtcggaggaggcgttgacaaaactctcgatgacgcactggccgtccgtcagctgctcgttggtgaccatgaaggagctgttgtggtagaagatgcgctggatttggtacgtccagatgccgttcttgagggaagcatttctatggtcgcacgtgacctgaaaagttcggtagccacactccggcggatgcttgccggcgagccagaatggatagccgatggtaaggttcccgcacctcgccggctcgcagaacggcgatgtggtgttggtcgtgtttatggcatcaacggtggagctagctattgggagagtgatcagcagtagcatggctaaacagatcatggcagttgcaggagcacgaaacggatgcatgctgcagtggaagcgatcgatcacgcagcagatttgggcgagacgaagaaggcgaggaaatgatgatgcatgcatcggggaagaagataacggattggtcaggcaggcagcgcgaaacatgttgcttgccgaatgtgttgaccattcctcagtctccttgttggaccattcttctccggtagctgatgctgcttattggtcactgatgtggacatcagcgagtgccgcccagtggcacagtggcagctcaccaacatgtggggtcctcgctaaatcgggcccaccttccagtgaccgcagaggattaggactacccacggtggagacctattcgattcagacttggttttggaaaattcgggggtaacccatccgacgcgagaaaaataacggtccttcaattcgttctaactgaaacgatgatgactgagcagtagcagactagcagtctcacgtcgctggagaaaatatggtctcaagaactctcagctggattattctacgtgttactacgtagtatgtgcgtgtggatttttgttacgcattctgaacagtgtccttttttttttctttgagagagtatgagaccgcgtagtagtacgtacttggctgctaagtttctgcacatccgcgttgtgatttgggttgagcgcactactccacgagagaagcgcacatcggtagaaacgacggtacgacgcgtactatttttcttcttccaaccaatccagtccgtccagaataagttttaccgatccatgtcggcttatccaaattaggttatggttaattgtacctggtcgcctgatcgcgtcactttacgcgtgaaatttcgtaataaaggttgggcgacagaggcgtatactacgtcacgggatttatcattattgggctgggaaaaaccctggcctttcttgggccggcccaaaacatcacgaaacggaacaaacaatgtatacgtgtactcgagtgggcgtacctggagatttcgtatcagcccgcgcggtgattgtcacggtccggaagcacgcgaaggtccagggctcgtgcgccgcgcgccggcggtggccgcaccagccgccggccttctcgcagtcgccgcactcgccgtcctccagtggcctccagccgagctcgaaccccatgttgagcgccggcacgacggcggcgtcgagcgggctgctgtaattccctccgaggagggaccgcctgagcaccggcatgccgacgacgtcctggcacagcgccgcgtacccgtacggcgtgcggtcgtcgccgtcgcggaagacgtaggagtggtggcggccgtcgccctcgaggcaggcgacgaggtgggccggcatgcccatgaaggagcagtggatgaagaaggtgaggttggcgtccctgtccgtcagcgacagcggcgaccccgccgggagggacaggttgcggccgacgagcgggcaggtgttcgaccgggagaacaccccgaggtcgaacagggacaccgtcctgtcgccgtacaggatgtgcgtcacggcgtactcccccgacgggagcgccagcaccggcgtgtcgcggcggcactccaggcgcaggctcgggtacccgcagtagtaggcgccgccgccgctcgtgttgtcgtcgatccagaacgggtaccggatgtcgacggcgtggccgcaccggtacgacgggcacgacggcgtggtggcgttcgggatgatctctgcggcttcatgggtggtgatgaggttgcttaggaacagcaagagccaaagaggagagcttgatgttggcattgttgcattctgcgagattgcacactctgctgcacgactttggtgagaatcttcagttggtgaaaccacgcacaattgcacatttcaattttgcgtgagttatccttacgtgaatgacggttcatgcaagatgtgtgaaccgtgaaggttgttactagttacagaattctgtcaggggcatgcacaaaaaacttgttttgtgactgaatatgttacacgtaggcaaattttaacttctctaacagatcatcaaactgcttttctgaatgtgccaaagtagccaaaccactggccaacaagttaactcagttacagccaaagacacataaacctctatgtcttttttcttttcatgggaaacctctctttctctgacaaacaatagcacacaactctgaatatttacggtgtctgcagtcagtagccagtattttctgaacatcttgtcaagtctcagctgctgttattggaagtggtggatgggctaatccactggtacatgacgcagtccggagagccgtctcggctcttcttgaccagcccggcgtcgtccttgacgtagcctaccttgtccatccgctgagcttctctcagcgcgtccaacacctcaccgatcggcggcctcacgtcctgctccggctgcaagcaccggaacgccacctcggcgacgagatcgaccgtcctcctcgtctcgccgtccgacgcgtacccgagctgcgggtccaccagctgctccatctcgtagctctggatcatgtgcacggccatgttggccaggttgacgtcgccgccgcgccggttcatgtccaccgccggcttggaggagatgagctcgacgagcaccacgccgaagctgtacacgtcgctcttgtccgtcagctggtagcactggtggtacatcgggtcgaggtaccccggcgtgccctgcggcgccgtggacacgtgcgtggcgtccgccgggaacagccgggagaggccgaagtcggccaccttcacgtggaacccttcgtcgaggaggatgttgttcgtcttcacgtcgcggtgcaccacctgcggctccaccgtgtggaggtactccagcgcgctggccgtctcgacggcgatgccgagccgcgtcggccagtcgagggaggacgaccgcgccgccgcgccgccgtgcaggtggtcggcgagcgtgccgttggggacgaactcgtagacgaggagcaggtcgcggctgttggtctgcgacgtgcagccgaagagcgtgacgaggtttgggtggcgcagccgcgacaggatgcccacctcgttctggaattgctccacgctcttgtagctgttcttgtacagccgcttcaccgccaccgtgtccccattccggagtatccctgtaacaagacatgtcaatgttttactctcaactgatcaagtccgacatggacaatgggacactggctttgtgtatgatcttgtacctttgtacactgtgccgaagccgccgacgccgagctcccgggcgtcgctgaagccgtcggtagcctcgtcgagctcctcgtaggtgaagatgtgggtatatgccaagccggcgaggctgaattctttcgtgagtgatggcaatggcgtccctccatggatgagaccttcaaaggatgcagatcttttcctcttcctccgggtatacaacacagtggagccaacgccaagtataccgagacatacaacagccgctgcggttcctggttgtgacagtggttgaatcacaagaacagatcaggagatgtcatatactccctctttttcaaaatgtttgacaccgttgactttttagtacgtgtttgactatttgtcttattcaaaaaatttaagtaattatttgttcttttcaaatcatttgattcattgttaaatatactttcatgtacacatatagttttacatatttcacaaattttttgaataaaacgaacggtcaaacatgtgctaaaaagtcaacggtgtcaaacattttgaaacggagggattaccatactagcctatcttggtaaatgtttaattgaaatcagcattacctgcggcaatcttgattcctcgattaaccttgcctgcatgtaaagagcgcagaggaggagaattagcatattatgagagggaacaaataaagggggctatagcttggtttgctaccctactaaaatttatactttataaaaaaaattgaggttgcacacaaattgtttcttataggacattattggctttatcttgtaccttttcaactctacccgccaaagttttggtagtggacatcaaaccaaacagaccataaaatttgcccatgacgaagaaaccagaaatgacaaattagtaaccagatggtgtatcttatcactaactaaaaatattgactatttaaagcttgtatttatagtgccactttagtaaagctttatcgcaacatttagtttttttaattataattttgtattagtttatctggatattttctttttgtgctcgtctagattagagtttgcttgttttgtactttaaaattcgtagaaaaagctctattttactcccctaactatttcattggttcacttaacccacaaaactatttttaactcattttaccccttaaactattaatagcatttctctttatacgagttgtactttaatctgaaattttatagagccatagataacaccattatcaaagtttcaaaaatactttcaaaaaaaaatcatgactatctgtttaaaatttaaaacctcgatgtttaaatcaagcctagtgctttaaatatatgtatacaatgataaaagaaattctaaaaaatgttgggagataggttatgatatatctatcagtccttccaaatttcattgcaaaatacaatttatttggagagaaacagagaagagaaataccattagagagcaagatgatctgttttcaataatttggggtgtaaaacagtggctgagccatgttaaaactgtggggtcagctgaccccacaggtatttgcaagatatatattgataatatgaaaaatagtgaaaagtacatgaaacaatgaaaatttgtatagattgaccccccacattgttatatatttatgcattttgacccccactgggttgagaacctagctccgccattggtgtaaaatgagtcaaaaaaataatttagagggttaagtgaactaatgaaataatccgtagggagtaaaatggacccttttcattttattttgagctataacaatttttgttttacccctaaagaagtaaacatgtgagcagatagatctaatggtttaaaaaaatgattatagatgggcccaaaagattggttaggtaataattagcataatctatcttatgatatggattaaccgaactaatgaaagcataaagtttcacagtaacaacagtatgaacattacaggactaacacacatcattttcttcttttaaacaaagaagacttctaggtcgtcctagtccctttcacctttcccctggatttcatttgttccttgccgggtcttagttcatgtgccagcccctttcagctgattaatttactctattccctaacatcaaaggcatcatttatcgacaaatgtaactcttatagatgcatgcatatgctacaatccgatgtggatgacatgacacatcgcacattttgatgaactgaagtagtacttggcagttgacacaaggtttgcacagacatatatgaaaacgatatgctgtcacaactgactgctcaacttgatagagcgactaactgctaccctctgcctttttgttgattccactgctaacgtttgttttgaacagtgcagtaggtgctataggagaacgaaagaaagaggttcaatgaaacagtttgccatcaaagatgaaaccgaagcaattcaagggaagtttcagtcaaaaacaaaacgaaaggaagttaaaagaaatcaaatacacgaattgaccatttcaaatgatgaaagtgcattgttatattatagtcaaggggaagtgccattcatagtttcagaccagaggtggcgtcttaatgttagcagcctttgaatttctattatctctactctttatgaaaaacgaatagccagcaatctcttagctctaagaaataatgaccaacaaaatttgcagactcgcagtttcctaagcttgtttggaattcttatacgaactttttccctcaaggtttgcatacaaaaagcacaacctaagtgataagtaggaacatgtatctcaatgcgtgtaatatgcataatgtattcattctcacgccaatgcaaaagtatttcttcaaaaaaattttttgcaaaggtagcaaacgctccttacctgatggatggcttgacgttgtgttggtacgggttgaattggagcagagcaacccgtcggggcagaagcactggaacgaaagctgttcgaacctgcactccccgcctctccttctgcacccatcgcagtcttgatctcccattaccgacctcatccattccaagacgaacccatctttgatcaattgctcgtagtgtccactcaccggcttcattccatcatagtacccacgcaccggcacgctgacagagttgcagttccctcgaaccccggacggtggtgtgctgttccacttgtcggagatgtaagctcccatcgtccggtttccacatggccgttgcagctgcccaacgtgttcaggaatcgagcagtcatagatgaatgcgagatacttgttggtgttgctgatgatgaacgggtagggactgaggctggatgtcacgttgaaatccgggacggggcagtcggcgtcgccggcgaaggtggtctctacggccgccaccagcgagttattctcgtagaaaatactgtccacgcgaaacaggtggtccctgaacgtcctgctgaggaacgcgcggccggttcggttgtcgcaggtgaggtccaacaccgggtagccgcaggacaccggctgcacgccgctgagcgagaaggggtaactgatggtcaggttcccgcatctcgccggcgtgcagcttgtgttgccactggtgctggtctcgttgtggccaattgctgccgcggcatgcagcaaggaggcgagggggagcagtagcaaagcaggatgcatcgcatcggaggagagaaagaagatatcaacgagacaacaaggaaggagagggtggttaaggttgccggcagattcttgtttgcatccgtgcaagcggagggtggagtggactttggagagatgaagagagcgaaccaccgctgctgctgcttcggtcacaactcgcggccatatactttgaccgtgaattcattcgctccctgtttttgttcgcacctaagctagctctctccatcctctgtggtgagtttgcctgaaacgataggtaaaggtagaagttaatggaccatattatcattgaccgacccttagaacatggctcgacaaattctagccaggcactccaagctccaagagaaagtccgacgcaagttccacggcatcaattattggtcttctggtttccatttcagcattcaacacacaggctgtatatgtgaccactttttgaatggatgagtatttgaatatgattgatgaaaattctatgctgctaccagtaaattagacctaaaagttttcgatcatatccttttgctggcccttttgctaaagcaaggtactgcttcgaaactaatcattgtaaaaactgaagatgctcacaaggcacaactattgtgttctcatcaaactagtctggagactttggtgtcgtcggcgtcaacagagaaaaatgatgcaccggaatttctctttctgcagataaaatggctatctgaaactgaaaaaggttcagaggctgaaaactatgtacgcgaagcttacgtcggaggatgcagtctccatcacttcttccgtagctacgacggcgccatggcatcgaagtccttgtccatccattcgcatggctccatccgctccagcgaaaaatctcttcgccgtgatctctgcaagcgtgcattatcctaactgctacatggaaataatacaatagtgttggatcgactttttgtttacctgtggaaaatcgagcttcgttacagagaaaactggcatttaggaagtaacttgcatatgaggtcaccttccggctctggctttctttcatgaaaggtatacgcgttgacctgctaggcagtgtagtaaattaaataaatacctgtattttcttattgagctcttacaggagagtgacacgtaagaaggcctacataagctaaaaaaggaagtacacttgttaattacataaatatttgccaagcaaataggataaaaactatgcagcaatagggcacactacggttgcaagtctggaaaggaagacagattgccactgaaaatacaggcaagtagtgtcacagagtattgagttggccaccaaccatttcagctaaaagattgttattgatgaaaggtggaaacggaaaatatttcaacatagcaaaaggttcatctttgaacttggtagactcttaccattaaactacatctagagcaggcttgaattgttagaaaacgacaggtaaacaacaaagctttttcaagaactaaacatgcagatttttatggtacagaaccattataaggaaaaaaaaaaggtgcaccaactattctagtgtggattacatgaagtatgctatatataaaggtctaaaacaactagaagcacagtaggacagtaaattcaggattccgaagatgtggcaacactagtatctgtatcttaggcaagaacagtctcacatgacgtctcactgtatgaaaaccttgctcagctattcccgtgttagaaacaaacatgttaacgacgtatttgtcatcaaatgctagagtccaatgcgcatgcggcaagacaagtccaaacagcatcacataaattgctaaccttaactttcaagcagaaccaattcactttcttgtctcagatttttacaagaagcgtcaattgcacagaagaaaaaaagaatccaacattttgcaatgcataccaagttgctcctgttgccaatcttggcctctttgcagctactaccaggcgctgccaatggcgccaccgtggacccaagctgcccaccggcgacatgcgggaacctgactatcacctacccattctggctgggcagccagaaccagtcgtcttgcggcccaccgtcgttccagctcacgtgcaatgacagagcatcaggtcccttcctaagaaactcctacatcaaggtcctcggcttcgattatggccgccgctccctcgtggccgtgcacgccctcctcgctgccgatgctgcgtgcaccgtcatgttcaacgtgtcctccgccttcgcgatcactgacaggttcagtatcagccagagcaaccgggagctctatgtgctgtccaggtgcagagagagactgccaccgccagacgctgtcccggtgaccaactgcagagccaacagtagtggcatgtacgcctaccttgggggaagctatggcacaggccagacaccggtgaacaatggtggttgcgagctttcagtgttcctggtgcttgggtccagcaacgccgccgacatgacagcggcaaattacagacagcttatagcgggcgggtttctgttggagtgggaacctgttggcgactgcaacgcctgcacagcgagcggcgggaggtgccggtacgatgccagcacatcggcgttcgcatgcctttgctcggatggtggcatgagaccatcgatttgcggtgagctaagcatgcagaaatgatagtcttgtgaagctgcatatattcagatttctgcttttctttcagagctagct

SEQ ID NO: 17688 - DNA, 2529 bp, Oryza sativa
aattgtgatcggcatcgcacgaggactggagtatctgcaccagggctgcaacacccgcatcatccatttcgatatcaagcctcgcaacatccttcttgatcatgagttttgtccaaaaattgcagattttggattagccaagctatgccacctcaacgagagcatcctttcgatggcggaagcgagaggaaccattggttttattgctccagaagtattctccagaggattcggagttgtgtcaaccaaatcagatgtctatagctacgggatgctgcttttggaaatagtcaaagtaagaaaaaacataaaaggaattgcagataatttcagtgaaacatttttcccacattgggtttatgacagtctggtgagtgagatgcaatgttgtgaaacggcatatggaaccgaagagattgcaagaaagatgaccatagttggactgtggtgcatacaaatgacacctgaaactcgtccttcgatgagcagggtcatagagatgttggaaaggagtatcagtgaactagaaatgccgcccaaaccattcctctgctcccccatccactcaacgaatgtttcgtcttataaatcagtcaattttacgatgtctgcatcatcatgatatgttgatatgctgcattatgctactatatttgtagttcttgttttttagctgagcacttgtaattattttcattgttagtaccatattaacatcaatgtatatatacattctatttgaaaatctaaggatgtaagtacggattcacggttatgaatcatgactagcacataaaggcgttatactgaagaattatcagagttcagatacttcactatctcgacatcgtcagatacaattggccaaacgaacttcacatgcaatttctataaggaactaattttacaaaatgtttagcagtcaatgcaactatcttagaggacaaaaaaaaaaacaaagaagagtttgcttaaaaaaggaacagggaattcatggcatgataaagatgcagaacttactggtagtgggctaatctgcaaagccgtcggaggaacacgcgctttcatcagcacccctgcctgcctgcctgggtggatgccaatgctcgtccagttcccccgccccgccggccacggcagttcccttgcccaaggcacgaccgcatcgccgccaccccagtgcggttgacttgaccagtttccgccgcgcactccgatggcatagcgctggaatccgctcaggattggtcctgccggttgccgcactaccaccgccgagccgtcacggcggcggccggcggccggggctgtggcggcggctcgaggggagtggagcgagagagagagagagagagttgaggccccgaagagtagcatgacatgatacgggcccatgggccgtggataacctgtaatgacgggcccaaacaccaaactgagatggaagagaagacgctatgcagagattttttttctagttttagacatttttaattttaaaaaaactctctaaaaagaataattaactatttgccactagacccacatgtcatatacacatgagagcccacatatcatagacagcgagtgacaaataatcaattgccacagccccccccccccaaaaaaaaaagttgattctaaatttgaagcaccacgccagtctaattggcggcgtcagaaaaaactgtcacgccacatgatgccgttaacatattttaaaaatagagagaatccattatataccactgactttatcatacgtctacgatttgccactgactttatcatgttctacaatatgccatcgacttttgcttaacttctacaatttaccatcgccgtccggttagtctccgttagtattgtacaaatttgtcgaaatgaccaaaatacccctgggagaaaaggtttcaaaatttggataaaaattatgaaatatcatatttcaagtttttggtcaaattttggatgtttacaatcttatgtttataatataatattttgataattttatccaaattttggaagtttttgtcataggggtattttggtcatttcgacaaatttgtacagtactaacggtggctaaccggacggtgatggtaaatcgtagaagttaagcaaaagtcgatggcatattgtagaacgtgacaaagtcagtggcaaatcgtagacgtgcgacaaagtcagtggcatataataaattatctcttaaaaataagtcttgggaggggtccgttttaaaaataaaaataaaaatattaataaaataataaaaatccttgtgcagaagacttgaacgagtgcagtgtaaaaaaaaagtcaaaaaattactatgggtatgtttagtgctttagatgtaaaggctttgaagtatacggacacatttaaaatattaaacgtagactaataataaaacaaattacatttaaaatattaaacgtagactaataataaaacaaattacagattccgcctgtaaactgtgagacgaatttattaagcttgcatgcctgcaggtcgact

SEQ ID NO: 17689 - DNA, 835 bp, Oryza sativa
cgagtagattcgatgcttccgaagtatttgacaagctgagaatcgctccggacacctatttcaagaatattaaagaagccggaagcatgggagcaggtttagcgctagcaatgaccaaatccctgtacccgaagatcgatattgatgccattgatggttttacggatgggacaagcgaagaggctgcccttgatcttatcaacgacactcaaaaagcagccgacaagattgcaggtgatgtcgtagatcggtttcaggataccgaccttcggccgactggtaacaataactctgatgatgagaagactgatactgattaaatgtaaatgtattggatgacgaatgatggaggcacaatttgtataataccggtgtatttatgctgtgcttggtgtttcttgcttagctgttgatttcttaaaagcctttatcaagctttgttgagcctaaaacccgcaaaagctattaaaaactttcagtcctcgtaaactaagtagaaaaatcaagcaaggcaatgatagaccaagtaagcaaattgaattgataaaaatcacactccattattattatagtagcccccgactgacaacctcaagaaaaaaaaggcttgatgttgacagtcaagatagggaaatacatagagaaacttaagcgtagaaacgacgaagatgttcgatattccaagaattgtcaacaagtgtaccatcttcacgcttgagtcggtaggaacctggccgggtgacttcagagattataaatgacccttcccatagaggagataactgtgccgatctcgtgtagtttggattttgtcacgtcctgataaattcatccc

SEQ ID NO: 17690 - DNA, 691 bp, Oryza sativa
gctaaacgggttgtcacaatcacagcagataaagctcgagatttcttcatcaacattgtgcataggtttggagtgcctaatcggattatcaccgataatggcacacaattcactcgcggagtttttaacgacttttgcgaagacttcggaattaaaatttgctatgcctcagtagcgcacccgatgagcaacggacaggtcgaacgagccaacggcatgatacttcaagggataaaagcgcgagtttttgaccggctaaaaccctatgctggaaaatgggtggaacagctgccatcagtactttggtctttgcgtactacacctagtcgggccacaggccagtcaccttttttccttgtctacggggcagaagcaatattgcctagtgaagttgaattcgaatctttgcgctttcacaattttcgcgaagaacgctacgaagaggaccgagtgaatgatctgcaccgattggaagaaatccgcgaagcagctttaattcagtcggcccgatatttacaagggttgcgacgctatcataatcgcaacgttcgatcacgagcttttctagtcggcgacctggttttgaggaaaatctgtcacgaccgggaaaattgccttttcccgaacgctagtgtattaatccccgtcccaggaaaagccggggtacaccacacaaacatgatataaagga

SEQ ID NO: 17691 - DNA, 1382 bp, Oryza sativa
tataaactgggattcaatatgctcaaggatgatgtgacttgccttgctcagagggaacggccttccgaaccttcggcgacgaccacgaaccacgcttcgggaacctccgggacgacgaaagttacgcgaagcacacaagcaaagctacaagcctacaaagaagcaataacaatacataaaaagaaagcacagggttctttaggttataacaaacattaggagacttgaacgggtcgattcggagttcgtatgaccaagatatgatcatccgaagtttaatgctgttatatggggatttgcggattattataattaagctttgcaactataaaatatgtgtaagcgctagcctggaaaagacaggaaggctgcgccgttgacatgcagaccccacatgtcaacctaaaggaccgcggtagaccgggtacacagagacggtccacgggtcgatggaagtggaccccgtgtgtcaaccgaggcgagtggccgacaaacggactccactagacaccacacggcctgcacacgtggaaaccacgcggctaccgagcgggcacactaacgcggacactacacggtcaccacccgcacgcgtgaacgactaccgacaccggtacacgggtaccggggccgacaaccgcacaacgagcacgggcgacaccgaaaggacgaggacggggcagcgagggagagggatccttaccaccacgcgacgaggcgtggggacgacaacgacgaacgggcgcggcggagacagctcggggacgacggaggcgaaccgcgagggaacgacttcggcggcgatccttggacgaaggcgagacgcggctggcacaaggcttgacgacgcggagctgaggacgaagacgaggacggggctgccgcggcttgcttgactgatgcggacgacggatgagaacggctcgacggagggacgaacgccacgacgaccgggaatgacgagaggacgacgacgacgacgaccggggccggcgaggaggcgacgagggcagccggcagcggctgcacgaatgcgaggatggcgtggaacacgccgcagcgatgacgatgacggaggcggcgccgcgagacgacgagccggcgaggatgaacgggcggccgaagggacgtcggcgacgatgaggatggagaggccagcacgggcgacggtgttccggcgaaacagaggagcagctggaggagaggacaacgcggcgacgtcgataggcgtaccggcgacgtacaggagccggccggaggcggggaggtactggacgccgacgtggaggccactccggcgagcttcaggcgaggaggaggtgatgccggggatgagggcggcgtcgcggagccgagggaggtggtggcgacgtcggccggcg

SEQ ID NO: 17692 - DNA, 704 bp, Oryza sativa
ggcgacgatgcctggatggaatctgttgtcgaccagggtagtggtaatcatcagctccgtggcacatctcggcctcgtcttgtgtgccgaagtccgccgaaatagtgcgacaggctttcggattgtcatcctgtgggtggcgaaccagatgtcacgttgggccccgaccaccgcgctggccatgctggccgccggacgcacgccgcaggaggagcagctggtgacgctctgggtggcgttcatgctgctacacgctggtatgccggacaacatcaccgcctacgccttggaagacggcgttctctcgtttcgccagagtgtaaacgtgtttcttcagcttgttggacctgtgtcacctgcctatatcctgcaccagaatatgttcgccatgcctggcgactccatgctgtgggtctcctcgatcatctgctgtatggccatctgcaaatatttggagggggcgtttttcgcgctgcagcgtggcaacctggaaaacatgcgaagcgaaagcaagaaggaggttccaagtcgaagagtaacaagcctccaaagtctaaggcgtggcggcaaaccagataatgaccaaatcatgctggttgctcatggcaatctccatatcaccaagggtgccttcatcgataatttgcaatacgagcatgatgcccagcaaccaagaaatactcccgaaaacattggatgaaaac

SEQ ID NO: 17693 - DNA, 12661 bp, Oryza sativa
aaaaaggtgaagttggcccattgcctagtagaaatggaacagaagccaagcttaaagaatgcgctgcgcagcaaatggagacctggtgtcagtggacactggctcaggccagaaaaggcaagtattctttacgacaagaatataattctctctgacggaacgagtttcgcgcgtgtgctgctaagtcgtataggcccgaacccatataccccggatgatataaatcttaattacacaagatatcagagacttatagatatgattcctgaattgaaagacgaaagtaacaggtttgatacatcgaaaatgatgcgccttatcttcagagcatgggtgcgtcttctggtgtatgcatccgtgcgatgcacaagggattcccatgccaagcagctcgcctgtggtggtgagctcacaacaatcgtctggattcttaatgaacacgctggtatatttcgtatcgacagcgacaaggatgacgacaaggatagactgacaagtttatatactaacgaagatcgtttgtacctttgactgcaactcaccaattaatttgttttccttgttgataacctatatatatagggtatgtatctcatttcttttgtatacttacgctctgtaattacctcactacactacttaaaaaaccattttcgcttgccttcaatttaagttcacatgcggatataaattaaattgcacaatgtcttactttatgtttactaggttagatcgaggtgattaaggccattcccaacccaaaacactacatatagtttccataaactacacatcatcaagaaactagtactagacactactcttccaatgcaaacacaactattctatacataaatttaatgctacttatctcacatgatgtcttggatgttgtgtagaaactgtcacgcccggaatttctatccaaaattccaaacgcttacatgtgtgtgaaccctcgtccaggaatcagccgaggcacacaataacaaattcataatagagtacaattattactctaattaataagcgaataaaatgtcattacagaggtagatagttcctctcaatcaataaagatctaagcagcggaaaaaaaaagagataaacggcgcagacgactccactccacaggcagcttgaccagggctacacctaatcctccacactatcagcatcactgtagaactcctcctctgatgaatgattgcaaggtgagtatatgacatactcagcaagccacgcagcaaatatgcaagtgcacaaggataccaaagaatggcataatatagagctcatttgcaaaagcagcatttagcaaacatttgagaattataaaacagtagagtaattaatcatcaattttaatcaacactaaacagcacacccatgctgctcaggcccaaccatccggaacaaccatacccggctgtacagatctatctccaaaccaggaatataccattccaaaccaggagctaaacaaatttttaccagttatagcatcttttattatggtgagaagtgtgaaactaatcacgaaagacattgttagacccgcccataaccgcgggcacggctattcgaatagttttactctggccagaggtgtaccactgtacccacaagacacagccccacaacatgtcaccatgtgcctcaataccaccacggtacctcggaaaggaggtgtgacagtacccctcgcacaacacaatccaccaaagcgcacctttcctggatcataatcatccccttataaacaaggcatgaactccccagcgacccccgtggacttatctccgccacttctcagtctggtgctacgcaatgaaccatgctatacaaaaggtaaagccgttgcccacgctggcttgtggttggcacggttaatgtttcacaaccgaaactcgtgaaccggtccttaattgtcatgagcacgactctcaaaaccatgtgctcacaacccaccattatcaagttttagttggcaagtaattaattaaccaatcacgattgaccatcgtgaactatcattaagccatcattaaataatagtgagtcataagttatcccaatagtgtgctaatgtttctaagcatggctaagcaatcatatctaatatctagctgaaccaatatatatagcccaactagtcaagttataataacccaaggtatcaaggaataaagtaatcaagaacaaaagggctataacaaacaataggttaattccacccaatgacattcgaaaataaatgcaatagttgaatagaaaaaatagctttaaacgggatcaacatgctcaaagggttgtttgggacctgtgtgacttgccttgctggccttggaactcttcaaattcttctagtgcgaaaacgaactcttcggaaacgtcggaatctaaacagaaaagagaaaaaacaccaaaacagcacataaacaagcatgaacagtacatgtggatatttttaacatgtagatctcaattttagaaaaatttagagacttgaaccaactaaatccgagctaagatgaattagttatgaattttcaaagattaaatcggattaaatcatttatttagattttaattgaattatgacgcaataatgaattatttttgaaaaggaaaagggaattattgcgtcagtggctagggttcgcggtggaccgggtgcacggcggtggctcacggaaacgaacggccgagatcgatcctatccaaaacggacggccaagatccaacggtctacgaccaggccacggggaacgacgacgatgacgtcagcggagatgtcactaccggcggcggctcgggcgtgcatgcttgccggcgaacgacggcgcggcggcacgaacagaggacaccaacacgtagagggcgacgcggcgaactcaccggtgaccaaaacaacggcggaagatcaacggacggcgacggcggtgaggaaaaggcggcggagatgatcggcttgacgacggcgacggtgttccggtggcctacggcgacgacggaggggcggacgaggtcggcgatggcttggcgatcacgacggcggccttcccgagcgacgacgacgaccggagcggcggcggcgcacggctggacgaacggcggcgacggcggcgcacggctgcacggtgctagggcgctaccgacagcggcgggcaaaggcaagggtggcggcaggtagcggcgggcttgggggtccttttaaaggggcaaggaggcggtggcgaaggcccacggcgaccggcgacgcgatggaaagattagggtccgggagagagagacaaatccgattcgagatcgaatccgtgaatttccaaacgaaattaaccgacgattccataagagaaaagatagaggggatcccggggatcatttcccttctattaatttcatcggaaacagaaaggggcgggtggatttggaaggagacgacggcggcgcggtgctagggttcgggcggtcggaggaagacgacggccctgacaggtgggccccacctgtcagcgggtggacgcgcgcgcgagcgggcggctcggctgcgggccggattaggccaggagagagagagagagaaggttttgggccgactctccgcccaaaaccaaaagagactctaaaaacctcccccaactcaaattatccattaaatgcaattccatttattaaaaatacttccttagctcaaataaatcccagaaaaatctaggaattatagagttaagcaaagtatttaatgaaattttatctggccccattttatattggaatttattaattaaaattagatcttctcttctaggcttttaaaataaattataataattccaattaaacaacaatttatatatttaggatttttagggtgtgacagaaaccatgtctcatgtaagacatagtttcattctctttcctcatttattcacttgccacatcatttttcatcctaggtggcagtttatttaatgctatagatatcatcctagtcattgggttgagaatggcctaagaagccgcccaccgccttgaaaattgtttcaatttacccgagcaacatagttaagaagctatctgtaataacacgatgcgcaccttgagggaccggctaaaactaaatatggatttccacatgcggctgcctcttgctcacacccgcggccacgaccgtcatgctccacccagcgctcacgtgcacgagctctcgccggtggcctttgaggcttctgtcctcaatgggatgtgaagaagaagaaaagaaaacaagggggatgaggaaagaaaaggatttgacgaaaaacataacggtagtggcacaaatcaatttttctgcaaatttaaatgacatgaatttaatagacgaatagaagtggtatttatctaaacgagcatatttgtaatggcatatatccaattgtccctaactaataccagccagcaaacaaatctttttgcatgcatgtgactagcaaggctgagcttggccaagacaagagttacaagccagcctaattagtgacagcaaccaaacagatccataattactgtcgggttaattaagtttgtttttcctgatataaaaattgcgagcatcttacgccataatccacacaagcgttgcgagctcaccgccgctgctgagttgcttggcgtgggactccctgctgcatcggtggctaacgtagtggagcatctccacccacaccttgaacagaaattccacactggccccgtcgtatttgttgagctttttgactagaaggagggcaagcggcagagcattgagcgagaccttactggggtcccggtcggtgactcccagctgcttggcaaggctctgtgttttctggacggatgactagatcctaattttgttgatatctcggatggtttcactgtaaatagtgcgtagtgcaaggccaggtaccatgtagggacgttccagaactaggaacatcatgtagttggaaataagattgattgcttcaacatactcggtggtctctgccttgtcggaggtgcggaggtagatgtccgtcgcgatgtgccagataatgatttgctgctggatctcgtcgcgaactaacctcaagaacaagtcgtacatttctgccttgagcaaccccgtcgagtccaatgggatacccggttgccccgttggtgctgcatcttgatcatcttaatttatccttattatcgatctcgcaatccttattgtacgtcgacgtcgattcttattatatctagcaaatagctgaacacctgctccatgacacgatcaggaatgaccgtggtgccggagtaggtgttgtctttcttgcgccacttgacatgtatcttcttggcaaggtcgtaccagacgtccttggagccgtcgcgtgtgcagtactgcaacatgttgtgctgccagatggtgccggaccaccttctgctgtcctccgcattgacaagccagcggatccacgtgagcgcgcggccgacctggcgccatcgtccgctgcagaccgccgcgtggtacagccaaccccgcagcggcatgcggatcaagaaggcgtacgcccaggtcgacccggctgccatgagcagccaccatgtgtctacaaggacggcgccaaccagcaatgtgtaggtgatggccacgtcgactagcatagccccatgcccaagggcgccgtggaggctgagatggaacatcaccaaggcaccggcggtggccagcggcgaaaagacacggatgcagtagccatgccacgtgtggatgacgccagccttggtgtacatgatgtcgtacagcagggagagctccatctggaggacaacccacgtctctgtaaaatcaaaggtgtttttgattattattctgtgatgaacaattgggcattggagattattggttttgttatttggaatttattcacgaagtggttttggagatgattggatttacaggtgaatcgcagggttatcattttatgtggaccggtcagactgggctctggtagccggtcagaccggcgtgtaatgcgcggtcagaccggcgcagcccgcggtctgaccggccgacactgtatcggtttcggtttcgggttgtttatttggatatccaagtttatttcatgattatgacttctagatggatactatacgtatgtaatactattgtttgctgctaatgagtcaagttggagataacttagtctcggaatatagtttctttgtttgttccatgtgtaggtgactcgatgtctcaggagagtatttgcggtgatggaccgggagtcggcttggggataagacgacgtccgtggtggtcagagatcatgcgggatacttaggctatagttgatgcacgtggttgatggagattccatatggcatacaatgaagttattgtgtacgtataggatgcgtagttgaatttggaaggagttcaaatttggtacgattggttatgtaaagtttctttcttgtactagagggtttcctaaggtgtttaggactcctagtataagtttggttcgtggctttaggctgcctacctcatgtataaatagagggggagcgtgaggcttcccggtatcgctttagagagcaattgagttgagttttgagttagggtttcgagtttagtcaaaatttttgtaaggagtgctgttggtgcactttgtaaacacagagagaatcaataaagtcgtcatccactttaagagttattcgatttgtgtttaccgggtttcggcggtctaaccggcgatctaccggcggtcaggccatgtcacatcctgattttttgtttcaggatttataaattatttaataaattaataatataatttatattaaatgatctttaatttacaagtgaagttaaatgtgggaaataaaatttcctaaatataaagcatggatggatttaatttttattaaattctccatggttaattatactctctgaaattttctcagatttttcagagctcaattcttaaataatacaaagaacagttcagtaattatttgattctccatggttaattatactctctgaaattttctcggatttttcagagctcaattcttaaataatacaaagaacagttcagtaattatttgatcattaatgatctaattataattgttaagagcttttcttgtttaaaatccttaaattataaattgttgtttaaaaggaataattagaaatgattttaaaagcctaaaggagaagatctaattttaatttgctaaatctcaatataaaattgggctagataaaattttgttaaatactttgcttaattctataattcctagatttttctgggatttatttgagctaaggaagtatttttaataaatggaattgcatttaagaaataatttaaattgaaaaaggttttaaaaagtcttcttttggctttgggccgaaagccggcccaaaacctctcttctctctctcctcggcccagtccggcccagtccgccgagccgccgctctcctctctctctcgctgtcgctgacaggtggggcccgcttgtcggagccgtcttcctccttcggccgccgccgcccgcaaaccctagccgagccgcgccgccgtcgctttccaattccgtcgctcctttccatctccggccgaattgatagaggggaaatgatcctcttgattccctcttccttttctcttttggaatcgtcacctaattcggtttggaaactcgatggaatcgaggtcgaatcggattcttctctcctccgaaccctagctttccttcgccgtcgccggtcgccgtgggcctccatcgccgctcgctagcccctttaaaaggacccccgagctctcctctatccgccgccacctttgccttagcctgccgtcgcgtctagcgccgcctccgcgtagccctagtcgccgccgtcgttgccgtcggttcagccgcgtcgcgccgccgttgcagccgccgtcgtcagtcgccgtcgccgccatcgtggtcgtcaagtcgccgccgtcctcgtccgcttctccgccgccgcttcttcctcgtcgccggcgccgtccgttgcccttccgccgttgttttggtcaccggtgagttcgccgcgtcgccctctacccgttggtgccctccgttcgcgccgacgtgccgtcgttcgccggcgagcatgcgcgcccgagccgcccgagtcgccgccggtgctgacgtcatcgctgccgtcatcgctgacgtcatcgggatcgtccgccgtaagccggtcgtggaccgtttgatctcggccgtccgttttggatagggttgatctcggccgttcgtttccgtgagccgctgccgtgcacccggtccaccgcaaaccctagccgctgacgcaataatccttcttttccttttcaaaaataattcattatggcgtcataattcaattaaaatcaatataagtgttttaatccgatttaatctttaaaaattcataactaattcatttgaactcagtttaatgtggttcaagttgcaaaagttgtgtaaaataaagatctacattttaaaattgtccataaattgaattaaatttatttaattctttttaaatgggctttaaatagatttaatcttgtaaaattcataataaattcatttgaagtcagaatgaggccgttcaagtctcataaatcatctaaaattatgatctacatgtttgtttactttttatgtactgtttatttggtttttattagtctttttcttcattttgcgtgttagcttgtcgtttccgtcgttgcgaaggttcgcgagtgcgccggaagtattcaagaagattaattgaagaccgattattgcaaggcaagtcacacagatcctaaacacaatcctttgagcatgttgatcctatatttaaattctctatttatttcaactgtgcatttattttcgaatgtcattgggtggaattaacctattctttgttatggcccttttgttcttgattactttattccttgttaccttgggagattataatttgactagttgagctttatatattggttcagctagatattagaggtaattgctttgccatgcttagaaacattagcacacaattgggataactaatgtttcactatcacttatggttatatttaatggtagctcacgatggtcaattgtgattggttaattaattacttgtgattggttaattaattatttgccaactaaaactggataatggtgggttgtgagcacatggttttgagagtcgtgctcatgacaattaaggaccggttcgcgagctactattgtgaaacattaaccgtgccaaccacaaaccagcgtgggcaacggctttaccttttgtatagcatggttcactgcagagcaccaggttgagaagtggcggagataagcccacgggggtcgctggggagtccataccttgtttataagggggtgactatgatccgggaatggtgcactgtggtgagttgtgttgtgcagagggtattgtcacagcctctattcgggtactttccagtatcgcgacgcatggtagacatgatgttgaggctgtgtcttgtgggtacagtggtacacctctggccagagtaaaactattcgaatagccgtgcccgcggttatgggcgagttgagcaatgtttttcgtgattagtctcacacctctcacaataattatggatgttatacctggtaataatttgcttagctcctggtttggagttagatttgttcagccgggtatggttgtttagaatggttgggcctgtgcagcatgggcgtgttgttcagtgttgattaaaatttctgattaattactccactgttttacttcttttaaatgttttgctaaatgctgcttttgcaaatgagcctatattatgccatcctttggtatccttgtgcacttgcatatttgctgtgtggcttgctgagtatgtcatatgctcaccttgcaataatcaatcaacctcagttgaagaaaaaggatccagaaggagaagacgtttggattataccccagttgagctgcctgtgggagtggagctggagcttcgctagattttattttccgctgcagttttcttcttggtgaggactaagtgcctcataagtaagtatttatcgttctagttaatttgatgaatctgtatattaaattgtcagtttgtgtacctcggctgattcctggacgaggattttatgcacaaataagttcggaaattactagtgaatttccgggcgtgacaagttggtatcagagccatctcgactgtaggataagccaaatggtcaaaccttaaggactaattttccgaaaacatgatttgtgaaaatttctcctttcttccttatctagaattctttgcaaattgtttcattgtctactctcctctctcgttcaacttgagtagttctaaaactagtggttgaaactagaagatgctgatgtgggcaacttatggaggttaagtcaagtggatcgatgaataagaaggtgatggtcgatctgaagagccaagtggtcaagatggaatgaagtttggatcctatcttagaacctatgccgccaaagtgtctttgaagaatagttagtagggtagaacgtttgttgtttgcttgtgtgtaggtatggttgcattcccatcattggagtagttcaatgatgagtgtgtaactatactaggttgtttgcttaatcaacttgaacaatataatggtctacacacatcagatcagttttaacctggttaaggtcttgtctttagtgtaacccctctccttctatcttctctaatctgcaacagatggtgaacactcgcgcaagtggaagtggaaacaataacaatgaagataacccaactcttgctcaagttctggctcaacagactcagttaatgaacatgatgatacaacagatgcagaaccagctcaaccaaggaaataacaatgctccaccgccgcagaacaagttagctgattttcttcgtgtgaggccacctaccttttctagcacaaccaacccagtggaagcaggtgattggctgcacgctattgagaagaagttggaactgctccagtgcacggatcaggagaaagttgttttcgcttcacatcagttgcaaggacctgcatcagaatggtgggatcatttccggatgaacagagcagaaggacaaccaatcacttgggtggagttcacggaggcattcaagaagacacacatacctacaggagttgtttctttgaagaagcgtgagttcagggcattgaagcaaaaggatcaaaccgtggcagaatatcttcatgagttcaatcgtctggcacgttatgctccagaagatgtgcgtactgacgaggaaaggcaggagaagttcctggaaggtctgaaggatgaactatcagttacgttaatctcccatgactatgttgattttcagcagttggttgacaaagcaattcgacttgaagacaagaagaacaggatggataaccgtaaaaggaaaatgactgttttccaggaggcacaaggtagtagccagaggcagcgtatcaagccactccaaattggtgaatcctcttccgctggtcaaggacagtcgcagcagttgaacatcggtggtgagatcaaattagagactaatgaaagcaatgaacttaacatcgagcaagctaatcagtcggtgccagttcagcaggatcagtcgaataacagtagtggaagggagcagcaggtatgcttcaactgttacaagccaggccactttgctagagagtgtccgaagccgaagcatccgcagccacaaggtcaagtcaacaacattgtcgtcacaggagccaatgcagtgccagttgcgtcttcaagagttgtgtcttcaagtgttacaactcagccaccagtttcaaagcagcagtagttttctttaaagccttagaataattatcggagtgatggaataagatagactgcagtttgcctattccctttttctttctagccgttccgaatctcgggacgagattctttgtaaggggggtagtttgtcacatcctgattttttgtttcaggatttataaattatttaataaattaataatataatttatattaaatgatctttaatttacaagtgaagttaaatgtgggaaataaaatttcctaaatataaagcatggatggatttaatttttattaaattctccatggttaattatactctctgaaattttctcggatttttcagagctcaattcttaaataatacaaagaacagttcagtaattatttgattctccatggttaattatactctctgaaattttctcggatttttcagagctcaattcttaaataatacaaagaacagttcagtaattatttgatcattaatgatctaattataattgttaagagcttttctggtttaaaatccttaaattataaattgttgtttaaaaggaataattagaaatgattttaaaagcctaaaggagaagatctaatttaatttgctaaatctcaatataaaattgggctagataaaattttgttaaatactttgcttaattctataattcctagatttttctgggatttatttgagctaaaggagtatttttaataaatggaattgcattt

SEQ ID NO: 17694 - DNA, 1797 bp, Oryza sativa
gccatccttggtatccttgtgcacttgcatatttgctgtgtggcttgctgagtatgtcatatgctcaccttgcaataatcaatcaacctcagttgaagaaaaaggatccagaaggagaagacgtttggcttataccccagttgagctgcctgtgggagtggagctggagcttcgctagattttattttccgctgcagttttcttcttggtgaggactaagtgcctcataagtaagtatttatcgttctagttaatttgatgaatctgtatattaaattgtcagtttgtgtacctcggctgattcctggacgaggattttatgcacaaataagttcggaaattactagtgaatttccgggcgtgacaggccagcggcaagcggcggtcagaccgacagcatacaggcgggcagaccggcggcggcgacaggcgcagcaggcgatctcggcggtcagaccggtggcatccactcagtcagaccggcagatcaatctcggtcagaccgactttcttcgatttcgagggtaacttttatttccactaaaagttttcagtttttgggtataccaatcattcaccccccctctggttggcttagttcttgtgattcgatcctacaagtggtatcagagccttgttttcttctttggatttttaccgatctagagtttttgccatggctactcccgctaggttttcaactaagcctcatgttttcgatggaacggatttttctcattgatgtagtaggatgcaatcttatattatggctgaagattatgatatttggagaaaagtttctcatgcttatgtgattcctgaagctattaatactgctgctgaaaaaactgcttttgaacaaaattgcaaagctcgcaacattcttttgagtggtatttcttgttcggattatgatcgtgttgttcatcttcaaactgctcatgagatttggattgctttgagtaattttcatcaaggaacaaataacattaaagagcttcgtcgagatctttttaaaaaggagtacattaaatttgatatgaaacctggaaaagctttggatgactatctttctaggtttaataaaattttgagtgatcttagatctgttgattcttcttatgatgctaattatccacaatctgagatttctcatcactttttgaatggtctcgacatgtctatttgggagatgaaagttgcatctattcaggagtctgttaacatgtatactttgactttggattcactttatactaaattgaaaacacatgagatgaatgttctttctcgaaaagttgattctaaatcgagtgctttggtttcttcttcttcttctttggatattgatgcctcttcatctaagtcgtcttttcttgctgttattaatgccacatccgatgatcaactcgaacaaatcgaggaggaggatttggctttggttgctaacagaattgctcgagctatgaataatgccaggaacaggaaaagaggtggtccaaatcgttgctttgaatgtggttcaattgatcatcttcgttcgcattgtcctaagtttgagagaggcaaaaaagaagacaaagatggtgagaagaccaacaacaacaagtccaacaacaacaagtcgaagggttcttaccaagggaggaagatggagaatcttagaaaggcttttcaacaagtttggtatgggtattctattaatcctattaagccctagcccaggatgtcaaattggggttattaaatgatttcaaatggaaaagtcaccaaaaccaaagttgtagaactcatcga

SEQ ID NO: 17695 - DNA, 1901 bp, Oryza sativa
aatttaaattcaaactgttcaaaagaaatgttatatagaaaaatgaccaaactaaaagttgaaaatcttgataagttatacaactttattgttgacattttttccatttgaaatcatttactacccgtaaaattgttttgactcataaaatgaattattatactgcacttaattattttcctatagtcaacttacaaatataaacatttcatatgaaaaatataaaaatagtcatcggtgacgggctttagttaatgcccgatagagattaagtatatagcccgtcactaatgagtcatctgtgacgggcctgttgttatctcaaacgggcctcaagttatggcccgtcacggatgatggtcatccgtgacgtgccacaacttgaggccgagatatggaatgttatctcaatcgggcctaaactacggcccgtcattgataggtgtcattcatgacgggcttaagttttatgcccatctaacatgtctgtacgaccatatctcaatcgggcacttttcggcccgattgagatgactttcttatgacggcccgctatttctaagcagattagagcccatcacagatagaaggatctgtactagtgttaacaaatcataaattaccatcctactgtggtttgtcttaaaaaaccgacaagcacaacactaaaatccactataatatatatatgttgctttgaaagtatggtttctgttggcattaaattaactaagaatgtttatagtcaatctatgtatttatctaaccatgatcgatcaaacaggtacaaaatagccaaggacattagatcgggtctgctctacctacatcacgagtgcgacccacatatcctgcatagagacatcaaaccaggcaatgtactcttggatgaaaatttcaacgccaagctcgccgaatttggcctatcgaggatggcaaaccaagacaatgcaacgttgctgacaactgccataggctcggaagggtaccttgatccacagtgtctgaaacacggtaaggtcccgttcaagcgtagctcagacgtgtacagcttcggcatcgcccttctcgagatcgcctgcgcaaggaggcacagggagcaaatctgggacctataccgaagaggtggcaatgttgtcgaggcggcggatacaaggttaaccattggtggtggccttgatatgagagagatagagcgtgtcatcgtattggggctctggtgctctgctttggagactcaacaccgcccttctatgcggcaagctatggatgtcctggagcgtgacggaccgttgcctgcccttaacagcttgatcgtcgtcaacactactttggcatcaacgacagaggaagacgcctccagtgcgccggcggcgggcaatcgctatgactgtgatgaggcaccactgctgattgaagggtagcagggtgagccatgcatgaccttaactgctggacaatatctcgtaagcaagcacgcatgcatgcttggttcttacaagagctgctgatcgagtgctgagtgcaaattctcatgttgtcactttattatgtaattgccttctttttttaaaaaagaaaaacttgcacggggaggctctttatggcacgagggagcaacggggaggccggggagtggctgttttggggcggcaacggccggcgacgtgggcgacatcttgggcgaaatggagctccatcccggcgtgatttttgggggaaacgtgaggagagtgtggaggaggtggaggggttgcggttgctctcggtttggatgcgagcgcgcgagtgagaggttgtgaaaacggcggcgtcgtgggcggcatggcggcatggcgtggttgggcttgggatggctggggattggggatggcacgtggggcccatgggtcccacctgtc

SEQ ID NO: 17696 - DNA, 1369 bp, Oryza sativa
agtgcctgcgaccaaggtctcgaagagcggagaaagcgatgctaagactaaaaagattcccctagatccttctgatcccactaaaactgctgtaataggcgccgagttagattgtaaataggaaagcgcgctcgtcacctttcttcaaaataataaagatatctttgcgtggaaaccatctgatatgcctgatattcctagagaggtgattgagcactccttgcacgtcaaagaagacgctaaacctattaaacaacgactccgccgcttcgcacaagacaagaaggatgcgatcaaggaggtattaaccaagctgttagcagcaggcttcattaaagaagtcctttatcccgactggctggctaacccggtcctagttcggaagaaaactgggcaatgacgtatgtgtgtcgattataccgacctcaacaagtcttgccctaaagatccttttgggttgcctcgcattgaccaggtagtcgattcgaccgccggctgcgagctactcagttttttggattgctactcggggtatcatcagatccgactgaaggaatccgactgcttgaagacttcattcatcacgcccttcggggcctattgctacatcaccatgccattcggactaaaaaatgcaggagcaacttatcaacgcatgattcagagatgcttctcgacgcaaattggccgcaatgtcgaagcttacgtggatgatgtagttgtcaagactaagcagaaggatgatttaatctcggacctagaagaaaccttcgcaagcatccgcgctttcaggatgaaactaaaccctgaaaagtgcaccttcggagtaccgtcagggaagctgcttggttttatggtgtctcatagaggcatacaagccaacccggagaaagtcaacgctatcctcaacatgaaaccgccaagctcccagaaagacgtccagaagctgactggatgcatggcggcgctcagccgattcgtttcacgacttggcgagcgggggatgcccttcttcaagatattaaagaaaacagacaatttccagtggggacccgaagcacagaaggctttcgaagacttcaagaaactcctcaccgagccaccagtcttagcctcgccacacctacaggagccgttgctactatacgtatcagccacctcccaggttgtgagtacagtcttggtcgtcgaacgtgaggaagaagcccatgtccaaaaagtccagcgaccgatctactttgtcagcgaggtcctagccgactccaaaacgagatatcctcaggttcagaagctgttatacggtattctgattactaccaggaaattatcccactacttccacggtcactcggtaacggtggttacatcg

SEQ ID NO: 17697 - DNA, 2334 bp, Oryza sativa
acgcagcctgtacgaaggtgccctcaaagcactgaacgaaattaagggcaaccaattacaatcttctgttaataacagcgtggaaggaaagaagaatctcgcccaactcctaatagacaaggagaaacagcccaaacccatgaggccgatgaatatcagcaactggaggccaggatatagtacccacaagtcgaggccagaactcgcaagtgctcttttcgaccagaatataattctctctgacggaactagcttcgccttggcgctgctaagtcgggtaatgaaaatcccaggagaaaagtccaacattacgacgcccaaaaccttcagctccgaatcccctggcttcgataggtataaaagacttaagcagttgattcctgaactgaaaaaatgggacaaggaggacttctctatgtcggaaatgctggaacatatcttcatggcatgggtgcgtcttctgatgtttgcgtcggtccgatgcacaagggattcccatgccaagcagctcgcctgtggcggcgagctcacaaccatcctctggatcctcaatgaacatgctggcgtatttcgcattgatcacagggatggcaaaaagaaaaagcctgaagagttcttttcctactaacatgctggcgtatcatatttcgtatttcgtactagtgtatttttaactgcagcaaattgtttaggactccatctcgatattttgttttccagtgtaactcactttgtatttgcagcgttatcaatgtatgcacaaggaattaccgtgccgggagcccgggacaaaagtttctgtaagattaatgaaatttcgaatggatgcaaaggttagttaattaaaacaagtaattagcaaagttttaaacgtgaacaattacattacttagacttcgataatcgcaagctatagatgtgaaatatatatatctgaggaagaagaaattcaatattagcagctttaattagtatggacatttaatttttcagcgaaaagtagccatatatagttgaacgaaactacatttggtggcactctgccaaatcaacatttctttttcatgtattcttgaagttgccagctgattgggccgacttcgatctgggatccttggaaatttaacagaaaagttgccatatatagttgaacgaaactagcttttggcgcatgttattagttaacaacatttacccgctgccgtcacatgcaggcacattgagcaagtcacgaggtactatctccgtcagccgccaaagacttggtttatctgccgtcgttttctcaatttcatgcgttactatctccgtcaatatacccccgctccgccccaaaataaaacagaacattttatttttaaaaaagtggatacttgtaaattgtattatttaatattatgcctgtcaaatcatttgattcatataggaaagtattttcgtgatgctaattttgttgttgttgataatatataatgcaagaaactaaagttcactataatattacatacgttagggtcgtcgtcgtcctccgtcgacttcgctaatttgattcgcatgaatttactacaaatgaatattagtatgatattttatgtgtatggatggaaatatatatgcttgtctaggccagatcttattatttagttttagatgtactccctccgggttgataatacttttcgttgataatacttttcgttttggacaagagcacggtctccaaaaataacttttacaactattttctattataatttatattgaaatatcaataaatatgtgattttattgaagtactttttaagactaatctatacatatagttttcatatttgcaagataaatattttaaaaattatttatagttaaagattttaaagtttgactttacccttattcaaaacgactaatattatcagtccgaagggagtatatataggggtataatcacttaatcaggaaacgagggttaaagactaatattggcagcccatttttgaccgaagaaatcgtatggccgccgaaaacattatgttttcttgtagtggtttcagctggatggcaaatgctgtttaatttacacccgatgtgttatcgagttccttatcattcaatttgagctctgttctgtaggtactctcgtcttcttcctcaccttgttttggcggcatcgcgcttccaacatcacctgccgagcatcgtctggctgacaaaatattttccagctgtgggattgtctagttttcagctacatgaaaatgtacacatattgacttttaaatggctaggaatacaccaagattcgtgcactacagtaaaaatcgatgctcgaga

SEQ ID NO: 17698 - DNA, 605 bp, Oryza sativa
agctccttgcggtggtcttagaaacctgccggggggtcgccatcgtccttcttcttcgacgtgctttgtttttcgtcggagttcttccgtgtagtcttggtgtattgttccgcgaactgcttgtagacgaaacaatctttggccgcgtggttggacttaggatgatgcgggcattgggagttcatgatcttgtcgaacgtgttgacgcgcgaacgctttgatgatcttccaccccctcccgtagccggtgtatccttttttggcttccaactggagcccgactgctttgatgcgatgacggcgtcttcagccttggcgtactcgttggctttttcaaacataagtttgactgttttgggaggcttacgcccgaacttgccgaccaattcttcgtggcgaattcctttggtgaatgcggcgatgataacatcgtcggtgatgtcagagatcttgttgcattgttcagaaaatcgccggatgtaatctcgaagagattctccggacttctgaataacattgtaaagatcgaattgtgtgccggggcgctcgaaagtgccttggaagttggcgatgaagtggtcgcgtaattcggcccaagatccgat

SEQ ID NO: 17699 - DNA, 623 bp, Oryza sativa
gtctttggttaccacctggaaatactgggttgttaaccatccttctcttgcagttcgtcatccgattatgctcactttcgagttgcatggctttgtccacaagtttctcaaaatcttcataatcctctagaagtagttgcactgcaagctcatcttttaacccctggagaaacttctcttgtttgtcttcatccgtttccacatcttctggtgcatattgagccaaacgatagaactcgtgcaggtactctgtgacggtcaaatctccttgcttcaggtagcggaactctcgttttcttagtgtgatcattcctgcgggaacatgtgatctcttgaatacagatgaaaactcgttccaggtgatggtatgtccttctggccgtgatgcttcgtagctatcccaccactctgaagccggtccaaccaactgatgagttgcgaagccaacccgctcctggtcggtgcactgaatcaaccctagcttcttctcgactgtgcgcaaccaatcactggcttccataggatcgacggccatggcaaaggttggaggccccgttttgagaaattctgataacttgcactgttgctggactgtaggtacttgaacgttggttgcccctgct

SEQ ID NO: 17700 - DNA, 802 bp, Oryza sativa
taccgccatagtacctcctaggcatcttgccaaacactcgggaagtatttcttcaagtatttcccgttgattgcccgctgaaaacgctccccttgaagtgtctccaaaaagtatgcgttccctcgaacaatgccgcacactcgataaggaccttcccaactaggagaccgcttaccgaactccttggatcgagtacccaaaggcaaaattgtcttccaaaccaagtctccaacttgaaacaattttgctttcaccctcttcttgtacgccttggccaccctcttcttctctttttctatctcttccaatgccttcaagcgcttgtcgatgacttcatcaaggttgtctcccatcaacatcttgtaatattcacttgacaaatcatcttgcttgatataatgaagagaaccaagatttacctccactggtaaaacggcttctcgaccataaaccaactcaaaaggagtgactttagtggcaccatgtttagatattctatgcgcccacaatgcttcagaaagcacgtcatgccacctcttcgggtgttcctcaatcttcttttttactagctttaacaatgttttattagtcgactcggcttgtccattagcctgagcgtagtaaggagaagaactcaacaatttaatgccataagatttggtaaaactcttcacttccttagacataaaagaagcaccttggtccgtagttaatgtttgcggaatactgaacctatgaataatatgctttaaaataaaatcaattacctccgtatgagtcatattcttcaaaggcacggctt

SEQ ID NO: 17701 - DNA, 3572 bp, Oryza sativa
ctaatgctgatgataccaccaacaaccatggttcttgccccattcatgaccacttagatcaagcgtgcaatgtcaacatcattcaccaagatatcgacgatagtatcaatgaaggcacccagaatgacaaccctagcaattttgactctgggaaggactccaatggtgatagcaataatggtaccactgatgccaatgttagcaaggattcccaaccaccaattccaactccaagtcaaaatgatcgtccccagatggacagctcagtaaagaagacgttgatttgttacaactgcaaagaaccaggtcatttctctagagattgtccacagccgaagcgtaacctgcgccatcactccggccattatgcaagaagaagacaagtcactcgccttgtggtcactggagcaaacgccgtacctgtgaggcctcatgttaattctaacccatagtagatacaatgtaccgatgttaagcaccgtccctttttgtttaaggcagtgccccgtattcatgtaatgagggagaaatgtgtaatacagacaagttccatgaggattcgtttgaaagatgcggatatgtgatcatgtgtataattggttactgacaaaggagacctagggtctcgtgtcagaggaactatattctaacctcgagttaatagccaacctgtggatggaaaagaaaaacaattaaactgtgttgggttaaaaagccaacgagacagtagttgaggataggagtttggatacgccttttacagatcaagataaggattgttggaggaaaccccgaagggtacccgccatacctctacattgataagatcggatatacctgccaacagataaggagatccaggagacatcaatatttgagaacataatagtcgatggttggtaattagtttatctggtatcagaaaaaggtcaaaggtgatgtggcagaagaacaatttggatgctccccatctcgaggaagcactaaagatgaccatcggcaattaaaccctagtggtatagatacagatagcaggcaatgtatttccctgaaggtagtcagtgcagcttttgacgagccacatcaaggtttcactgaaaggcagcaagccaaaggacctcatcatccccagaagcgtccgcaatccacattcaagaataccacctgttagagataagccgaaagatgattgataaaagagattggcaaagatgttctctagcatgaaagaagtaggccgaaaggtgattgataaacagaaacatgctctgcatcgctcaaggaagacccctgattgtaattgccccgcaacagtcaccttgtcattaagtaagcaagatgacctaggtaaaagtgtttctatgaaggcaaggagtgaaatcttcaactcggtatcagatgctacacgaagtgaaaagtgcaagcaccggttaccaggtaatgccaagtcttgggagatgatccaatgggaaagaacacatcaaggttaaaagtgtaaaggaatacgttgaatgctaactgaggacaacctgaagataataatgggaagtaaactgaatgtaaagaaagtgaatccgagctgcttgttcgtgagagccattcccagttatagaaccagtgatatgttcgaagatagtctatagaggtcagattaaaatcacctctcacaacgaagcctcagatttgacagggtaatgattagacaataacaaatccagcagtaaagccatttgggaagacgtcaaagtataacaagtaggataagttggctctcttgggaagcataattcaaaggtaaagttatcgacccttgcatcaaatagcagaagtagctatcacccggagaccaggaaagctaatatgagacagttgatggcgagttagaagcaaatgacaagcatggtatcctagtaatgacaagcaggttacgacgcatgacatgaagttgataacttgtccgaggttgactccgaagatatgaatcatgagaagttctggaacggaagcatcactgaactaccgcaacttagtctgagtcagccaaaaggtgcaccctggtccaagtcaggtgaagagaagattccatccgcaacaggaggtcaagccaagcagttccgagtggtaaagttttgctggaagttcgtcaagacgcaacggaagaagtcagacaagaagagaagaccgcccaacctatcttcttgctagcctcctcgaatctcggggacgagattcttgtaaggggggtggatttgtcacgtcctgataaattcatcccgaaataaaaatcattttctaaaaggaataatagaattaattaaaattcgaaaagaaattggcaaacactaaaatacgtacaagaaaaattcgaatgtggcccggagaatttttgttaaattctccttggtctaaaaggagccctcaaattttacttgaattttcagagcaccggaaataattattaagcaacaaaaacaattattagagtttattaaaaagaaaaacctaaaaataaatcctcttcctcctttgggccaagcccagcccaaagtctccctctcctccctctctttctctccctctccttctctccctcctcctcttgggcctcatcccctcctggcccagctccctcccttcccctcggcacagctccctcctccctctctctccgggctgcctctcccccccctcccctcccggcctgcccggcccaggccgcctccccctcctcttctcctgggccggccgcccggcccaacccgagcggcgccctcccgcccgtgccgcgcacgtgcgcgcgcgtgcgcgccgttgccgcgcgctgaccgcgcgcccgaccgcgtggggcccacgcgccaggcgcgtcgtcttcctcccgcccggcttctctctctcccgtgcgaaccctagctcgctccctcctccaaatccgcttgattcaattggccaattccaaaattaattggggggttttaatccccattgaatcctcttcaattgcccccaaattcccccttgattcgtgccttcaatccccgggaacggacgcgccaagtccggccgctttccatggccgtcggccgttattcccgtcgccgttccgccctctcccgagcccggctcccgcccccaccctataaaatgggatcccctcactccgttctatcgttttaaccccatcccgagcctccccgtggtccctagccctctccccgccgccctcctcctctctctcccacgccgccggccgcctccagccgcctgtgccgcctcgaccgtgcgccggccggtcgcgccgtcgcctcctccagcgtcgccgccacctcctccaccccggcctgccctccgtttcgcgcggtgaccgccggaggcgcgttcccgccgtcgcccttctctttcctccgcgccggccgcctccagccgcctctccctcctcgccggagcgccgtccggccgcgccgtcttctccctcggcctcgcagccacctcctctccctcggtcagccctccgtttcgcggggaaagcaccggagacgcgtcctcgccggcaaaacagtggcgttgtcgccact

SEQ ID NO: 17702 - DNA, 1432 bp, Oryza sativa
ttcaactgagagggaccttgagccaaaagtatttttctatgcccttcaagacctcaaacaaaggatggcatgccaactggttttatgtccaaaatcccgagcccgctcttcccgagtactcctgtcttcccctagtataccaagataattggaactcactgcccatgggagatgaagctgcccaagccttagaactgatggagcgcatgctgaagctcaaggagcaaggcttgcagggagagcaaatcactcggcatttcattaagtgccgattagctccaatcaaagagagatcccgcacagctttcgagtttgatggtaaacatgatccaaaccgtgaagacccagattctctggacttaagatcatgaaggagaggatgtacaagatattctcaaacgccatcgttgtcagttatttgcatctgctgccagtcgtgccatataatgcattcaacccatctccgctggtatgtatcagaactcttcaaaccgcgaccaaaacataattttgtcttcttgttgaattaacagaccgtggaggcatttcattcaggaatttgctttgatgaagtctgaccccccaattgctcaacgccgatctcctcgtcatcagaccgttcaggggagtggaggaccaaaaatcaggtcagactcccaatccaaaactcccaatccgactgggcaatcagattctcgcaagagaaaacttgtgctaagcgacgacgaaggcgacgacaataataaatttggggataagggatcacccaaaaaactaccaaagcacactgctccgaagaagaaaaagttcagaaaatcctccaggtataaaccattcggtaccatctcacttcgacatgcttctctcatgaagataatattgaaaactggaagaaaacttgcaggaaaccgtctgacatagatccatccgggaaggactctgatccagctaacacagagacaggttcatccaaagaagctgggccgacttctgaggaccacccgactggcgttcagacttcaactgattatgtcaacccaagcgaccagcccccgactggaaaccagttggcagaagcggaaactgcaacaagccaagagcccccgactggcaatcaatcggaagtaggtccagatcaagaaattcctgaagttgaagttcaggctacaacttcccaaggactggacgctggtaacgacccaacgcctgggtccccagataaagggcaaggatcgcctcacgctcaaccggaaattgcttcaggtaacccatcttctcaagtaatgccaatctgaataactccgacttgcttgtctaatgtttgggaatacatcaggaccactaggcggtgacggagaagaaatccctcgcataaaggcaactactgattctcgtccccccatcttaatcaaatggtgggacgacaacttgc

SEQ ID NO: 17703 - DNA, 7888 bp, Oryza sativa
ctcgaaaaagtagggggactcacacgcaagaaatcttgccaacttgttttggggaggtgggggtggattctggttttgattatttgcctgctgattctgtgcctgctgcactaacagattgatcagttgtgtttgttgagccaaaatctgagctagcgttgggttctcttcattgttattggctccacttccacttccacttccagtgccagtgcgcgtgttcaccatctgacgacaagcagagacaacaaggaaagaacgacagagagacacccttagaacggagttattcaattaatttaaattctatattgctcttaactgtgtatgattacatttaagttgcattaacactacctcaccaactttcttacactctgacaagcaaaagaactagactcatgctgttacatcccacccatgatgtaagcaacaactaaaacccacacactcacaaacaaacttaagcaagcaatctaacacagcgaactacggcaacgatctaactaagcgactaattccgccttgcgtcggaacgaagcgatgaatcttcttcctctggagtagctggctctctttcttcaggatcttcctcttcttcctcatcactaatgatgtcgatgacaggctcaacacgatcgggcacagcttcacccatcacgcgaatcttcgaagctaactggagacgagggggcggacaggttctctttcttgcagtgaggcgaagctaggatgttggcggcggcgtttctcctttaagttcagctaattccttctgtaggcggtacaccttgctcttcaacttgcaaatcttgcctcgattccagttttccctgtcatgagctgctttgtctcgctccacacttactgcatccatagcactaagcatatgcaccgcatgcatcagagtggcactctcttcaccatcaggacaggtataggttccatagtcttgaccatgaggcttgtggggatgatactggaaagctgatgaatccaattcttcttcaaagtgttgacgcaactctccaatggccaccaaagctgcttcttgacaagcatggcagtacgatcttcctccagcttcgaacttaaaagacggaaggtcttcactatcactagccaacgtcacacgaacacgacatttctcctcgtcggggtcatgggaaatctggcgatactcgggagcaacttcataacctacttcaaaagccatcaacctcagctccctgacgaatcctaacacctcgatcaaatttcttggtgaatggcgaggcatctaaagaaacatagaagagaagaattattgcatatttttctaagttagctgcaccaactagacttaactgattttgaccaaagaggaaggaattaaaagagaagacacatacaaaaaccattttataaatatattttttttagaatttaactttttggacagagacaagtatatttttttttgacaaataactaaaataaaactaaaatacttatgatctattataagcacggtacagtgtcaccataaggaagatgagtagtactagtgctaacatgattaaatcgataccataataaatgtacagtgccgactaatcaatgaaatttggtaaagagaaagaaagaaacattttgagaagagcaaccttttgcttttaaaagaaaagaaattgagtttcaataaattttgtgcataaccttgcatgtgctgccaacttaattaatttgtaagagaatagagaagagcagttctatttttttcaaaaatattttgaaggctacttaaggtttaccatttagcttatcctaaagtcaaggtggctctgataccaacttgtcacgcccagaatttctatccaaaattccaaacgcttacatgtgtgttaagccctcgtccaggaatcaaccgaggcacacaatgacaatattgataatagagtacaaatatttaactatggaatattcgaaaataataaattattacagaggtggatagttcctctcaaacaaaaataacattctacgcagcggaaaataaaactatggcaaactacggaacagcgatggcgactctactccgcaggcaacttaaccaagaacaggcctagtcctccagatcatcaccttcactgaagtactcctcttctgatgaatgaatattgcaagaatgagcatataacatactcaacaagccacacagcaaatatgcaagtgcacaggataacaaaggatggcataatatagctcatttgcagaaaacagcatttaataaatatttaagagaatagtaaaacagttgaataattaatcaatattaaataaacaccatacaacacacccgtgttgcataggcccaaccacatttgaacaaccaaccccaattgaacaaattaaacctccaaaccaggaattagccattccagaccaggaattaaatcaattacaccttttcaccaataatgagtagtgtgagactaatcacgaaaaacattgctcaactcacccataaccgcgggtacggctattcgaatagttttaaactctgatcagaggtgtaccactgtacccacaagacacaaccccacatcatgtcaccatgtgcctcagtaccaccacgatacctcggaaaggagtcgtgacaatacccctcgcataacacaattcaccacagtgcaccgtacctggatcataatcacccccttataaacaaggcatggactccccagcgacccccatggacttctcgccacttctcagtctggcgcactataatgaatcacgctatacaaaagataaagccgttgcccacgctggcttgtggttggcacgataaatgtttcacaacagtagctcgcgaaccggtccttaattgtcatgagcacaaccatcaaaaccatatgctcacaacccaccttaaccaggttttaattatcaattaattaacatcacacgatttaccatcgtgagctaccattaaatgtaaccataattaataataataatgtaacatagtttataattaatcccctttagttagctaatgtttctaagcatagctaagcaaacttacatatagcatttagctgaaccaatccaatatataaggttcaagctaatcaatttattacccaaggtatcaaggaatagggcattcaatgcaaattggctataacaaaggagtaggttcacaccacccggtgacattcgaaaataaatgcacagttgaaataaatagagaatttaaatataggatcaacatgctcaaagggttgtggttaggatctgtgtgacttgccttgggcttccacaaacgcttcggaaccttcctcaacggaaacgctctcctccggaacgtcggaaactaaagcaaataaacaaaatcaacaaaacagtacaaaaacaagcataaacagtacatgtggatatttttaacatgtagatcttgattttagaaaagtttagaaacttgaaccacctaaaacggatctacggttatttagttatgattttccgaagttttaatctattagaaaatcgagaaaaaggaaaaagagagagagatgacgtcagccctaaggatgatgacgtcagcccttgcgatgacgtcggcatgacgtcagcacgacggccggctcgggtcgacgagctcgccggcgttagggaggttggcggcggaaacggagaccatctacacgtagaggacaacgagacgaacccgttggtactcaccacgacgagaaacgatgcacgacggcggccggcgacgagaaggaagacggcggcggctcgggtcgacggcgacgagcgagctccggtggtcggcggcaggaaagaaggggcggccgagcttccttgcaccacggcgcacctcttggcgatgacggcaagcgacggcgacggcggagacggcgcggcggcgttgccgaagacggccggcgacggcggcggacttggagagcgtcgcggcggcgctaggaggcacgggaggactcgggagagggggcaaacggaagaggagatcaaggggaagctttatatgagctcggattgaagagatcgagctccaaacgggaggaatcgaatcgggaagaaatcgaactcggttttagggataaaagcaaaacgaactcgattcggacccaatcctcaacgattctctttgattattgggggaaaagaaagaggagaacgagaggaacaaaacccctcaaaatcccaaaggaattgggctcggatttgggcggaatcggagcgggaagcggcggctagggttcgggctcgcgcggcggcggccggaggtcggggacggacttgacaggtgggccccacctgtcggcctccgtgagagaggggcgggcggcggcggcttgggccggcgtgggccgcgcgcggggagagagagaaaagggagagttgggccgaaaacggcccaacggcctaagagggggatttttgaactttttcgaataaaacaatttgtgaaatgttgtttcaattattaaaaatacttcccttactcaaataattcccagaaaattctagaacatagaggagcaagcatagtatttaataaaattttatctagctcatttttatgttgaaaattttcctagaaaattagggtttagcttgtaggcttttaaaataatttctaaaaattccaattaaaccacaatttatatatttaagatttttagggtgtgacatacacgaagccaaagaacttgctaaaaagacagagcatgaactaagggaccggattacccaactccaggattcaaactttgaactgagtggctcatcaaaaggtaacctcaagatctgccccattaatttgtgttgttataatcgtatcctcaactatctggaatcaaaacagtgcaagctgccaagatagctcaactggagaaacgaattcaggccttagaaagtgtcacgtcctgataaattcatcccaaaataaaaatcatcttctaaaaggaataatagaattaattaaaattcgaaaagaaattggcaaacactaaaatacgtacaagaaaaattcaaatatggcccggagaatttttgttaaattctccttggtctaaaaggagccctcaaattttagtggaattttcagagcacaaataataattgaaaagaaataaacaaagttgaaaaggtttataaaaagaaaatcctaaaagaagtcttttccccctcctcctcccttcttgggccggctcggcccattccctccctctctctctctctttccccccggcccatcggctcctcccccgtgcgcgcgccgctgacaggcgggcccgcccgccgctctcgctgacgggtggggcccacctgtcatcgccttcctcccgccgcgcccgccgcccgcccgtgccctagcgccgccgccgccgctgaatccgccgcatcccgctttccccgcgcgccttaatgaggggggaattactccccgcgtttccctctcccgattcccccccttttccctctctctctccctcggattcgtccggattcatcccgcgaagttcgccggcgtcttcaatggcggccgaaatccccgcggccggtttccttcctcctcggccgccttctctcccttccgacgctataaaatcgttgcccgagctccgctcttccgtttccgccgctcgccgctcgctctcgccgtcgatttcgtgcccgcgccgtgctccgctctctccgccatcgccgccgagctccgttccgccgccgccgccgctccggacttcctccttactcggcgacacctccgtccgcttcgccgagtggtcgccgaccccgtccgccgctccgcttcgcccgtcgaccgccggagcaccgtcgtcatcgtcatcccgagccgcgccgccgtcttcctccgctctgtccgccgtttccaccgccttcgccgtcttggggtgagccgtggaccgctccgttcgtttcccccttccctcctctctctcgggtgccgctccgccgcgccgttggtcgccggcggcgaccatcggggcgcgggcgcgccgctcccgtcggccgtgccggcgaggccgccttcgggcgcgccctcgcggctgccaagtgggcccggccgtcagccgcccgcgcccgcgggtgcggctgacgcgcgggacccacggcgccgaccgccgccagccgcgtgcgcccggtccaccgtggaccgtggggctgacgcgtgggccccacttcccgtggacccggtccgcgcgcccgctcccccggctgacgcaataaataggattttttaattgaaaattaaatgaagaaattcgcaaatatccatttaaagagcatataaacttcaaatggccatatcttggccatttgaactcggaattggaccgttcaagtctctaatttttccttaagaagtcaagaacccatttttgtgctttgtttctgctgttatgtggagtttagtagtgtaaaagcccttttcttttccgttggtcgtgtagacgctgcagcttcggaagatccgcttttcgtggaagtcgaagccggcgtttgggaaagcgagcaaggcaagtcacatcatccttgagcatattgaaatcccagtttacaaaattattttaatttaaattaatgcattatcgctttatttaaattcccgcgttatcactgttttatttagccatgcctatttacctttgttatgaccttacttttattgttattgttattattaccttgttcaccctagaataaacaaaaccccaactagtgggtactctattcctggttccactagtatgaatttaggtagatgcttcgctgattaattaggcaaccttaggtggttttacaactttagactttgggaattctcatatcatttggacactatggaatggttggcttatgttggaattggacacacacctctcttcctctttcaaaacccctaaaacctgtttttggtggggtttgggtgcatgccagttgtgggaagtagcaccccggccactataaggattaagctcgggcctctgttgcaaagcactaccgtacttccacatgtctaatgggtaaggcttagtttgtggctcagtctaatcataaacaaaagtacacggattggagatggatgaagtcgggtgtcgatggacatactccaggacaaatgaaggctacacgagctgcggcccggtagtcgagatgtcatacggcagagggttggtgccctgctgctaggggctcagttctgcctgcctgtcccgggtatcccggccgtaggtgggattgggtcggtactcttgtttatggctaggatgggttgggaactatgtcacgtcttccgtccgtataccgtggtggtatgtggcacgtgtttgcacgtgaggaagatgtgtcttgtgggtaaagatgtacacctctgatcagagtaaatctattcgaatagccgagccctcggatatgggcaagcctagcaatgtacccaagtcagtgttttaattcttaaaatttgctcaacaactaaaatatggaatggttggcctgggttggcttgggacgagctgggacccaggtcgggttgccagttcggtccaaatcatcgtaggccttgggttaaggcaggttcgtgagggttcacggccttgtttaataatactgtgtagctctaggatcgtctttataaaatggctttgggcaactaagtgacttttaaatgctgtttactgcaaaccttaaaccctatattattatccccttgtactcctttgcattaattgtgcatctccggtgtggcttgctgagtactgtggttgtactcattcttgctcaatccttcccctcttcagtaagagaagctttggagaagatgtcttaggtggagtcctggcttataccc

SEQ ID NO: 17704 - DNA, 3126 bp, Oryza sativa
aaacgaactcgattcggacccaatcctcaacgattctctttgattcttgggggaaaagaaagaggagaacgagaggaacaaaacccctcaaaatcccaaaggaattgggctcggatttgggcgcaatcggagcgggaagcggcggctagggttcgggttcgcgcggcggcggccggaggtcggggacggacctgacaggtgggccccacctgtcggcctccgtgagagaggggcgggcggcggcggcttgggccggcgtgggccgcgcgtggggagagagagaaaagggagagttgggccgaaaacggcccaacggcctaagagggggatttttgaactttttcgaataaaacaatttgtgaaatgttgtttcaattattaaaaatacttcccttactcaaataattcccagaaaattctagaaaatagaggagcaagcatagtatttaataaaattttatctagctcatttttatgttgaaaattttcctagaaaattagggtttagcttgtaggcttttaaaataatttctaaaaattccaattaaaccacaatttatatatttaagatttttagggtgtgacaaacctaccccccttaaacagaatctcgtcctcgagattcagaagaactagcgaacagatgaggatgagctgacttcaattcatcttctcgctcccaagtggcttcttcttccgaatgattactccattgaaccttgcagaaccgtataacacgattcctggttttcctctcacttacttccaaaattctaactggcttctcaacataagttaaatcttcttgaagctctatacgatcaggatctgcttcctccgtaggtactcgtaaacatttcttcaactgagacacatggaacacgtcatgtattcccgccattgacggaggcaactctaactgataagctacttcacctcttcgactcacgatcttaaaaggtcctacaaaacgcggtgctaatttccctttggtttggaaacgatgaacacctcgtaacggcgtgacccgaaggtatacataatctccttcttcgaaaaccaaatctctgcgacgattgtcggcatagctcttctgacgcgactgggcaacgcgcaacctttcttggataatcttcactttttcttccgcctctcgcaatatgtcagtcccaaaaacttgacgttcaccggtttgatcccaaaggagcggcgtacggcactttcgaccatataatgcttcattcggagacatttgcaaactagcttgataactatggttatatgagaattccgcatacggcaaattcttatcccaacttccaccaaaatctagaacacaagctctcaacatatcttctaaaatttggtttactctttccgtctgaccatctgtttgagggtgataagcagtactgaaattcaaacgggtacccaattctgattgtaacttctgccaaaacttcgaagtaaactggcttcctctatctgacactatcttcttaggaacaccatgcaaacataccactctggccatgtataactctgcaagcttattccccgtgtaagttgttttgaccggtatgaaatgagcgactttggtcaacctatcaaccactacccaaatagaatcatgtcctgccgacgttctgggtagaccggttataaaatccattcctatttcttcccacttccactctggaatcttcaatggttgtaacagaccggctggcttctgatgttctgctttgacccgctgacatacatcacatagagccacatattctgctatctcacgtcgcatactggcccaccagaattgtagctttaagtcttgatacatcttagtgcttccagggtgaatggaatacaaagtttcatgtgcttctttcatgatagtatccttcaactccttattctctgggacacaaattctttctcctaaccacacagttccttgctcatcttctacaaaaccgatggctttaccccttctcatgttcttctttatttcctggatatcaggatcattcacttgagcttctctaacttgatcaaacagagtaggtttagcttctaatgcggccacaaaacctttactgactattcccaagttcaacttttcaaattcttggcacaactcccaaggtaaacgttgaccttctgacatattacagtagcttttcctgctaagagcatcggctacaacatttgccttccccgggtgataatggatttccatatcatagtctttaatcaactctaaccatcttcgctgacgcatattcaaatcaggttgagtgaaaatgtacttcaaacttttatgatccgtatatatttctgtacggttaccgaaaagataatgacgccaaatcttcaatgcatgcaccacagctgccaactctaggtcatgcgttgggtagttattctcatgaggacgcaattgcctagatgcataagcaaccacctttccttcttgcatcaacacacaacccaaaccgagtcgggatgcatcacaatacacttggaaacctttcctcgaatcaggcaaaattaacacaggcgcagtcactagccttttcttcagtacttggaaacttcgttcacaatcctccgtccacttgtacttcacttccttctgaagtagacgagtcattggtctggcgatctttgaaaagttctcaataaacctgcggtaatactgtcacgtcccaaaacgactctaaaatacatcctcgaaattatgcaaagaataagtaaaatccatgtgaaagcctccaacaattaaaatgtgcaaatgtaaaagtcaaataaggcttggaggatttttgtatatttcctaaaagcctaaaatgcgtaaataaattttagtggaattttcagagcacaaataataattgagaagaaataaacaaagttaaaaaggttttataaaaagaaaatccctaaaagaagtcctctttcccccccttcctctcttgggccggctcggcccaactctccctccctctctctcctctcccccgcggcccatcggccttcccccgcgcgcgcgccgctgacaggtgggcccgccccgccaccctcgctgacgggtggggacccacctgtcatcgcctacctcgcgcc

SEQ ID NO: 17705 - DNA, 2697 bp, Oryza sativa
ccgtggaccgctcctttcgcttcccccttccctcctctctctcgggcgccgctccgtcgcgccggaggtcgccgccggcgaccatcggggcgcgggtgcgccgcctcccgtcggccgtgccggcgaggccgccttcgggcgcgccccgcggctgccaggtgggcccggccgtcagccgcccgcgcccgcgggtgcggctgacgcgtgggacccacggcgccggccggcgtcagccgcgtgcgcccggtccaccgtggaccgagaggctgacgcgtgggccccactcccgtggacccggtccgcgcgccctctctcccggctgacgcaatagatgagtttttaattaaaatttaaatgaagaaattcgcaaatatccatttaaagagcatataaacttcaaatggccatatcttggccatttgaactcggaattggaccgttcaagtctctaatttttccttaagaagtcaagaacccatttttgtgctttgtttctgctgttatgtggagtttattagagtaaaagcctttttcttttccgttggtcgtgtagacgctgcagcttcggaagatccgctcttcgtggaagttgaagccgacgtttgggaaagcgagcaaggcaagtcacatcatctttgagcatattgaatcccagtttataaaattatgttgatttaaattattgcattatcgctttatttaaattcccgcgttatcactgttttatttagccatgcctatttacgtttgttatgaccatattattattgttattgttattattattaccttgttcaccctagattaaacaaaacctcaactagtggacactctactgcatggcagccagctagttgtaattttagagtagatgcttcgcaatttaattaggtaacattaggtggtttttcaactatagactttgggaaatattcatatcacctggacactttggaactgttggattattgtggaattggattcacaccgccccctctattcaaaatccccaaaagaggttttaggctgggctcggggtgcatggttttgatagtagcacctcggccatataaggaccggtcttcgggcctctgttgcaaagcactaccatacttccacatgtctagtgggtaaggcttagtttgttgctcagtctagtcataaacaaaagtgcacggattggagatggatgaagtcgggggtcgatggacattctccagggtaaatgaaggctacacgagctgcggcccggtagtcgagatgtcatagcacagagttggtgccctgctgctaggggctcagtcctgcctgcctatcccggaggttccggccgtaggtgggattgggtcggtactcttgtctatggctaggatgggttggaaactatgtcacgtctttcgtctgtataccgtggtggtatgtggcacgtggttgcacgtgagaaagatgtgtcttgtgggtaaagatgtacacctctgatcagagtataatctattcgaatagccgcgccctcggttatgggcaagccgagcaatgtacccaagttagtgttttaattcttaaaatttgctcaacaactaaaatgtggaatggttggcctgggttggcttgggacgagctgggacccagggtcgggttgccagttcggtctgaatcatcgtaggccttgggttaaggcaggttcgtgtgggttcacggccttgattaataacattgtatagttctaggatcgggtttacaaaatagctttgagcaactaaatgtctttaaatgctgtttactgcaaccctaacccctttatggtataattcccttgtactcccttgcatttattctgcatttgtgggtgtgtcttgttgagtacggtggttgtactcagtcttgctcaatttttcccaagcccagaagaggagctccttgaagatgaaggctttggtgtctagctcgtgcctgccgtcaagcgcctgtggtcgtcgccctagtcttccactgtttcccgtttgtctttgtgtgtgctgggccttcgctgcccatgtaataagttaactatttacgcttccgcttgttaaactctgaattgtatcaactgttggtgtaccttgcctcctgggacaaggattaatgcacgcacgtcaggaacgcccgttgggttatttccggtcgtgacaaatacccagcaagtccaaggaaactacgaatttctgaaaccgtcttgggttgcttccaacttaatactgactccacattgcttggatctactgccactcctccagacgagatgacatgaccaagaaacttcacttcggacaaccaaaattcacatttactgaacttggcataaagctgatgctcacgtagtttctctaaagctagacgaagatgctcttcatgttcttctttcgtcttggagtaaatgagaatgtcatcgataaacaccacgacaaacttatccagatattccataaacaccttgttcatcagattcatgaaaaaggctggggcattagtgagtccaaacgacataacggtacattcgaacaaaccataccgagttgtgaaggcggtctttggtatatcttcctcacggattcgaagttgatgatatccagaacggagatctatcttggaaaaaactgtagcaccttccaattgatcaaacaggtcatcaattctaggtaaagggtattattcttgata

SEQ ID NO: 17706 - DNA, 11957 bp, Oryza sativa
taggccggtctgaccgccgtgtgttgggcggtcagaccgccggttgaaggccggtcagaccggcggtatgtggccggtctgaccgacaggcccgagtccgattctgttgcgtcgggtttcgaggtttccttgctttggaaggcatgtttcgggtttcctttggtttttaccccgagttggacatggagaagggcctgtagagggcaagaccaacccctatataagggacaaggctggttcattgttaaaatcaatctactatcaatcaatcgaatcattctttttatattgcttttagttttctcttagtttgtccatctttgtcggtttgcgccgtaaaccgtccgctaccgctgcgagagtgcgacatctctttgtaggtttgtcttgaaaaccttccgtttgcccacgagacgggtagttatctagaaatcggctccgctagccggtttagttatcaaaacccatctaggtttagctctttgctagatcgaggtggttggcgactttagaatcaccgcaaggcttaaggtgctacgatcgtgcttgtcaacttgtcaaaaaagttgccaacacgatttttggcgactccaatggggaagagatccgttcatcgtcaactcaacttcgacttcgccatgacgaagccatcatctaagacggaggtggagccatctcatgtgataccggtcacattagatgactttgaaggagaggatcgcaaagatgtccaggaatacatcaccgagctcacacgggaggcgttgatgaggttgactactaggactcgtcaaggcgtgatcatcaagcccgggccacgtcctaagctcgctcccgacgtggtaagtaatgacgaggtatcacaatctatcgaccaacaaattgcaaatacaatagattcatctatggctaattttaaagatagattagatgtgatgtttaaggaaaaagttgatgggtttttaaggagtaggctaggctcttttatggatgattacacattaaaagataaagcctataccactgctgatcaacctcctatagatccaatagggtccaaaaccaacggagcggcgttcgtgaccggttcgatcgggcctgacggccggtcagaccgcgacacagccgtcggtcagaccggccagacggccggtcagaccgggtattatgccgtcggtccgaccggccagatggccggtccgaccgggtattatcccaccggtcagaccggccctcaggctggtccgaccatgcaacatgacgccggtcagaccgggccctgggccggtcagaccggcgcaattgtgccgatacagggaattgatccaatgactaatgctagttattcgtaccactttagaacatttgatccccctgtatctactgccaccactagtcctcaaattcccccacatatccctaatgcctacaatgatgtttctagaggatatcctcccgatactagtcaaggccaatataatcatattgcgccacaaaccaaacctattaggccaccaaacccaccaccaaatccacaaggacctaataacatggagaacatgattagtgatattatgaggactaaattcgggatcgaaactaggaatcgtgataggccttacaaaaaaccatatccggattattatgataatgtgtcgttccctagaaattatagagttcccgaatttacaaaatttagtggtgaggatggtaagaccacatgggagcatataggtcaatttttagcgcaatgtggtgaggctaatagtgatacttttaaattgcgcttgttttctttatctttatccggtaatgcttttatatggtttacttctttaccggcaaattcaattcatacttgggctcaattagaggaacaatttcatgattatttctatactggagaaactgagcttaggttatgtgatttaacatcggttaagcaaaaattgtcacgaccggaattaacccaatgggcgttccttacgtgcgtgtattattccttgtcccaggaggcaaggtacaccaaaagttgatacatttcagagtttatcaagcggaagcgtaaatagttaatttattacatgggcggcgaaggcccagcacacacaaagacaaacgggaaacaacggaagactagggcgacgaccacaggcgcttgacgacaggcacgagctagacaccaaagccttcatcttccagggcctcctcttctgggtttgggaaaaattgagcaagactgagtacaaccactgtactcaacaagacacacccacaagtgcagaataaatgcaagggggtacaaggaagccataatatagggggttaggatttgcagtaaacagcattaaaagacacttagttgctcaaagttattttgtaaacatgatcctagagctatacaatattattaatcaaggccgtgaacccacacgaacctgccttaacccaaggcctacgatgattcagaccgaactggcaacccgaccctgggtcccagctcgtcccaagccaacccaggccaaccattccacattttagttgttaagcaggtttttaagaattaaaacgctaacttgggtacattgctcggcttgcccctaaccgagggcgcggctattcgaataggttttactctgatcagaggtgtacatctttacccataagacacgtcttcctcacgtgtaaccacgtgccacataccaccacggcatatggacggaagacatgacatagtttccaacccatcctagccatagacaagagtaccgacccaaccccacctacggccggaacccccgggacaggtaggcaggactgagcccctagcagcaggacaccggtactgtgccatgacatctcgactaccgggccgcagctcgtgtagccttcatttgtcctagagatgtccatcgaccgccgacttcgtccatctccatccgtgtacttttgtttataaccagactgagccacaaactaagccttacccactagacatgtggaagtacggtagtgctttgcaacagaggcccgaagaccggtccttatatggccgaggtgctactatcaaaaccatgcaccccgagcccagcctaaaaccattttgaggattttgaatagagtgggaggtgtgaatccaattccacaataatccaaccattccatagtgtccaggtgatatgaatattcccaaagtctagagttgtaaaaccacctaatgttgcctaattaattagcgaagcatctacctaaaatcatactagtggtaccatgagtagagtgtccactagttggggttttgtttattctagggtgaacaaggaaataataacaatagcaataataaggtcataacaaaggtaagtaggcatggctaaataaaacagtgataatgcgggaatttaagtaaagcgacaatgcaataatttaaatcaaaataactttataaactgggattcaatatgctcaaggatgatgtgacttgccttgctcgctttcccaaacgtcggcttcaacttccacgaagagcggatcttccgaagctgcagcgtctacacgaccaacggaaaagaaaaggcttttactctaataaactccatataacaagcaggaacaaagcacaaaaatgggttcttgacttcttaaggaaaaattagagacttgaacggtccaattccgagttcaaatggccaagttatggccatttgaagtttatatgctctttaaatggatatttgcgaatttcttcatttaaattttaatttaaaaatggatttattgcgtcagccgggggagggggcgcgcggaccgggtccacgggagtgggacccacgcggcagtctcacggcccacggtggaccgggtgcacccggctcacaccggccggcgccgtgggccccacgcgtcagccgcacccgagggcgcgggcggctgacggccgggccccacgcggcagccgctaggcgtgcctgaagacggcctcggcggtgcggccggcgggaggtggcgcgcccgcgcccctatggtcgccggcggcggccataggcacggcggagcggcggccgagggaagggagggaaagggggaaacgaagcggcggtccacggctcaccccgggtcgacggtgacgatggaaacggcgaccggagcggaggaaggcggcggcgcggctcgggtggacggggtcgacggtgctccggcggtcggcgaccgaaacggagaggtggacgaggtcggtgaggatgcggcgaagccgaaggaggcggcgccgaggtgggaggtggtccggggcgacgacggcggtggaccggagctcggcggcgacggcggagagagagagcgacggcgcgagctcgattccggcgggggaagagggcggtgagtggcggaaacggcggtggggagctcggggagggtttatatagggttgggagtgagagagggcggccggaggagggggaaatgggcgcgggagacctggccgccattaatggcgccggcgaggttaggggagaggtttccaaatgaatccgagggagagagggagggaaaaatggggggaaagggggatgggatcccggggaataattccccccactttattgcgcgcggggacggcgggaggcggcgggattcgcggcggcggcggcgctagggcgcgggcgaggcggcgggagcggcaggaggaaggggatgacgggtgggccccacccgtcagcgaggttggtgggcgggcccgcccgtcagcggcgcgcgcgcagggagaggccggatgggccgcggggaggaggagggagagggagggagctgggccgaaccggcccaagagggagagggggagggaaaggggactttttagggtttttctttttataaaatcattttaactttgtttatttcttaataattattatttgtgctctgaaaattccagtaaaatttatttacgcattttaggcttttaggaaatatacaaaaatcctccaagccttatttgacttttaactttgcacattttaattgttggaggctttcacacggattttaattattctaggcataatttagaggatgtattttagagtcgttttgggacgcgacaaaaatataataaatctgttgttgattatattaagagatttagagatgttagaaaccgatgttatactttgaatataactgatagagatttggccgggcttgcttttaatggttttgttgctcctcttagagagaaactagatggccaataatttcttgatgttagtcaacttatgcaaagggctctggctcaggaatgccgggttaaggataataaaaaatttgctagaccattcaacaaaaagcctaatgttaatgtagttgattactctgatgctagtgatagtgaagaggagggtgatcatgatatttatgttgccgaatggtcatggaccaacaaaaataaaccttttgtttgttctaatttaatgccgactcctcgtaaagatcggcaaagtgaagttaagtatagttttgatgtggccaagtgtgataagatttttgattatcttttacaagagaaacaaattagattacctaaaggccatgtcataccatcacaagaagagttaaaacgtcgggcatattgtaagtggcatgattctcattctcactctactaatgattgcaatgtgtttcaacgacaggttcaatcggccatagatgaaggacgattgaaattcaccgatggctccaagatgaagcttgatcatgatccttttccagtaaatacaattaatttcaataataagaaggtgttgattcggccggagcaagccgaatctactaagggaaaggaagtggtcattggtgagccaaggcctaagatgatggtgccaaagaagccggaggttggtgtttggaaggagaataagggtgaagcttcgacttctaaggctcctaggaaaaccaaagtgacctttgatatgcttttggagaagtatgagaagcaaggtggtgagaggaatcacgacaaatggaaaagaccaagatcacctcctaaggggcgatttggtcattcactaagacggttgcgttcacctccatactttcatccacaagacatgtcattgggttcttatccaatgccgccgccgggttattcttatccttacttcatgtcatggggggcaacgccgccaatgtacaaccatatgcctccaatgcaattcaaccaagggtggggacgaccacggaggccaatccatgagcgcttatcttcaccaaacaaaagccaattttatggtaaaaatcgggttaatgaagaaaagagggaaggaaagcgcaccaaggtggaggaaaggacttcggaggtgattactatcaaaataggatcccatgatgtgcctataccttctggagatggagttgaaaagtccccaaacaaaaaatccgaagccggtaccagctcatcgcagtcggccggtctgaccacggccatgtagccggtctgaccgggcaatcaggccggtctgaccgccgactagacagcggtccgaccgaggcttcaggccggtctgaccggcgcgtctggccggtctgaccggtggtctacgaccggtctgaccggtggtctacgaccggtctgactgggctccagcgccggtttgatgagagggctacaaagggcgatgtgagggtttcatcgtcttcgagcaaggttaatagaggacattatttacctcctggaacagagccaaatcctaggtggatgcctaaagatttaacggctacacaaaagagaaggttgcaacgtcttcggacccaagaactaagagagaaaaaggcgaaagaacaaagggataaaaagttcaatgagttgcgaccaccaccggtatggaggcctaagtccatagagaaggcaaaaccgattgatgttgaggagaaggaagaacaatcggttgacgaaggaaaatcgtctccataggaagacatggatatcaacatggtgtgtatgttgcctatggagttttgtgctatggatgaagccgaggttgctcaattctcattaggtcctaaagacacggttttttagaagcccgatgaatcaaaccgtcacatgaagcttctctacctcaaaggccatgttgatgggaagccggtctctaggatgctattggatataggtgctgctgtgaacttgatgtcgtactcgttattcaagaagttggggcacgaggatgatgagttgaagaagactaacatgattctcaatggcttcaacggttaaccaacggaggcgaggggtatcgtttcagcggagctcaccgtgggaaacaagacgctaccaaccgctttcttcatcgtcgatgtgcaaggtaactacaatgttattttgggtcgttgttcgattcatgccaattgttgtgtgccttctacctgcatcaatgtttaatccaatgggacggcgatgatgttgaaattgtgcaagcggatacatcggcagaggttgcgatggccgatgctacttttgagtggcgccatgggaatatctaatacttatcggggagggatttttctagctatgattttattagtatctccgatggcaaatttgtacctatctctgtaaagccggctagtgtagcacggctaagccatataaacttgtataatgagtaaagaggctagtttagagtggttaaaaaaagggtgcaagaatatcggtctacaaagaacgatattggagaaactgttagagattttgatgaggtagagaagcttggacaagggtttacatcggccgatccattagaggaagtagacataggtgatggaattaaaccaaggccgacttttgtaaacaaaaacatgaagccgattataaggttaaggtaatcgagttacttaaagagtatgttgattgctttgcatgggaataccatgagatgccgggtcttagccgtgagcttgttgagcctcggcttccaattaaaccgggttttaggccttataagcaaccacctcgtcgttttaatcctttattatatgaccgagtcaaagaagagattgatcggttattgaaggcggggtttattaggccatgtcgttatgcggagtgggtttctagcatagtcccggtggagaagaaggggagtggtaagattagagtttgcatagattttagagatttaaataaagctactcctaaagatgagtatcctatgcctatagccgacatgatgattaatgatgcctcgggtcataaggtgattagctttttagatggtaatgccggttacaatcaaatctttgtggcggaggaggatatgtacaagacggcttttaggtgcccgggatttgttggtttgtttgagtgggttgtcatgacttttaggttgaagaatgccggtgcaatatatcaaagggcaatgaatttgatcttccatgatttgctaggtattatcttagagatctatattgatgatattattgtcaaatcggatggtatggaaggccatatagccgatttgagattagcttttgagaggatgcgccggtatggtttgaagatgaacccacttaaatgtgcttttggtgtgtcggcggggaggttcttaggattcatggtgcatgagagaggagttgagattgatcctaagaagatagaaaaaattcatgatttcaaagcgccgacatgcaagaaagaggtccaaaagttgctaggtaaggtgaattatttgaggaggtttatttctaacctagcgggtaaaatcgatgcttttttttctatacttcgtttgaaaaaagaagccgatttcacttggggggcaaaacaacaagaggcgtttgaagagttgaagaagtatttatctactccacctgttgtgcgagcgcctaaagccggaaagccttttcggttatatattgcctccgaggacaaagtcattggtcccgttttgacgcaagaggaagatggcaaggaatatatcattacatatttgagccgccgtcttttggatgccgaaacaaggtatgtttttatagagagactttgtctatgcttatactatgcttgtaccaagttgaggcattatttgttgtctagtacatgcatagttacttgtcaagccgatgttattaaacacatgttgcaaaggccaattctaaatgggagaattggcaagtgggcatatgctttgatagaatatgatttgacttatgaatcattaaaaattataaagggccaaattgtatgtgattttatagtggaccatcatatagatgttgcttatgagggagaggtttgcttagttgaagttataccttggaagatttattttgatggttcttcttgcaaagaaggtcaaggcataggggtcgttttaatttcacctaatggcatgtgttatgaggtatcggttcgtttggaatattattgcacaaataatcaagccgaatacaatgctttattgttcggcttacaagtgatagggatgtttggagctaaatatgtggaggcctttggtgactcggaattggtggtgcaacaagtcgccggaatctacaaatgcttggatggatcactaaataggtacctcgattcatgtttagatattattgccaattttgataattttgctattagatatattgctaggtgtgataattctagagcaaatggcttggcgcaacaagcagaggttataatgtaaaaagggggttatttctgatattagaagagccggtgcttgattttaaatttttgtgcgaaattggcaaagttggggaccagaggcggtctgaccggcgttgcacggccggtctgaccggtgaccaggggcggtctgaccggccgcatgccgccggtctgaccggcgtccctgagaggtctgatcggccctgtgtggccggtctgaccggttctaggcagggtgctggagggcacgtttcaagtaattttgaggccgaattaattgtgaattcggacgtttgtgcccaagatacagaagaggattggagaattcctttgattcaatatttgaaagatcccacacataaggttgatcgaaagattcgacggcaagcattcaaatatacattgcttgatggagatttatatcgccgaaacatagatggtgtcttgttgaagtgcttagatgaagatcaatctaaagtggctaagggagaagtacatgaagaaatttgtggaactcgtcaatcggaccacaagatgaattggttgcttagaagagcggggttttattggccgaggatgattgatgattgcttcaaatatatatagggaatgcgaggcttgtcaacggttcggcaatgttcaattggcgcccgccgccgtattgaaccatataatcaaaccatggccgttccgaggatgggctttggatttcattggtcaaatttatccttcgtcatcaaaagggcataggttcgtgctagtcgctacggattacttcaccaagtgggccgaagccgtgtctttgaagaatatgactcatacggaggtaattgactttattttgaagcatattattcatagattcggtattccgcaaacattaactacggaccaaggtgcttcttttatgtctaaggaagtgaagagttttaccgaatcttatgatattaaattgttgagttcttcttcttactacgctcaggctaatggacaagccgagtcgagtaataagacattgttaaagctagtaaaaaagaagattgaggaacacctgaagaggtggcatgaggtgctttccgaagcgtagtgggcgcataggatatctaaacatggtgccactaaagtcactccttttgagttggtttatggttaagaagccgttttaccggtagaggtgaatcttggttctcttcgttatatcaagcaagatgatttgtcaagtgaagattacaagacattgatgggagacaaccttgatgaagttatcgacaagcgcttgaaggcgttggaagagatagagaaagagaagaagagggtggccaaggcgtacaacaagagggtgaaagcaaaattgtttcaagttggagacttggtttggaagacaattttgcctttgggtactcgatccaaggagttcggtaagtggtctcctagttggaaaggtccttattgagttagtggcattgttcgaggaaacgcatactttttggagacactacaaggggagcgttttcaacgagcaatcaatggaaaatacttgaagaaatacttcccgagtatttggcaagacgcttaggaggtactatggccggtaattggattatcgtcctaagaccaaaaacatgttctatgcttttagattcacgttgttcatcaaaaaggcaggggggcatgtgtttacacccaaatttggcacctaggcttaaaataggaaatattgccaaaatttggaagtctaccggtttccttggaggtaggccggtctgaccgccgtgtgttgggcggtcagaccggcggtatgtggccagtctgaccggtaggcccgagtccgattctgttgcgtcgggtttcgaggtttccttgctcgggaaagcatgtttcgggtttcctttggtttttaccccgagttggacgtggagaagggcctgtagaaggcaagaccaacccctatataagggacaaggctggttcattgtaaaaatcaatctactatcaatcaatcgaatcgttcttttcatattgcttttagttttctcttagtttgtccatctttgttggtttgcgccataaaccgtccgctgccgctgcgagagtgcgacatctctttgtaggtttgtcttgaaaaccttccgtttgcctacgagacgggtagttatctagaaatcggctccgctagccggtttagttattaaaacccatctagatttagctctttgctagatcgaggtggttggcgactcttggatcaccgcaaagcttaagggtgctatgatcgtgc

SEQ ID NO: 17707 - DNA, 3262 bp, Oryza sativa
tgtcatttcgacaacagctggcgccgaccgtggggacctccgagcgaaaccaccgagagcgaatgccaccgaagagagtcgtgaaggagaaggttgccaggcggaaggaaagcgacgccggaccggacatggccgccgaggaaggagcagagccttcggcacccgtggccgaagatggaggaggacaagcgccatcacaaccgccttcggcccctgcaaccactgtgcaagtgccgaacgcggccgacgtggcgaaggcggctgcggtggcaagggcactccagaccagggcggagatcctttcgacaagccaaccggtggtgccccaagccgctccatcgctggcggcagcggccccaactgcgctcgccgttgtgcaggcccaagtcagccctgaccctgaagcacaagccgaagccgacatggaagccatgcgacagaacatgacacggctccaagacatgcttcgccgaatgcaagaacaacaagaagcatacgaggcggcaaagcggaccaaggccacgtcggctccaatccttcagtattcggcaggttatgtcccacttcaagtccatctgcaagtgacgacccagccctttccgccacaagccgcacaggcgccggtgtacttcaccgggcagcaatcggccgcagctgtgcgtccggcccctcacgtgcaactgcaagctcaaccagtcactgcccaagtacaccatcaaccacctggccaagcgccacaaacagtggcggaaggggcttcggctctgcaggcgcaactccaagctttccttcagcaactctaccaacctcactgcatttcaagtacaaccccatcggcccacccggaggggaatacaagtcaaggtgcgcctaattggttgccaccgattcagccaggcctgggagtttcgccgtggaatcaaggaccgcagttcgacttcgtcaatgctactcaggtgccaaccgttcggcagcaagctccaactccaggcttcggaacaaaccaagcaccaatcaaagctgccatgatgtggtcgcagccaatttttgacccatctatggtggctcagcaagtacctccagttggaaccgggcagtcgaatgccacggcccaacctcacgcacaagctgcgattttgcctttcaccacaccgtacccgcagcaaggtgcggcaaacagggcgggaggagaaaaggggctaccgctgagtgggggaatcaagactcgtccaatcccaccacagttcaagttcccacccgtcccgcgctattcaggcgaaactgacccgaaggagttcctctccatctacgagtcagcgatcgaagtggctcatggtgacgaaaataccaaggcaaaggtaatacatctcgctctagacggcatcgcccgttcttggtatttcaatttactagccaatagcatttactcatgggagcaattgcgcgatgtttttgtccttaactttcgaggcacctatgaggagccgaagacgcagcaacacctactcggcattcgccaaaggccgggggagtcgataagggagtacatgcgtcgcttctcgcaagcccggtgccatgttcaagacataaccgaggcgtcggttataaacgccacttcggccggtctgctcgagggcgaactcacaagaaaaatcgccaacaaggagccacagacgctcgagcacctacttcgtatcattgacgggttcgcaaggggcgaggaggattccaagcgacgacaagctatacaagctgagtacgataaagcctccatcgtcgctgctcaagctcaagtacaagttcaagttgccgaaccacctcccctctctgttcgccagtctcagccggcgatccaaggacagtcgccaaggcaaggccaggcccccataacttggagaaagttcagaacagaccgtgcaggcaaagctgtgatggcggtcgaagaagtgcaagccctccgcaaggagttcgacgcccagcaagcgagcaaccatcagcagccagcccgcaagaaggtccgaaaagacctctactgtgcctttcacggacgctcttcgcacaccacggagcaatgccgaaacattaggcaacgtggcaacgcgcaagacccaaggccgcagcagggaacaactgtcgaagcaccccgagaagcagttcaggagcaaacacccccagccgaacaacgccaagatgtacagcgaagggcaatccaagtgattacaaggctgacccgccaagccagttgtccaaacggcagaagaagatgcagatccgtatggtccacagcatcacttcggcgggtgaaggggcgccgcagtatctgaaccagctaatttcttttgggccggaagacgcagaaggagttatgttcccgcatcaagatcccctggtaatctcagctgagatagctggtttcgaagtccgacgaatcctggtcgacggagggagttcggccgatgttatcttcgccgaagcatatgccacaatggggttgcctacccaatcccttaccccagcaccaacatcgctccacggtttcggcggcgaagcagttcaagttctcggccaagcacttttgctgatagcctttggctcgggggagaacagacgcgaagagcaaatactatttgacgtcgtcgacatcccgtataactacaacgccatcttcggccgtgcaaccctgaacaagttcgaagccatttgccaccacaattatctcaagctcaagatgcccggcccgacatgggtgatagtagtcaaggggcttcaaccttcggccgcttcaaaaggcgatctagccataatcaacagagcagtgtacagtgttgagaccgaaccacatgaacggccgaagcacatgccaaagcccacccgtcacggcaagataacaaaaatgcaaattgatgatgccgaccccataaagctcgtatcactagggggcgacatgggcgaagaagaagttgagagtatcctagaggtgctcaaaaagaacatcgatatcttcgcctggagccctaacgaggtggggggtgtcccgacggatctcatcatgcatcacctagcagtcaagccggacattaagccaagaaaacaaaagttgcgcaagatgtctgccgatcgccaagaagcggcgaaagccgaaatacaaaaattgctcagggcgggggttatccaagagattgaccatccggagtggttggcaaatccagtgctggtgcggaagtcaaacggcaaatggcgtatgtgtgtcgatttcacagac

SEQ ID NO: 17708 - DNA, 13329 bp, Oryza sativa
  unsure (1)..(13329): unsure at all n locations
ctttcggcttaagaaacgcaggagcaactttcgccaggctggtgtacaaggtccttggcaagcagttggggcggaatatggaagcttacatcgacgacatcgtcgtaaaaagtcgcaaggctttcgaccatgcgatcgacctgcagaagacattcgacagcttgcgcacagcaggcataaggctgaatccggagaagtgcgttttcggcgtccgcgcagacaagttgttgggtttccttgtttttgaaagaggcatcgaggcgaatcccgagaaaatcgatgccatccagcaaatgaagcctccgtcaagcgtacatgaagtacaaaagcttgcaggctgaattgcagcacttagtcgattcctctcaaaggcagccgaaagaggtttgcccttcttgaagaccctccggggcgcaggaaagtttaattggacaccagagtgccaagcagcattcgacgagctaaagcaacacttgcaaagcccgccagctctgataagcccacccctaggaagcgaactgctattatacttagcagcttcgccggtggcagtcagtgctgccctcgtccaagaaacaaagttcggacaaaaaccggtctacttcgtctccgaagcactgcaaggagcgaagacaaggtacattgaaatggaaaagctcgcttacgccctagtgatggcttcgcgcaagcttaagcactacttccaggcccacaaagtcatagtgccatcacagtaccccttgggcgaaatactccgaggcaaggaagtcactggccggctcagcaagtgggcggcagagctatccctgttcgacttacattttgttgcacgctccgccatcaagtctcaagtgctagtcgacttcgtagctgaatggacaccggtacttgcccccgaccccgagcccgccgaacaattctgggtgatgtgctctgacggctcgtggtcgcacaagggagcaggcattgcggcagttctattttcgccgaatggtgtgccgattcggtacgtagcaagactgcagttcgacacaaccaacaatgcagcagaatacgaagccgttctcctgggcctaagaaaggcgaaagcactgggagtccggcgcctgctaattcgaactgactccaagttggtagcaggccatgttgacaaatcctttgaggcaaaagaagagggaatgaagaggtatctggaggctgttcggtccatggaaaaatgcttcaccggcataacggtcgaacacttgcctagagaccagaacgaggaagcagacgccttggcgaaatccgctgcttgtggtggcccacattcacctggcatctttttcgaagtcctacatgctccaagtgtgcccatggacagctccgaagtcatggcaatcgaccaggagaaactgggcgaagacccatatgactggcgaaccctatttgtgaaacaccttgaaactggctggcttccggtagacgaagcagaagcgaagcgtttgcaactcagagccatgaagtataagatggtctcgggtcagctttaccgctccggggtatttcaacccttacttcattgcatctcttttgccgaaggcgaagaaatggcaaaagagatacaccagggactatgtggtgcgcaccaggttgcaagaacagtggcctccaaagtatttagacaaggagtttattggcccactgtgttgaaagtctatgttgagcaaataaagaagtgcgaaagttgccagcatcatggccgaagccaagccgcgccccagtatgatttgcagcccattgcgccaatatggcccttcgccagatggggactggacatcatcgggccattcccggtggcgcgaaacgggtataaattcacaattgtagctgtggaatatttctctcgatggattgaagccgaaccccttggggcaatcacttcggcagcagtacagaagtttgtatggaaaaacattgtttgccgtttcagagtgccaaaagagttcattactgacaacggcaagcagtttgactctgataagttcagagaaatgtgcgaagggcttaacctggaaatcaggtttgcgtcgatcgcacacccgcagtcaaatagggcagccgaacgtacaaatggcaagatcctagaagcactaaagaaaagactcgagggggcagcaaaaggcaaatggccagaggaattgctattggttctctgggccttcggacgacccccacaagaccaaccaagtttagtccgtttatgcttctttatgggatgaggcaatgaccccagcagagctaggggctaactcaccaaggtgatgttctctgggggcgaagagggacgcgaagtatcgctcgaactcttggaaggagtaagggtcgaggcgcttgagcacatgcacaagtacgccacaagcacttcggcaacttacaacaaaaaagctgatgcctggtcatctcatcctaaggaagaaggcgaacccagtagcggttggcaagcttgaatcaaagtgggaaggaccatacctcatcaaacacaagtccaggacgggatcttttcgcatagcgacactcggaggcgaggagttcgaccattcctagaacgccgcctctctcaagcgcttctatgtctagaatgggtggcacccaaattgccaaattgaaaaaatgtacatactgtcatgtaagcccttcggcactatgaaagcctttcggcaagaaaaaaaaagaagaaagagagaaaaaagaaaaaaaaactaaatgtagggctattattcaccatggaggcccgaaccagtataaaatctctttgtccgccttctttttatttttcgtgtgattgataatttgtggaaaaaccccaaggcaaacgcctgatcagcgaaaaaggccaggggggcgaaatgaatcggccgaagcattgctcgccgaacgttgaaaccgcaacagcttgtctcggaaaataaatagccgaacgatcagcataaaagcaaaagcgtttctctcgacacagaacgctacagatcgaaaacgaacgacgaaaagctaaaaagtcagtacacctatttcgctaatatatgcaaaggggccagcatgttctgacctaacaaaagcacaaaatgtgacgatgcaaacaatagcgaaaaggaaataaaacacgtctttattaacttcgaaaaaaataatcgaagaatagaagtttcacaacacgatacaattcaccttacaagtaaattacatctttgtccccataatcactatccctccctaaggaatgatcaggcgaactaggttcatcatcactactaataccgtacacaaccttaagaggagtagggggcgaaacacagactaaactgtaacgacgctgaaagatcgtttcctggcgtttagtcttctgatggtttcgccaaaagcgagccatatcctccaaatgtcttgaatgaacaagatcgtaatcttctaaggttcgcccggggtgcgcccgcagccagtcggcaaccttgaaagccttatagttgcgaccgtttatctccatttcgcgataaacaggccgaaatggacatcgcactttcggcagacccttcactgccacaaatttctcgttttgacttcgccagctcccggaagagggccggatgcacgactttcggcgaaccccctgatggacagtgcagaaaaagcaaaacacagcttacatagtaagaataggcggaagaagggggaggtatggcataatgcgagatgagcgaaataataatatgccaaagacttcgatcatcaaaaagtaattaagattgtcatatattccaaatgtacaaaaaagcctttttttaaggtttggcggtagcctgccgaatgtacatcattcgcctctccaggcaaacgcaaaagagggaggaaaactacaaaaatctaaggaaagggcagagggcctcacacctctaggtgatcctgggcagcgcctccaacctcttcgcccaccgcgccctcttcttcgcaccgatctgccgcctccgccttcgccagttgctccagaaggcgcgccttggcagcggaccggccgtctttctgccagaactgttttcgccacgcgcgaagagcgggcgaaatgttctgcgcactaatctcccagtcccccttcgcataggtagggaactcggcaatgtgctcgcagccgaactgctgcaaaaggcctaaggtgaaggccgccgatacacgtgcacagcaatcgccgtacacggtggcgcagtccgaaaccaatccgccagcctgctgggtccactcggagaagtcgaaggctgaggcatcctcggcagggacccctcgcaccttcgtgcctatgtcggtaagggcgaggcggagcgtttggcaagccattctcgcggattcggtggtcttcgccatctcccgcgaaaaccgctgcgactcctccgtggcgctcgcttcggccctgctagccttctggcgaagagcctccatcttcggctcagtaaggttgtagtaatcgatgagcaccgccgaatgggccttctccttctccagttcggccttgaggcgatcaacctcggccctggcctctttccccttatctaattcggactgaaggcgtttgacttcagtcttcgcctccttgaaggtgtgggccagggcctccacctccaagttcttgcggcttatttcatcatccttggcccaaagacggtttttgaaaccgtcaaaacgggcccgcacggttcgctccatcgaacagtgagccgcaagaatctagatgaaagataggagcaggcgaaaagaacaaaaggttaattgtgagacgtaaaaaaaagagggaagaggaaaacgaagaaggaagaaaaggcatactcgaaccgccaaacttttaatggtggaacacccctcgtcgaactcattaagttcggtgaacaggctcggggtgccggcaggcaagacaaggttgctcacaccctccacaaagggaataaggtccgcccgagtctcgaaatcaccaggggtaaagtggggcgccgcaagggaatactccgaggcagatgcttcggcggccgcacacttccccttcgccttgaccagcggcgaaatagctggctcacgcatagggctcccgaaaaccatcgccgcggccgacacgatccgtttggcggaggcggaagccctggcggcggcactaccgcctgcaccagcaacgccgagcggagcaaggggagcagtcgagaggtccaaactgcggccagcaggcgaggtcggagtctcgtcagaagactcatcgtcgctgaaaacgcgggcgatgtcgacgagtcctttctttttggagatcttcttcaccggacctcccttcgccaccgtgcccgaggagaacgcaactagagccttcgctccttccaaatccttccgtcgaacgggggagctgttcgactccaccccagtctcgttgtgaccgggacttggggtaggagtgtagctaggggtgtcgacgcggtcttcgatcgcctcgttcacggccttatcggccatggcctcctcctcttcctcctcctcgccgtcgcgttcttcggcatcgtcctcgtcgtcggcgtcggagtccgacgaagcaggaacccttcgcttcctaggggcaagcttcacttgtccgcgcattcgttttcacgaaggccctacatcgtcgtcagctttgtgggtgtttacccgaggaggcaattcgccgttgtaaacccggttcgcccgtccagccgcttgtcgtgttaacaactggctatactcgacgaccgacacgtcgccgatcatcctacgggcctcgttttcagcctggtcgagggtcaacgctgcaaaagtgtgtagatatgttaacagtcagacaaggcaagataacaaagcacaacagtgtatagcaagagaacagtcttactgttcatcccctcaggaagaaccaggtttggcaaaccgtcaacctcttcgccttgatcaactctgacttgccatgactgggagaggggaaagatacgaagcatacagaattcctccaccaagtcaaggcagctaaggcgggagcaaaccttccacagaagaacgaaccgcgcctccatagcgccgtccacggcgatcttgggtttctggttaggcgcgatcgccctacgtcggcaatagagggctttcgccgagtcagtgccagcctcaaaggggatggtgtgatagaaccacctagccatccattggcggtcccacttcgacatgccagcgttcaccggccagagatcggaccgctcgggacgaacgttaaagttcacgctcccgaacactgtcttcttcgtcccagccggggtaatcaccttcttcgagttcacggtgacgaaaaatatggcgccgaagagctcggcgttaggctcaaacccggaagtccggcacgcccagtcgaagatagcgatctaaacaagcgccgacggactcagctgtggaagttccacctggaagaggcgaaggatctccggcaacaacacgttgcagggaaaccgtagccctgcctcaaaaaagacggcgaataccaccgtccgattgtcgataggtttcggcaccacggctttccctggggcgaaagcctgccccgcgaccaacgccccagagctgaccagcttcgccagctcgacgtcgtctacaagagagacccccaaaaaggcggtgctgtcgtcatcgactcggccgggatccggccctttcgccgaagcagggtttggcttgcgagaggccatggtgaatggtgcgtttgcggtggcgaagaaaaagaatgggcgaaacgcttgaggggtcgagagatgctgtggaagaaagagacggaggaagagagcgcacgcggtaaaatggcaagtgtggcggtgaaaaggaaagagcggtgggaatatatagctcacccgggcgaccgttcgcctacccaccaataataaagcgccacgtgtcgcaagggtaggcgaaacggtaaattcccaccgaccgagcggcacagtcaaaagcccacgaagggaaagcccaatactgttcggttcggcccgggaaaagaaaataataataaccaccaatcgcaggaggcgaagtgcggcaaaataataatagccgcacaagtaacaaacttcattcgcaggaataatataggtttcagcaggagcatcggtcaaaagggggtgccgcataccataccacatggtttgcacggtctcggccaaagctccaatctcacccttgcccgtgaggggcttgttggcggatggcatgaggcccttcgaccaaatctgccgaaacccgtggcgaaggctatggagcaagaacggcgtgaggcgaagagtcgtacgagtgccttgccaggccagaggcgtctcaggcgaagggttcaaggcaaagactatctgccgaaggaagacgacttcgccatggcaagttcgccctcgcgagggccgaagaagcctttccggcccatcaagcctaggggctatagggccggcgatcaccagacggcccatcaggggcccatgagcccctataacattatgtacccctgtaaatgtccctttcgttaggataatcatgtaaattcccctgtataacctaaaccctagtagtaagaacctgtaatggggctataaatagtcccctagggccatgtaatggggggagaaaaaaaggaagaaattcaagattcaatacacttcgtttccttccaaccactgttgagtaaccacgtctttcgacgtatgcagttgtcatttcgataacacttaaccataaactttgtttcaaataattcgtggtactgccattgctctgctttgtacatttgagaacttagcacttgttgcacccaagtactttcatcacgtgcaccttgttggtatcgctgattttgagcgccactcatacctgtcattgcaaacacaaaaacaataacaaacaatgaaggttatccctaataatctgctacgcggtgtagtggtgcccctcaacaactcagccaaatggagcaccttaccaagctcttacaagtgtcttaccagcaatgctgaggacggtacaaccggtggctggttcgtgacaccttgaaggacgtgatgtggcgattgcaaggatcaaagcggtgctgaccagaagtatatatgtgtagcttgggaggcacaatatatagtagcaaaaaaacgcaattgtgttaatcagaaaatgcaaagttgaataatagttcaaagtactagtcaatgtgctggcctagcctagactcaactctagctcaagcaagcacccgacaccactaaagactagatatgaatcaatgcacaactctgcactcagataacatactcaaaggatgaatgatttttttttctttcttggtgcggctttttttaagcacctttctgccttcttttttctttttttaggtgtggcttttttctcttttttttctttgcacctttctgccttttctttctttctttattcttttttttactttttttttcaataaaaactgaccactgacctcgaatagggactcaaatgtaaatatgaatattacagggactcaaacgcaaagtgcaaaactaaaattggatcatctcaaaaatggattgctcatatcatgtaggttccgtttttataaaaatatctcaaatccgctacttaacaattctataaagagggaaatacggacagctacggatagatctgatacggagtctctcctcatgcgcacacagtactccccacacgcgcacagtacacatgcacagtacggcaactctaaaaccatttgataaaaatttctccaaatcacaaaaacggaaacccgacgacgagacgattcaatttttcaagatcccggcaacaactaacgagatgaaaaactgaacccaaaactgacgtacaactcacacacttgagtgatgtaccctagacctaagtgatgaacagatgcaatactcaaaactaaaaattaaatctaaaactaaaccagtactcgacacgacgatgcaacctagaattcaacaaagtttagagtcgggttcttgacggaataatctaagcaaaacccgactctaaacgatgacggctactgaataaatgtgattagggacgtcctagggttgccctagggtgcacaccctcttgggctaagcccacaacacaattacaaggcccaaaacccaagtcagattcggactggatgagatatatggcttgttttgtagattcccggcagctcggtaggaattttgacatgggaccaaaaccatctgaaagtagactccataagctttctaacaagtactcatgggccccaaaattccttctagatcagcggctaggtccgtttgaagttgatgctgtcacgaggcccgaatccgaatccaaaacgtgtggaactttatctcttgtcttctatggaccaaaagtgacgtggtgaaatgaaagaagacttggagaaggtcttgatatggtccccaatcaacttctttgatcatccatgaattctttacgctcggtctcttttccttcgcccaagcaagtacctctgcaaacaaaaacacataaaactcattgtgtagcaacgtttgttcaaatatatagcatgtaaatctaatgtagaacatatgcacctttggttgattaatacataaggtagtcatagttatatccgagctagttgtgtcctcatcaggcgagcgccatcttaccggtcccaccggctccgacgacgcccgccaccttcagcccccactcctcgccgccgacgtccgtcgcccacctggcgacctcatccgtcgccgcgacttcgacgtcggcgccgaaccgcggtggcggccgcctggtggtgatggacgtcgacgagcatctccggcggctgctccgcctgctcgtaggatggtggcagaggccgtacctggtgcgccgccgccgctgtctcgcctcctgcgcgcgttcccggaacttggataccttgccggcgatgagtatggcgtcggcgttgtcggcggcggcgagggcgatctcgtccaagaagtcgtcgacgtcgtaggacagctcgcgcacctccttcatccagcacttgtccgccatggtcgtctcctccagctgcgacagcttgcggaggaatccatggctctcttcgatgtcgtctctgaacgagtggatcccgtcgtaggccgcttccatgtgaccaccatcaccagcctgtggcggcgaatcgagcttccggagaagagagcccatggcccccgtccaagcactgaaccccatctccatggctgcggctgcctgcctcaagcaaagcacaccaaaaatacgtgcgacgaaaggatacagataccgctggttggtttgacttcttcttacgaaacttttcagaatttaagttacgagaaaattcaagaaataccatcgacacaccaaaatccaatacatgtcatcaatgagtgcgagttatataaaatatcattgtacaagcgattttatactagaaatgtcatcgctgttagggttacatccatcccgcgtcgtttaatgcaccacttaaaaccctaacagtgattatatttctgggataaagtcgcttgtatgagaactcgtatttgttgatggtatttttttttgaaatttggtatttgtcaattgtatttcttgaatttttctttttataagttatcttatggtagatagtgtactactccctccgtcttaaaatatatcaacttttaacaattaggatttgttccaaaatatagcaacttctccatcaacattctcttcccaacaatcgcaaccctccaccattcacttttcctacctacctctccttctcaaccgatcacaactcctttttatttagttctacctactttctttgtccaactctataaactttttatattctaggcggagggagcagttgaaagcgaagcgcttaggatgactttataacaaactatgtcagctcagcccaatatcttgtgcttcctccgtcaaaaaaaagacgaaccctggatttctgtgtccaacgtttaactgtccgtcttatatgaatttttttataattagtattttcattgttgttagatgataaaacatgattaagagcaagtacaatagcaagctattagccagctgtaaacatattttaataagataaaggatgagagagaagagcagcaggctacatatctgtaggtagctgcagcgcggactccaagacaagatgtgtgtatgacaggtgggaccatatattaatagtatagtaagtaccttttgtatgaattgactattagattggctatagatatattggagctaatagtgggctatactattaaacttgctctcatactttatgcgtgacttgtctttttaattttttccatatttttttcaaataagacggacgatcaaacattggatacggaaactcagggtttgtctttttttggacgggggagtacgtgttttcctaacttttctacgattaaaggtcagggtgagcatctatatttttgctgatttttcgttaannnaataaancntnaattnaatttttttcttgagagcaaatactagctagttcaacaaaggtttccgtaattaagcttattataacaccttcccaaaaaaagaaaagcttattatcacaccttactgtcacaactcaacagcactcaactattgtaaaaaaaatccctatgtcgctaacaacagcaaccggtatattcatatatcgtaagacacacggcgcacacatcggtacatcaaataattaggaatatttgtcaacatacaagacgaatatattaagaagccagaagattgagatagcaccacacaacaagctaccggctctaacaacaacaacgtctaattatttttctttcttgcgtgtgtcgacactttgctcagaacccagacactttcttttgcataatataatctcgatcacattatatatcaaagaaacgagttgtgctgtgtacatccgttgtgaaagtagaggccggattttaatccattttctgaaaaaaaattgaaagaaacgagttattactcagtcttaattaattattttttttttgggatttgtaatccagctactacgcgtcttggcgaactcaaggagctcaaaggcgaagcggactacgttcatttgtggatagcatagctgaaggacgaactttgcactgctacacaaaaagattttactggacgccggctccgtttggttccaggtgggccataagtcgcgccgcctagaaaaactggaggaccggctccgggccggcgcccgcacgggaagatgcattatctcgtgcgggcgtcttaacccaaccgcacaggataatgcgattatcccgtgcggttgaattaagaggcccgcacgggataatgcatcttcctgtgcaggccgtttaatccgactgcgtggcattttctgtctcctaaacttacaaaaattaggggggtttcgacctgacatgatccatataaaaggtgtaatgcttgttcaactccttcatttgcttctatttttgtcggttcttatcggtgcaatatgaagaaatttgcacttttataaatggagtagtgtaggcactttttgtgtattgtgtcatttttgagctaactagaaaaatgcctgtgcgttgcaacgggtgaaagctattttaatcttattattgttcactctgaaatcactactggagaaacgactattaacgaccagaaatttggtcgttaaaagtccaaatgtggtcgttaaaggtcattaacgactacagaagtgtggtcgtcagtggtcgttaaaggctttgtcgttaatagtattaacgtccgaccgatttttttccagtcgttaattttattaacgacggtgttcttctgccatcgttgttttcattaacgacggtgatatcctgccatagttaatctcattaacgaccgtgataatatgccatcgtttttcatttttcttttaacgaccgtgcttttccgtcgtcgctatttttattaacgaccgtgaaactataccattgttattttatagactaccgagaaactgtagcctcctaatttttttagtgaccatgataatgcatcatataattattcacgatggcataatgtgttaccattagcaatacatcaataacactcacggatcagtttaaacaaccacaccttgtaatatattgattcccacagttgtcctgtagcagccacgtgtttactcggtgcaaatacaaaataataatgttcactgcatccaactagataaattattcagacagcaccaacatgatgcctaattaa

SEQ ID NO: 17709 - DNA, 905 bp, Oryza sativa
cggccgcccctcggtttccgccgtcgaccaccggagcgccgccgtcgctgctaacccgagccgccgcgccgcctttgctcgtcgccggccgccgtcgtgcatcctttgactacgtggtgagtaccaacgggttcgtctcgttgccctctacgcgtaggtggtctccgtttccgccgccgaagtccctagcgccggcgagatcgcggtcccgagccggccgtcgtgctgacgtcatgccgacgtcaaccctagggctgacgtcatcagggccagggctgacgtcatctctctctctttttcctttttctcgattttctaatagattaaaactttgaaaaatcataactaaataaccgtagatccgttttaggtggttcaagtttctaaattcttctaaaatcaagatctacatgataaaaatatccacatgtactgtttatgcttgtttttgtactgttttgttgattttgtttatttgctttagtttccgacgttccggaggagagcgtttccgttgaggaaggttccgaagcgtttgtggaggctcaaggcaagtcacacagatcccaaacaaccctttgagcatgttgatcccgtttaaagctattgttttatttcaactatgcattgttttcgaatgtcatcgggtggtgagccgttccctattatttaatggccgaagatgactttattttcctatgggttataatttgattagcatgaaccttatatattggattggttcagctaaatgctatatataggtttgcttagtcatgcttagaaacattagctaattaaaaggggttaaatataaattatattacataattattactgttaataatggttttatataatggtagctcacgatggtcaatcgtgtgatgttaattgattgataa

SEQ ID NO: 17710 - DNA, 534 bp, Oryza sativa
tctaaagacgagactcaacgtcttctgtttgtgttagaaaagcatcgcgctgttcttggctattcccttcaagatctcagagggattaatcccgcgctttgtattcatcgtatccctattgatcctgagagtactccctctagggaacctcaacgacggctcaataatgcgatgcgaaaagttgtaaagaaagatgtcctaaaactcctgcatgccgagattatttatcccgtaccatatagtgtgtgggttagcccggtccaggttgtgccaaagaagggaggaatgacggtcgttgcaaatgctcgaaatgaacttatcccgcaacgaactgtaactggatggaggatgtgtagactacagaaaacttaataaggctaaaaaaaggatcattttccgctacccttgattgatgaaatgttggaacagctagcaaatcattcctttttctgtttccttgatgggtattccgggtatcaccatgtcgttagctctccggaccttccaattatatttgagggatgaagtgaataa

SEQ ID NO: 17711 - DNA, 6090 bp, Oryza sativa
tccgccaaagggaaacccgaagaagtttctttcagcttgattcttgcattggcctattcaaataatacaaataattatggtgggtaactgaaaatcaaatgacataattacataaaaggcagtgattacacaaacaaatcagggagatgattcaaaataaactcctcctgtaagacaggcatattccacaggttatcatgacccaaggcataatagatgatttctctaataatgtttggcagtacaaccagcattagtacaatcgataattcaatatagattaagcccaccagctgtcaatctatggctgacagggcaacccaataggcctaacatacccatcacacagtttaataaatatatataaattttctaatacgccacatagtttatgtaatggagattaccatggtcacctccaagaaaacaaattggtatcatcttgatctgtttattggttgcatctcaagagaaaaaaaaagaaacaatatttactaataaaccacggaagttacaactacaatgaaatcaatatatggatttatcatatttgacatggataggatataattgcaatgtagaacagagaatatacttttgagaatacctacttcacatgaataaacaactttcatccaggtaaaactaaaaggcagtttgaaaaagaaccacgcacaattgtcactatatgagaataaataagattgaccgaccttatgactataaatgtctgatgaagccacaccaatttcggaaggatcatgacttctttggttcactaactgttgagtacttttggcaccagtttctctttgctgctcaaattccctgtggtaagaaagcattaataagagtcggaaccaataattcaaaataatctcattgttgcatagtaactcaacctgaagccagttttagttgtaaggagttgtgctgtgacctgcagtggtacttgttaaagaataacttaaaggaaaatcagaaggcaataaaaacaaggggcaattgcgtttttgaccctattttaaggtctaactaccaatttgaccctactttcttaagtttgctctttggaccctcttttttgaaaatgaacgttacgtctggccctattccgttaagccaacataacggtgttaattcagagaaaaatggcttttatgccctcactcatttgactcaactttttcaaagtttttgcttgtctaatttcgtgtatttttatctaaaaatgtgatattttttttattacgataagtgacaaatttaacttaggtttgagggatttgacgagtttttaatagatttaactttttttttgacaaaattcacttagatttcacttaatccctccagcaccaacagcatgcagtcctcctgaccggctccgtctacctccagccaggcaagaacaaagagaggccagagagaaacggagagcagcagcaacagcaaaaacaaagcagcagccaaacacctgctggcgagctcccgcaccatcctcgacccgcgccgcgcgcctgcttcggcgccccgcggcggcggcgagctcccgcgccgcgcgcctccctcgcgcccggcggcggcgagctcctgcgcctcccttcttccatgcggagcactgctgtgctgccctctgctcaccggcgccgagagagatggggttgaggcgaatggatagggttgagtcctcaagggtatttttgtccgtttgaataataatttgaattttttttcttttcctaaatgaaaccctaacggtataatagaaatagggtcagacggcagcttcattttttaaaagcaaggtcaaatgagcaaactaaaaaaagtagggtcagattggtagttaggctctgaaatagggtcaaataagcaattgtccctaaaaacaaagaactgttaagatcactttctcaacaacatcagactagattatgataatactgtgttaaaaccatacatgtaatattgtcccaaattcacaaccacgaagaggaagtgctattgagacaggcttcagtgcttctgcaaattcggcaagattcacgtcaagctctccaagaatactagatcgagaagtaccctggtttttcaagaaacagcgaaaaagggtaaacattacttaatgaatcatgtgtccgatgtgcttatgtttgatagatgatgatataggagaagggaaaacaatgtctagaacacaccatggccacgacaatcttatagagtttgtcatcatatgtcttggtcctagaatcctgaagaagccgtgttgcttcatatatagggtctggccatttgcaacttccattcctcacatttgctttatttgtctttgcagatacctttcccgtatcagcagaaatgaaggacaaaaatagcttgtcccaccctgttgatggaatctacaaaagaaacaagaacacatgtcaagattattcaagcatggatgaaacaaatattgaacaaacaccaagaaagaacataaatgacttcaacaaaaatgtattgcaacttacatttgtagcgtggaattgtagccggaagactaccttgactttcgctttttcgatcttccatttaggtacccttgacattgtgccagtatcaaggcaattcccagaaaggggaaactttataatttaaacatatctcagttctagaagggtcagatttcttttccctgcaaagcaaacagcaaagaataaataaagtccttaaacaacattcatgcaaaaacaaatgtgaaaatgaacttttcatgcaggtgaggtcgtgaggtacaaaaggaaaaatactggactttggtcctgcttcatataagttacacttcccacaatgggattgatcctataatagctttcaaaaacatcaatgcacccaactatcattaaagcatatctaatttcctaatgaaggcaaaagatatgcacagatacatataagttcacaaatatccattatcccgtgtaacaaggaattttcatggctataatgtatagctggttcagcggcatagaaaccagtaggcaataatgctatatcccacaaaggagatgaagtgataattgctgttcaggaaggggagggggcacatattcctctgcaacaaacctttttgttgagttcgcaaatgaaactgatacaaggttcagtataatggaaatatatcctggaagaactcagataacagaaatacaagcacgacacactgttgcatgtgctaccgaattcgctaaagggatcattcatacttaatcaacaatttaacacacctcatacaatgtacaaggctaccagtttctaaaacgtaaaaaaatagtgaaaaaatggcacatgtaaggacagactgacaaaaaaattaactttttagctagttagtgacttagttcagatccaataaaaagcagaagagacacaagcataaataagattccacaattatctgcaaagttcccactttccacaaaacagaatcctaacactacgctacccataaagagtctaaatgcaagaattctaaaaggctgcattcaaaaaaaaaacaatctaccattctgcttcccacggaagtaaacaaaatctcagcattacctccaaaaggcctccatctttccactaaagattaatacggtaccatatccaaaggccccatgaataatagaggccatcagcactgtacaaacaaccaaccaaaagcatatccaactaaccgaaaaggctctgaaatttaatcaagaagcaaaccccagccaactcagatccaccagaccctctaaaaaaagctccaataccttgcgatttaccagcaaagacccgcacccgcgcaccaagtacaagatttaatgctaaaaacgtataatgcaccgcaatcaaaccccctgatccacttaaggacgtagctgaccgaagattgagctgttagtacagggaaatttcatcagcattggcaagatttcaccacaaagttcacaagacttggccccagacatctataattaagagtagctaagctccttcgctgtaaatcaagatccccaagaacatccaccagcattggctgaacaatcccaaaaggaaaaaagaaaaaacaatcacaccaactaaagcaccgaatctaaccactaacaacaaccccatgacccccacacaaattgagaaggccgtaaaattagtccaaaaaacttgcacctttctgcactaaacagtttcacccccaacaactcccaagtagtacgcatacatctgtaaccaaaattcacttccttgatgcaaaatgctctggtatatatatttcactgattaaatcgattaaatgcagtcagatccatccaaaaaaaaaacccgggcttgcgcgaaaattccccggagacggcgaaccgtggggtggaaagaatcaagatttgggcgggaatctccccggatctactaaagtaaaggagggatcgagcgctactgttcatccattcctctccccttatcccctcctccccccattgcaagaatccccacgagcagcagcagcagcaacaacaacaacaacaacaatccggggggagaaggagaagtgccccccaccccaccgacaccaccaccgggcaaaaggacggagatggcattgggcacgaacctctcgctccactgacgccgacgccgaactcgccggagagtggccccccgctccctctcctccgcgtccacgccgccgccgccgccgcagcggcagcggacaagaagacgtacggcggccgcggtcgccccacgcgtcgcgacgccgcacccgtgactccggcgaggaagagagagtggtggtgggctactggagcgggtgatctagctgcagctgcttgctgctgctgctgtagtagttgctagtgagagagagaagagaaagatgtagagagagaaagagtgaggagagagagagaggtgaggtgaggtggtttggggttttgattagggaggaaatgaacgagggaggggagggagctttgcttaccgggcagggaacgacacccgccacagcataatcatgcctgtttgtgtgtttggtcgcttatattaatcaattcattaccccaatcaacatttttctttcagtacatcccctaattaaggctttaatctattgagatatgatagactgatatgcattgttcttgggtttctaaccgctgcagttttttattgaatttctaactcattaaacagtctacattatcatctacattatgaaatctagaaaataaactagagtcagaaactagaaaaacctagcttctctatattctcagaagctagctactccctccgtttcaagttataagacgttttgaccagggtttataattccgacaggcccttccgtttcgagcactggcggaatttggaatttcgtgaaattcggtggaaaaccggtaaattccgaacaaatttcataaaccaaaatttggatacaaattccctgagtttgccgacaagttctcgaaaaccgatcggttttggcgaaattccaatcgaaatcatcgaaatttcgatcagtaatttataatagaggtaatttactgaaattatttctttcctgatgtaagtttcagtaaatatacacaatacaacattttttttgaaaatctatatcccaatatgttctatgaatatcatagtatttataagattttatttgactttttttctttttttatcaattcaaatttgaatttggatgaaactccttgaaatctcagacggtttctactttcgagcctcgtcgaaatgttgaaatttcgcgaaatccgaccggatttcgtcggaatcgtaaaccctggttttgactgcttaaagtttgaccaagtttatagaaaaaagtagtaacattttcaacccaagaaaaacttattataaaaatatattcaattattgatttttatgacactatttagtattataaatattattatatttgtctataaacttagtcaaacttgaaccagttaccaaagtcaaaacgttttataacatgaaatagagatggagggagtatcaaacagggtgcttaagaaaaattaatgaagcaacccaaaagataaaaaa

SEQ ID NO: 17712 - DNA, 1452 bp, Oryza sativa
aatgtcgaggacaactgtatttattcaaagtttaagaatgggagatttattttcctaactctgtatgtggatgacattctactggctagtagtgatgtcagtctactgcagaaacaaagaatttaaattcttgtcctcaaactttgacatgaaagacctcggtgaggcttcatatgttttgggcatagaaattcaccgagatagaacaaagtatgcattgggactttctcaaaagacatatatagaaaaggtgttgaagaaattcaacatgtacagatgcagtgctacacctgctcctatagtgaaaggcgaaaagtatggggcatcgcaatgtcctagaaatcagtatgagctcaatgaaatgaaaacaaagccatatgcgtcagctgtaggaagcctacagtacgcgcaagtgtgcacatgacctaacttggcatttgttaccaggttacttggcagatttcaaagtaatccaggcccagagcactgaaaattggtaaagaaagtcttgtgtgcctcatgctgtcttacagaagatcagaatcgctccagatagtggggtattcagattctgattttgcaaaagataatacaaagtcaacatcgtgatatatgttcaccctggcaggaggagctatttcatggaaaagctcaaaacagactatcattgcagggtctactatgtatgccgagtttatagcatgctatgaggcaacggggcaggtgaactggctaaagaagttcatacctggtttaaaggtggttgacagtattgagaaaccactaaagttatactgcgacaacgaacccgcagtaatgtacgctcacaacaatcagtcaagtggtgctgccaaacacattgacataaagtactatgttgtgaaggacaaagtccgggatcaaataatcagtctcgagcacattagaatagaaaggatgctcgcggatccgctcacgaaaggcctaccacccaacatgttcaaggaacatgtagccggcataggtttaagggaagccttatgaatcctggactatagggcccaaaagtaaagtatctgtttctgaatagagatgtgtatagtggctgtcgaatccatcggtgattgaccgtgacgatgaaacatgctctatttacaaatctgtgatggaatagaaaaagctaaaagaaatagtgagatcaaggaggggaatgttaaattgatctctcacccgtcggacccaacggcacaatggaccttgaccgcgccctgatcaggggcgcccagcccaatggctggtgagcccccgtcacactgcgccatataaaagaggggtggaggccggcacggcacaaggtacgaggttcgctgccgccgccaactccaccccacaaaccctaatccgatcgagagggggcgcagccagtgacgagaaacgccaccggcgcgccacgcctcatcatcgggacatcta

SEQ ID NO: 17713 - DNA, 5903 bp, Oryza sativa
  unsure (1)..(5903): unsure at all n locations
gggatcctaaacctcgacaagttctcgagggctctaagactccgttagagtggaaattgccagaaaaagcgttggcagggatggagatgccgtgtgaccaaaacgacaaactcctcttcacggctgtttcgaaaattatgatcggtaatgggggcacaataagattctgggacaatgtatggcttgatggtcgttggctgaaggacgtggcaccactcgtgtactcgatatccaggcggaagaattgcacatcggaccgactagtaacccgaggctggcagaacaacagcgtttgcccgctatgttggcacactgacgagaccgctatatacctgttggtggaatgcagatacactaagaaaatctgggatgccattgccagctggatagcctatgcacccatggcgccgacagattggacacaagcaaccacggttcatgaatggtgggaatatcttgccgcatgccacggcgtaccaaaacttgggactatatccctaatcctcataatgtcctgggaaatctggaacgagcaaaaccgacgaatcttccgaaacaaggagctaagcacggcagccctcatcacgaagataaaggaagagtcaaaaactggggctacggcgggagccaaatacctagcggagatgttgccttagtgcctggtcgccttttgtaaatattaccttttcatcttgtaaatattgctcccttctttattcaatgaaatggcaagctctgccgtagttcaaaaaaaaaaatctggtttgcagcatgtgcatactcactttggaagataagaaacgtcaggattttcgacaggcaacaagccagactatcggatacaatccagcaaattatcgactgtcttgaactttgaaaacaccgggccaacgcagccattaaagagaaactttcactctggtgtaactcaatcacacagagttaatgtaaatacaaactagaatgttttttgtttttaggtttcttgtatattctactttcaactcctacttctcctgtatccccactctgtatctctattcctctccattttgttaatgaaatggctataaggtagagccggctctaccttcttatgtcaaaaaaaaaaaactatgaaatatcaatgtcgcaatagttattctgccattctgctgtcttggtgtgctgtttagctgtttcttctgcaatgtagtattgtattgtttcttcttttcgtcaatgatgtgaaggttatgttttatacttggaatactctttcattatctttcataataaataaataaatgtatgattgggactctaccaataataattataacagttgggctaactaggttgtttcctttgccgagtacaccagtacaggtgcagattattcttggctatatgaatgttgtgtgctcactgatcaaagttccatttcacagctggtttcttcgcagaatccccaaatcaactcccatcaatcgggctctttgcctcttggaggtgcagtgcaagtgcgtgatggatccaacacccatcgtgatcagtctgttagattgatctccaacctgtcgggcccaacggcacaacggaccttgaccgcgccctgatcgggggcacccagcccaatggctggtgggccctcgtcacactgcgccatataaaagaggggtggaggccggcacggcacaaggtacgaggttcgctgccgccgccaactctaccccacaaaccctaatctgatcgagagggggcgcagccagtgacgggaaacgccaccgccgcgccacgcctcatcgtcgggacatctacgaccgtcactgccgcagccgtcatcgccgtcgaccttaccggcgccgcatccacgacaaccgagcgccaacgacgacgatggccggcacttcttcatcctccaacacctcaaccggtcggtatctaaacccctctccctttcatctattgttcaaacatcaacccaaatagaatcacccgacctagacctaacctaggtgatcctagtgcaaagtctaacacagtctactgaccacgatcatccctaagctgtacacgctcatcagtgggcagtacaatctggaggagaccatccggcaagacatccgatccatcaagaacgagctggacatgatgttgagcgccatccaagattacagcagcttgctgatgacaacgcgaagcggagatggccgtcatcatcatcagctgggagcaggagctgtgcaggcgacatggatcgagaaagtgcgcaccctggctcatcagatggaggactgcatcgacagctacatctacgatcagatggctcctcatggctcccggaggcaaggccctgctcggtttgcatccgaggtcagggagctcaggagcagatcagctgaactatcccagctgaaccagcagtacggagcagctgttctcagccgggagtaaatcatcatcggtgacggtggtggtggtagtactctatcctctgccgcaccgttgtcgacttctccagatgagctcgttggcatggaggctcgccggggggagctcctggagctggtaaacggcgaggggcagccggagcagcagcgcaaggtgatctccatcgtcagcttcggtgggctagggaagactgtccttgccaatcaagtgtattgcgacactgacgagctgaatttcagtcctcgggcatgggttagcgcggcagagaagacagctggggaggttctcatggagatattgcagagatttgaggtgcgagtaagggacatgccttatttcgaccaactcagcaagcgtctcagggaacaccttcgcaacaaaaggtaaggctaattaatcggttttgcatttttttttcgttggtcgtttcgtcattcacctaaaacttgcatagagtgtagactaaacctttttataaggtgtatgatatataaaaactgcaattttttatacataacaactgcaacttcttgtttgctttattttttttatttttctagattaatctagaatagttttatgcttatatagtgaggataaacaacaaagtgtattctctttacagtttagtttagaacattttttttcacaatagcgacaaaaaaaatatgcatgagttattggatattgatttggtgttaaagaaaaaaagagctatcggtagacaaggaaaaaataaatcagtcacttcacaaataaacagtcccaattactatacactgcttctagaacaaatagtgctcgggcactttatttacattaggcatatgctctgtatgaatgtgcacacaattttttttttctaggagtgaagtttagcctgttaatctatagactagttcaaataagtttggattgaacttgaaactatcgatgtctttcatttgccttttttagtgcatcatattgtgagatgttcagtgcaagagtcaacaggtgggtttagggatggggttagctcagtttgtcagaatcttgttctaaaattcccaagttaagttccaggattatatttaatcagcaaagaatgtgatacaaactaatcagttctacctaatctttttgtatttgagtgttacctaaattcagaagttgttgttagtgctaaagctaaactcatagatcaatttttccccctctatgattgggaaattattctcgcaggtatctcatcgtaattgatgatataagggtagaacagtggtgtaatatggagcctgctttccctgccgatcatggtatcagcagcagaatagtggtgaccacgagtattcaatcaattgccaatgcatgcagcatcccaaaaggctacatctacaaaatggaaaaactagatgctgaatgctccaaaaacctgttcttcagaagcgcctctatcgaggaatgctcacctgacatagagagaggttcagaatcactttcggaaagaaaatgttgaattggggccncctttccccccaacccttgggggccttcctttgggaattcccttggggcctaggccagttcttgcgcacagaaggagctctaacagggcatgcaattacatctgcagcaaactactccttcgtccaaaagaaaaaaaaaaaacaaaccctgggttttcatgtccaactttgactatccgttttatatgaaatttttttataattcgtattttcattgttgttagatgataaaatatgattaatattttatgcgtgacttgtctttttattttttttcataattttttcaaataagacggacggtcaaacgtttggcacggaaaccagggtttgtctttttttgggacggagggagtaggttactatctggagaacgacaacaatgcattagcaagaatgcaagggttgcttgccaggagctatgcctgcctgccatgccatgatgccaaggcctgcttgttgtacctaggcatgtttcccagcaactacccgattcggaggagaagattgttgatgcgatggctggctgaagggcttgtcagaaaacggcctcaccctcggcttggcgacgcggcggtcaacaacttcaggacgttcatggaccggaacatcgttcatcctgtcggtgtgagcaccaacgacgaggtgaagacatgccagctgcccgggatgatgctcgagttcatcttgcacaggtccatatcggagggtttcatcacactggtttctgatgagaatgtgatgcccaggtatgcccctcgtcgtctcgctgtccaacttagcactgctgctgtgaaggacaggctaggaccaagaagtgatctctcttttgtccggtctctcatggtctccggcatagcatcccaatgtgttctggatttcagcaggtacaaactgctcaaagtcttggatctggaacaatgtgacggattgacggatcaacatctcgaaggcgtatccaatttgttgttgctcaagtatcttagcctcgggggagaagttaccatgctccccaagaagattggaacactaagtttcttggagacacttgatgttaggagagccaaggttgatgtgatggtgttcccggtcgaagcaatagtgcttcccaaattaattcacctctttgggaagtttaaacttttcggtaaggtatcggataaaatacttaagtttttcgatgcgggaaaaagtaaactacaaactttagccggatttgtcacagacagtaaccaaggttttctgcaactaattggtcatatgaagaacctgaaaaaaattaagatatggtgccggtctataccagatggaaacaactttcatttgatttcaaatgccattcaaaactagattgaagacggcgatgacttgaacgatgcccgttctctgtctgtccatttcaacgaatgctctgaagacatcatgaatttttccctgcaaggagcctgcaatctttccacgctgaagctccaaggtgacctgcaccaaatacctccatttgttccctcattggtagctctcacagagctatctctgacatcgactactcttcggcaggaactcttaactagcttgactgaattgagatgtctagtttatctcaaacttgtcgcgcaaaatctcgagggttttgtcataaaagttggggcattccaaagccttcaacgactatgcatggtggttcagaatccatcattccttgaaatccaggatggagctctgccacagcttgtgtctctccagctgatgtatgaaaatttggcaaaccttcctttaatcaacattgggggcatcaagcgtcttagggaagtggtgcttgattctgcggtaaatggaagatcacggaaaaactgggcgaagaagcacgcaaatagacccagaattttgttcatcgaaaggacgagaagggccagatcagaacattctgttgcacaggcagaaaaaccttctacacttcatcgg

SEQ ID NO: 17714 - DNA, 3434 bp, Oryza sativa
cgcggcgggcgcgaaggtcgccggcgacggcgacgccgctccgtgcggtcgcgcaagagagaaaagaagagaggctagggttcggtcggccggaggctggggtcggggttttgtccccccgatctcggcgcccggccgtcggatctaaaccctagccgatcggacggcgacggcggctgggccgaaagcggcccaagaggggcgcgcgcgcggcggtttcccagcccaggcccacgttgcggcctagggggtaaaaagggggagcgcccgcgcggggccgaccgggaaaagtccatttgaggtccctcgggggccgaaaataaagaaaagagaacagtagcaatttttcctttaaattttgttaattttcatgcaaatttcaatagaatttgaatagatttttgcatgttttacctctgtttaaatttgaaccaacgggagaatttttacagagagtaaattacagagttttgctactgttcatatgaattttatatagtttttccgttgcaaatagataaaattgatgaaaattagtgtttctaaaattaaatttcaaaccaacgggagaatttaattttaggaacattaattatgtgctatgatgttgtaattttctgaccaacgttgataattgcaatgttatagttatggttatatgtgttatgtctatttctgcccaacggtgatgtaggcttaatgcataatattttaatgttaattttgttctcaccgcacatgattatttcaggtggctactccttgatgggttgcattaaagatattctgaccctaaaaggagataactacgcagaatggaaaagaaaactcgaccttgcttttatcttgggagatgtggactgggtgttgactaccccatgtcctatagaacctgctgaacttattagaggtgaaaatgagtcagatgctgattggcaaaagagacagagggacaatgctcctctcgtcatgtcgtatgacattgaacaaaagaaatggtccttagccaacaagaaatgtttggctgtggtaaagaatacgattgagccaaccatattgggctcaatcccagagtgtgacgctgtctcagagtaccttgaaagaataaagagccagtttactggctcttcaaagacttatgctacacagctgatcaagcagcttgtgacagaaaggtaccatggaggtggtgttagagaccacatacttagaatgagcaacatggcttccaagttgaagccaatggatttgggcataacagatgactttctggtccatctggttatggcctcattgccaaagcaatttgacaattttattgtcaactacaacataagtccagagaaatggaactttgagaagctcattgccaattgtgtgcaagaggaggagagaatcaaagagtcaaatggttgttcaattaactatgttaaagataacaaaaaaaagaaccacaagtcgtctcccacctcaaaagctaaacagtctcagcatctgcctcagcaacaacagttcgctgttgagaaagatcagtgtctccactgcaagaagacaggacattacaagaaagactgtcctgacttcttgaaaatgatcatggcaaggaaaggtgagaacattattacatttgtaaatgaatctcattatattggttactctagatacacatggtggattgattctggagcaactattcatgcttgtaattgtttaaaggcattccgttcaacgaggactacgcaaagaagagaaagctccattagagttgccaatggagttgaagaaaaagttgaagctgttggagatcttcctctagagctcgcgaatggcttcacacttttacttcgagatgtcttttatgttccttcttagcaaagaaacttaataagtgtatcaaagttggattttgatggatatgattgccactttggaagtggcaaatgtgaactatggtataataatgcatgtattggtcttgttgtgttgcgagacgagctttatttgttatctctttctgagaatgtgaatgttgtgtcctcgttgacaaaagaaaacaagaaaagaaagcgaactcccgatgtctcatcgaaattatggcactgtcgtttgggccatatttcgagggggagaattgagagactagttaagaatgaaattcttcctccattggagttctcagacttagaacaatgcatagaatgcattaaaggaaaatttgtaaagagcatcaaaaagggtgcaaaacgaagcacaggaattttagagatcattcatacagatatttgtggttcatttcctgtgaaaagtgtggatggctatgactcgttcataacattcacagatcattacttccgctatggttatatttatccaattaaagagcgatcagaagcattggataaatttaagatattcaaagctgaagttgaaaatcaacatgatataaagattaaagtagtaagatctaaccgtgggggggagtactatgtcgacatacaccttatgggcaagtccatggaccttttgcaaggttcttgctagagaatggaatagtagcccagtattcaacaccaggcgaacctcaacagaatggggtagctgaaaggcgcaaccgtacccttatggatatggtgcgcagcatgatgagctactccacactaccactgggtttatggatggaggcgttaaaaaccgccattcatattctcaatagagttccaagcaaatcgatgcccaaaacaccgtatgagctatggacaggaagagtaccctccctagctcacctccgtgtgtgggggagtcctgcagaggccaaagtatttaacccaaatattgggaagttggatcccaaaacagtcagctgccattttattggctatcctgaaagatcaaaaggctatcgtttctactgtccaaacagttatacaaagtttgtagaaacgagacatgccgtcttcttggaagacgaaatgattagggggagctcggtagttcgagaaattgatcttgaggagaggcgggtgtctgtacccgctccgtcgactcaggaacctttcttctctctacctgctgatgttgtgcctgcaatacctgtcattgatgtaccagcacctgttgttacctctcctgtggcaacaatgaatgaaaatgaggaacctgttatacaggattcaacagaaatggttgccacaccagaggaggagctgcaacagcctcaaatagataatgtgccagtacaggagactcaacaagagcctcaggtacaggatgtgccaaatgtgcaggcccctagaaggtctgaaagagtcaaaagatcggctatccgtgatgactataaagtttataatatagaagagttgcatatggaggatgatcccacctcatatgaagaggccatgagaagcgctcgctcatctgaatggttggaagccatg

SEQ ID NO: 17715 - DNA, 2048 bp, Oryza sativa
aagcaaggaaactgctatacaaggagttccctgaacactaccgttggataaccggacagaatgtgtgacagaaaaggaaaacggagagacgccaagttggacggattgtgtacactcaccctgcagaggaggagagatactacttgagagtgcttctcaaccacatgcgaggtgcaacctgaagatttgaggacagtgtcaggtacaacgtactttacctttagagaggcatgcgagaagagagggcttgtggagacggataagtcacatgacgattgtttgaatgaggcatccactttccaaatgccatctgctctgcatcgattatttgcaaccatattggtattttgcgaagtcactgatatccgtgcactatgggacaatcacaaggctgcaatgtctgaagattacagccgagggaacactaaccctgcagcagtagagcagatggtgctacgagacatacgtgatttgctttattccatggggaaggatatcacggagtatggtcttcccgaggtcattgatataggtttttttatactatcacatctttttcttattggtttacatttgcaccacccaccaatagtttcatgatgcatatatttgttttcactaatctcaggtgaacgttgcaatgacgtaatgacagagattatagaggaacttaacgtgctagtggaccaagaccatttagacatatacacaacccttaatgatgagcagcgtgcaggatttgatgagatcattgatcatgtaactaataagaagagccaggtattttttatcgacggcccaggtggcactggcaaaatatttatgtaaaaggcacttcttgctagagtgcggtctgagggattaatagccattgcaactgcgacgtcaggtatagcagcgtcgattttgcccggaggacgtaccgcacactcgagattcaaaatccctattaatattgctcacaacagtatgtgcaacttcacgaagcaaagtggcaccatggaattgcttcgcatggcatccttaattatttgggatgaagctgcaatgatgaagcgtcaagccgtagagacacttgataggtatcttcaagatattatgggttgttcattgccatttggaggaaaggttattgtttttggcggtgatttcagacaggtacttcccatggttacacgtgggacaagggcccagataactgatgcaacattgcagaggtcgtatttatgggaaaaatattaggaagatcagattgtcgcgtaacatgagggctcaatctgatccatggttttcggaatatctccttagaattggaaatggcactgaaaatactattagagatgattacgttcgcttgcctgatgaaattgtgattgcttatggggatagcgaggattcagtacacaaattgattaatcatgtgtttccctcgcttgatgatgaaaagaatgcaagctctgcatcttatatgagcacacgtgccattctatccactaaaaatgattatgtggacaagctgaatgcaaatatgattgatagatttccagggcaggccaaggtttatcacagttttgactctgttgatgatgaccctcacaacagttatcctctagactacctgaactctatcactccaaatggtctcccaccacacgagctaatagtaaaaatcaattgtcccgtgattcttcttcgcaaccttgacccaaataatggattgtgcaatgggactagactaatggttagagcttttcaagataatgcaattgatgctaagattgttggtagacaacatgccagcaaaagggtgttcatcccatggatccctttgtctccctccgatgatatatctctacctttcaaattcaagaggaagcaatttccaatacgtctcagtttcgcaatgactattaacaaatcacaaggacaaaccatcccaaatgttgggatctatcttccatagcccgtgttttcacatggtcagctatatgtcgcattgtcaaggggtgtgtcaagtctaacaacaaggattttggcaaagccaaaga

SEQ ID NO: 17716 - DNA, 2295 bp, Oryza sativa
  unsure (1)..(2295): unsure at all n locations
gggcagcgcgaagggccgggcggctggcggccttgctgcggtgcgccggcgggcggagggccgggtggcctcacagcggcgcggagggacgggcgacctcgcagcggcggtcggcgctccggcgggtggagggccgggcggcctcgcagcgggtggcgcagcagcagcagcaggcgtttctttgtttttttttgagaattcgtgattcggatctgagatgtatttgatttgtgtgtgatgtgaatatgtgatgtatttgtgatgaattttgtagaagttgtgatgtaattttttttaagattttgtgatgtattttatatgatcgatttgaggatttgaggatttggggatgattgatttaggattttgggatagggatggagtgaaatcaatatattaaaaacaacgaagaaaagaatagaataatggagcaaccggatctagctagcctagctctattgttagtactaaaaatgttctatctttagttccggttggtaaccccaaccgggattaaaaatggatttttacccccggttatttcacccgggactaaagataacgatctttagtcccggattcgtagtcccggttggaaaaccgggactataaagggttatgaaccggtagtaaaaagcacttctccaccagtgttactctcttagattggaaattatgcatgagaatcttctactgtatagattgaggggcgagatggggagggaggcaaaagaggtaaatggaggttttcacagaaaacaaaggtttttttttatgatctaggttcatgatgttcttggtgcctattgatttaattaggtaatgtttaaaagtttgtgctctcaggacatatcttagatgggagcagtggataaagaagttgcagttcattaccattggttcaaggtaacaacactagtttttttttcctatggaacgtattctaaacaaacattaatcctttctctcatttcagacanannaatnctcttnaagnnnaaattcccacttcagtatttttgtgcaatgcggttttcattgggaccaccggaaatcacttaattatgtaggaaagagatgtggaaatcctatgatatatgcaactganaatagtaatgcttccgtacctcctaaagtgaatgtgatgcaacatagatttttcgaatatttatcaatatggccctttgttctacataattagagtaggttgtatatttaacagttattattcatcgtttagacaataattgtttggtcgactattatgtagtaaagaattcacagctctacctctttgccaactactatatttggtcgaccatagatatcaacctggcacttcacttgattaaccactaagggagcctcccatgtgatgtttcataaagaggttgaattgttacccatttgcaaacaaatacgtatagattgagataattttcatgcatttttttttacttttgttctcctactgattttcctattataatattacacggtttcttttagatgaccacatttgctggaggtgtatcatccatgcaggcgcatggaccaactgaccaccatatacatcctcctttcaaggatggatttggtccctctatgaaccaaacaagttttttttgttcgagaacaactttctcaactatatgcccttataacttctctcatggttagtatcatgcttcggttcttgcatgcgccatatttcatggattggaagtagaaattgtgcttagatagggttattgatgcttaatttttaccttggcgtgcttaggccgatttaagtcctattgtatccttatatgtatcaccgtatcaatgaaagatgacaggcggagagctcctgcaggcaataaatttcctatggtaggatgagcctatcaagttctaacgggatgaaatacaccgagtttctggtaagataattggtttgccagtcatgatggatctgcaagcaatattactgcagtccttcttggctgaaaataaaaatgttgaattgctgcttcatgctttttcaggagtaaagccagagaggctggtacagggtctatctcctagatattgtgcattatctctggttgtggaaccaaatatgtatccagagataaatgttctgattgttgatctacaccgtaggcacatatctacatttcttgtcagtaatgcacagtttcctgataagattaagacattgaaaccaatcaatcatgtcatattcgaattaagatatgttttggcatttaagtgctcaaagcaacaagctttaaagatatctgtttatat

SEQ ID NO: 17717 - DNA, 9032 bp, Oryza sativa
tttttccagactttttaggtcattaaaatgcaaattaattttatttttttctactatggctactcatggagttgctattcgaaaattaatcaacttgtgtggactggttttcgttgcggttagagtgtaattgggaaatggttttgtttttacctactataatatgtgctttggattaagaaactgcgtatgctgccatgttgtccccctgggttacgtgtcattaatatgatgccatctccttttaccttcgttgtactgaaacatacagaacacttgttttggcaggtataatagtagattttctgttagcatatataggagtagtacactagatgcatgagaaaaagcaatatttttataaataccatattgttttgtcttctctgttgatttttgcaggacttctatggttggaattgatttcaggactccattcaaaaaatgtgtggcataaatggaatgatttatggtagttgcagagtcactaacaagtaacacccccccccccccccccgccgcggcccccctccttcaaatctgaacttgattggttgacatcgatgaggggagtacactttatttgtctttttagaatgattctttgctccttttttaaaagagtccaaatcagccaatccatatcatttgtatgaatccaatacagacgcatgaagtaaagttgtttagtgactcaccagcccaggttattttgagccccggaggatttgcactgtcattactttatatgtttagtacactatatattgatgaagaattggagactagatagttaatttacattctgacattaaacattgcatcacaacattgcaatgattttagtttccatacatgctacatttcacattgttaaatgccaggtcgatcaacacattggagaaataagaaatatatgtgacaatttgcgcttgaggcaagctcatttttgtacccatgtcattgttgcctgcagtagagtgacttcacatggacctaataggcaaaataagctgacaagacttatcatcttctgttggaaacatggaatattgagcaaatggcatgatacttctgttaccatgtttaaagacacttgcattacctctgttatgtaatcttgatgatgataactatttgtatattcatgttttggcaaaaacaagtcatcgttgtagtgtatgttttgatcaaaattgtggtgtatattttgcaaaaatatgtcactgtatcgattggtaatttgttgattatgtgtgctcattttaggttatatacgcactgttaattttattaagtacatttctgttcgagtggtgataactatgatttttatcaaaaccatcagaacccgtattatgccattatgttatgtccttctagtctgaactaactgatcaaaaaaaaaatcatatttgatattcatcacaagtatatctatcttgggcacgccctatttgaagtcacgtatatatgcttttcactttctgcgatgtctttttgatcgatcgcactaaacacattactcgcgcacgtgtcgcagctcgtgatcctttctacttacctgtcaagaccgcattctagagttatttgaagagagctacacagcatatcgagccaaacactctacacatcagctccaactccaactccaacataaagcggccttacaagttgcagttggagctggacccctgccataacatatattgaaccaaagggtaaggagaagaacaaaccaagcatacctagtaaaagaattagggtgtatttcgttgcaagccacactttgccacagtttgccatgcctaaagttaggcaaatttgacaggtgtttggttgtagccacagttgtggcaagattcccctccaataaattaggtcccacgtgtcaatggctcaaaaaagtgtggcaaggttctattaggcttagtagttgtggctaacaatttgatcacttcaccttagacaaagtgtggcaacttttattggcaagtaatggcaaagtatggccgagaaccaaaacatccccttactgctactcctggggagaaagtagtaaacagaaaaatagaaacagctgaatttcagagtagccagcatgcgacatttagaaaaacacatccaatatttcagtatcaacacaaacttaaaatgctgccatcagacctacaccagtgaccataataagagtcaaagttaattagtcgctgcctgctaatttgggctactcagttgcgcaagcatcatcattaatcataaacaacaaacagattaaactagcaactaggacgcgaccacgtctgatgttgtgatgaatttttaaccatctgaacaagatgatggccccttggcatggtccctggcatggtcaaagtagaagaaatcttcttgcaccgcacccctgaaattagagaccaagaggccattgttgaagacgctctcgatgctattggtcaaaacgtgcttccggcgtgccatcttctcgaagtctgtgtcgcacccatggtagttcccatcagccgggtgaatgatattaatgcctttatactcacagtagaagcaccggaccttctctgcaatgaatgagaggaagattaagcgaacattcaagagacaactgttgcaaagcaagcacatgtgtaagctagaacatgcaggtggacttcttttctgggtgtgtgtgtggggggggggggggggggtaccagttgcagttcagttactagcaacattccttggcaaatgagactagttaaagacatgtcaaaccaaaagcaccgatcaccgataagcgaatgagagacgcaccagcatttgttggtggcacgacaacagggtagcaattgttcttcctggcacggtcgctttcttcattgtgatttacgcactctgcaaagaaaagggttggcaacacacccacagcacttggcccagtagggctcgccaagaagttaatgtgggaatagtgaaatttgttgtgcgatcttggccagttaatcctgctaagctctgggccattgcggtccgcgacactttcgttcgcaccacagatgacatggatcacatactgagggccctgcaaacatacaaaacagttcaattttgtaagcacaaaaaaaaaaaaaaaaaaaaaaaaactagtgatgagaacacagaatcagagaaaaaagtgagccataccccgttctccagaacatagctttccaatgcggccttcgccttgctgtggaaagagctcatgtcagcccagaagcgcttggtagcatcagggaactggtcaatggtccgttctgccgccaggctcaaacgtaccagctccggtggcatcccaagtgacggtggtggttcatgtaacagtgactcgatgacggaatgcacatcctctcgggagaatctgcgatactccatcggcagcatagcacgagtgcgctcagatatgaggaactcttgtagtccatcagcgctcgggtgctgagcagcaatggccatcacgctgtacagctgcaagcgcttagccataacatccatgaagcggcacagctcggagtcagacagcattgtacgttcttggttcaggagtgcttgctgcagtacgctcatggcagtggcaaagtccccgttggcgtagaggaggcacctgatggcttggagttcagagaggttgtagtccccggcaaaggcaatgaggccagcgacgaggccagcaacggaatagcgctcagcacggaccagcgcccacctgccaatcatgtccaagtctaggtgctgctccttggggaccgggaacgcggcgtcgtaccagatggtgttgaggatgatgttggagacggggtcgagtgggccgtagcagtggccggccatgacaacgctgcggtggtaacggccgcggagaaggtgttgaggtaggagagcgagtgcctcgaggtagaagccgtggattttgtcgacgagcacgcattgcagagacttggtgcatcgttcgagtgttctctcgtccttgacggtgacaccttgcggggcgagtggggagaaggtggcggcagcgtcggcgagctcgggtggcaaccttggaggcacaagagccatcagttgttgagtacaaatttggtcattggttccttcttctaggagaaggtagctgaggtggtccacgtctgagcaggtgagacgacccttcctagacaagagatgggcgatcttgtgggctttggaagagagcgagagcatcgccgtggccaatctgtccgggtcggggtgacccgaggcccctgcggcgcaccggagggcggtcttggtggtgcaggagccgatgtcgaacgcgctcgtgcaacgttctgcctccacgaggtggacggcggcgaggaggtcccccttggcggcgcgcaggaagtgcatcgcctccatagtgggcagatagcggaagtaggaggtcatgaaccccacgagggctttgagagacccccgcgccatcgtcttcaagcactgccgcatctcaacctaataaacatgttcgctagaatcctcaccggtgctgaggtgccagatggcgttggcgacgatgttggagacgggatccagggggccgaagcacaaaccgccgtcgaggatggcggccagcagcgccggcttctcttccaccgggaggcgctcaatcgcccttgtgtagaacccaatgatgcatcgtttcagcaccgatttgtcgcctccgccgccggcatcgggcaccggctgaccggggccaactcgtttgctggccataggacggcgtccgcggcgagagattggcggatttggattcggggggtttcggtttgcctacggatttgggaagaggcccttttctccagtttgtatgggcgacgaatccgcaagtgtgctttgtgtgtgcctgttgatgagccgagctcgagctggacctagacttgagccgagcctctacaatggtggtccagcttgggattgggctcagcttgagtttcgtggagtatttgctcagcttggggtgtgattggttggtgggatatacccggatagaacatggccgccgctttttggaggttgtttggttgctgggcgaaagtgggatagggcggcccggaggggaatattcccctcagatgctggatagagggatccggccgatttggccggatgcagccgcccgaggctcgggcgagccgggcgagcgagtcatgtgactcgcgtcacccctcaccacgacgacgcgagcgagacggcggatagggtggccggcgcgggcgccggcgcgggcgacgagagaggaggcgagcacggcggttgtcgggggtgacgagcgcggcgaccggcgagagagaaggagagctcggcaaccggtgtgggcgacaagagaggaggcgagctcggcggccggtgtgggtgacgagcgcggcggtcggcgagagagaaggggagctcagcagccgccgcgggcgacaagagaggagacgagctcgacagccgctacgacgacgacgacaacgatgcggacggcgagcgccgcgtcggcgtgaggaggtggcggcggccaccgccagcgggaggaggcggctggcgggaggaagcgacggtgagaggaggcgagcggcgggaagaggcggcggcgacgagccccagatccggccgtgtttttttttcttttttcttttctctttttttcttttttctacgtgtatttataatggaaatagtggtgtaaaattgtattatgtattaatttgatggagtatattcaccatctcaagtggagaggtgaccacacactaaaaaattggatcaccaaatccaccttcgtccctacaaccaaataaaaaactggattgccatattcacacaaccaaataaaaaactggaccgccatatccaacaaaatatggaccaccatatcccatccaaccttgaccaggaaccaaacaaacccttgatgaaccgatattgtcgtttcgtggagtatttgctccatatcctccatctgctactaaaaatacaaatacgatttctcgcaaaaaaaactttttctattacattattattgtttaaaggcccctcgtttgttctatttttttgagttctaaattattacatttattaattcggaattgctaaacttcagttgacagaaaacatacctccaaatcttgcaaattttggttcactagatatgcttcgcgattcgtgctccagctgctgcttctccagcgctggcgacaccctaggatgttgagttgtgatccaaattcatttgcacttaataaatgacaacttctgccgtagcaaagcggaagcccatcgccggaggcttgggccttgaagctggcccattgggttgtgcacctagagacgcccaggggtgcgggtgtggagcccccgcggtacggatcgtcttcccttttagggttccacctcatatatatatatctcttgtaagccgccgtgcgacgttgtaacctcaccccgatatagtgaagatattttgttggctagcgcccatggttttttctctcctaatttggaagggttttccacgttaaaatctcgtgtcttctgttattgatctattattctttatcgtttgtttgcctatcgtttcctaacataggaccctacgggctagggtctcgtggtagggtgggggtgggaggggtgggagggggaggaggaagaggaggagttcgctggttttagagggatggccgtgggaggcggcagcccagcggtgggcggtagatcgggcaggcggcggcggcggagccacgggatggaggagggtagtgggccggcgttggtggcaggggcaagcaagcatttggttaggaggcagcgggcgatggttgcggatccggcagatccggcagcggatagctgccggagacggggaaggcggcgggcggtggttgcggattcggcggcggggagccaccggagatggggaagacagcagggcgggggcacctcgccatcgccgccttgaggagaaagagacgggggagggggagagaggatggggagggggctcgccggtgccgttgactctttccggccaaccgacgaggcgagtggcggcacgatggggtggtggcggagggggatcgcgcgagggacaggaggagtggtggcagtgtgatctggacgggggaggaggagaggagttagggttaaggggtctacacgaatcttgaagcatatccaatggtccaaaatttgaaagataggaggtggattttctgtcaacagatatgtagacaatcccttattaattttacttcctaaaatattcaatttatccttatagtatgcatataatccttatggctttgccacttgtttctccccgtagcttccatccatgctcgatctaagggagtggtagacaaaattagaacaagttaaaaagatcaggatcgagagaaaaataaaccgcaaccaagaaacacggttagggcatgttcaatggtagagatgagtatggtctcttaaacaatacaagattatttagagaccatgtctttacaatagttgagacgacaaaggttccaatcattaactcaaaaaatatttatttttttaatattctttccattcttttaccctcatacaaccatatttctatattatattatagtgattaagagtcgttgttaagctattgttatgcatgacaacgatgttttgtctctccttttttctttcttccatgtcaacaagtattcttaattagcaatgtattgacaaccatcgtacatgtccttaatagtttggtcctagctgctaagtgaccgaatgttattccgttaattcggccaccacccttggttaaccgaataaactaaattcggccaaataggcccaatacaatatacagaagacatcagcctaactagcagaaccctaggcatgcactgcatggggattcctaatcagcgcgtacgcgcgaggagcggaaccggcatgcactccccacaccggcacgtggcccgtacgtcaagtacgaatctattaatagtgtgattagcgttaataatagtgttattaaggaatttgtataataaaaaaataaataataattgagttgaaaattttaaaatatcagttaaaagtattcatagtttaagttgaaagttttcaaatttagacttgaaagttttcaaatttaactaaaagttttcaaattttgagttgaaagttttaaatttgagttcaaagtttgcaaatttagagttgaaagtttttaaaatttaactgaaagttttaaaattttgacttgaaagttttcaagtttgtcttgaaagtttttaatttgagttaaaagtttttaaattttaagttgaaagttttcaaattcatgttgaaacttttaaatttggatataaagttttaagtttcaggtagagttttttttaaaaattctaattgaaagtgcaacggaatgaaaaaggaaaaaaaatacaacgtgattagtctaattctgatacggattaaaaagcgaaaaattagactaatcatgacgtgcgtttcctattaccgtgctaatcgcgttttttttcctcgaactccgattttgaccaccgcgctaacgacacgtggatccggtcagtggcggatgcagctttaaaaaaagaaggagcaaaaatattcactcgataaaaacaatcgaacacaatacgtaccacgtactatatttatattgcaattgcataagaagcatagtacattcaataatttaagggcaacaaagaaattcaggatggtacctttcattttaaaagaaagaaatgacctttccaccatttataattcatcacacaccaagctgataacagaaaacctgtcaatttgcaaacacaagtccattgataagacatgggagatagtgaaataatcatcaaatctctttaaaaattggttgatatataactatataaggagatgcacctctaataaatcactaggcaaatctattattcaccgttcgtccataaacttcatgatataccttagaaattaggataaaa

SEQ ID NO: 17718 - DNA, 14454 bp, Oryza sativa
  unsure (1)..(14454): unsure at all n locations
taatgggtggttccgcccctggtggacgtatgcgcgcataagctatctggcgtgtatgcgctaactagcaaaaccgcactgcatccccttagtcctcctcactccttatcccgatcggccgatcccctcattcgccaccctcaggcaccgccttagcgtcaacccaccatgtgctcctcctcgtgcttgatgtcatccttgcctccttggctctgcaacacctgtcacaccctgacttttgtgtcttccgttttttttagcctgtttgtgaaaattcacatttgatttgttcgtcttaaatagcttaatgaaaacttcattaaatcaaaatggtttaatatgattaattaattaattacatcgttggctttgttgtttttcattggagttaattggatttaatttttttaaaagtggagctcaatacctaatcaaaattccacccaaattcaattcctaatatcctaaattctccttaaaaatttcaaatattccagaaaagtctccagacttttcccttattcctttttccttcctttctctccctttaccacttctcttcttcttcttcttcttcttcttcttcttcttctcctcctcctcctcttcttcccttttctgttttcttccacctttttcctttggccatggagccaaagctacctctctccctttccagcccgtcccggggaggccaagccccgagcccgggcatcctaaataggcccaataccattcaaagcaatctcaaccatccaattcccttgatcgagtcctagcgatgggatctacgaaatcccatccatctcagccctagatctatccacatcatcaccatgtcatccatctcatccccacgtggcatccacatcagccggtccatcatacaccgagtccaccgtgagccataccactgactaatgggcccacatatattctctttcacaaaagtaattaaatttctgaaattaaatatccagagaatattattgggatattctttttcttatccaaagattttctccaaattcaaacttcaggaggtcacaacttttctgtccgaactccgattcaaccagtcttctttcttaattcttctaaaattgagatatacctcctggttacatttgttgttttgtttgatgttaattagttagtcttttctttttttttatttgtttctcgtttgtcatcatgtagacgttggaccaaaggtgttgttcgttgcagaagacgcagtgtagggacagtttttggatgcaaggcaagtgcactctttgaacgtattgaacctagtttataaaatattttgttttgaacatgcatgattttatttataacttcttgatgacctaatcgttataatatcccgtatttgattaatattgactcactatgatacctctatcttgggctcaactcaagatagagtagctatgcttagccactctctaggttgttttataagcaaaatctaattttgattaatcatatacttatagttatttttatatgaactatgtgattgtgtgatatcttcccgttttatgtgttgcgccgtgtaataaacaataggtggataaaatgatttggactaggctgatgggtggttctgtgtgtgaacctagttaggtgatgatgtatatgtgtgatcattatcaagtatggtccctgtgtgagtctactatcaagctatgtgctatttagttgctcaaagggtcaacttcgtgttcttaagccgttaccttatattgtgtgctattatagttttggcaagttgtcttgtcaatttaggacttcacttcataagccattaatccgagcctaacatgcaaccacattgttctcatggaaagaaactggctcaataagattccgagtcttggcactgtctgcccaggtggctagatgataggcgttaatgttagacataggtacttttttgtctgtgtgagggaaactgtctcatgggggaaggtagtgttaagacggagtttcttgttccagactccacacacaacctgaacatagttttccaatgcggccttcgccttgctgtggaaagagctcatgtcagcccagaagcgcttggtagcaccagggaactggtcaatggtgcgttagccaccagccccaaacgtaccagctccgatggcatcccaagcgacggtggaggttcctgtaacagcgactcgatgacggaacgcacatcctctcgggagaatctgcgagactccctcggcagcatagcacgagcacgctcagacacgaggaaatcaagtagtccatcagcgctcgggtgctgagccgcgatggccatcacgctgtacagctccaagcgcttattagccataacatccatcaagcggcacagctcggagtcagacagcattctagttcttggttcaggagtgcttgctgcagtacgctcatggcagtggcaaagtccccgttggcgtagaggaggcaccggatggcttggagttcagagaggttgtagtccccggcaaaggcaatgaggccagcgacgaggccagcaacggaatagcgctcagcacggaccagcgcccacctgccaatcatgtccaagtctaggtgctgctccttggggaccgggaacgcggcatcgtaccagatggtgttgaggatgatgttggagacggggtcgagtgggccgtagcagtggccggccatgacaacgctgcggtggtaacggccgcggagaaggtgttgaggtaggagagcgagtgcctcgaggtagaagccgtggattttgtcgacgagcacgctttggagagacttggtgcatcgttcgagtgttctctcgtccttgacggtgacacctaatgaggcaagtggggagaaggcggcgagctcgggtggcaaccgtggagggacgagaaccaatatctgtcgttgagtacaaatttggtcattgctttcttttctaggagcaagtggcggagatgctcgacggctgagcaggtgagacgatccgccgtcctagagaggagatgggaggcgatcttgtacgccttggagaagagcgagagcatctccgaggccactctgctcgggtcgcggtgacccgcggcccccgcggcgcaccggagggcagtcctggcggtgcatgagccgatgtcgaacgcgcacgacatgcaacgttctgcctcgacgaggtggacagcggcgaggaggtccccctcagcggcgcacaggaagtttagcgcctctagtgtgggtaggtagcggaagcaggaggtcatgaaccccacgagggccttgagtgacccccgcgccttagtcttcaagcctcgccgcatctcaatctcatccacatctgcaccggaatcctcaccggtggtgaggtgcctgatggcgttggtgatgatgttggagacgggatccagggggccgaagcagaagccgccgtcaaggacggcgggcagcagctccggcttctcgtccacgggggaggcgctcaattgcagcgctgtagaacccaacgatgcgtcgtctcagcaccgatttgtcgcttccgcctccaccgccggcagagctcacatcgggcaccggccgatggggcgaactcgtttgctagccattggacggcggcgtctacaatggcggagtcaggatctcagtacgcttagggctcaaatcgaagtaatatccatgataattcatatgctgaagtacaaagtacagaaaaaataaaagagcaaaatcaaaactaattcaattaagagatatatatatatatatatatcaatggaaaaactcgtgtctatcacttcttaccatcttcgcaataaggctaccaaggtcagagcagcttgagaaatccaaatcagatctcccgtcacagataaatgtgtcagttggtctctaatgactgtacaatcatatttagaaaagtgacataaatcttagcaagttcaataagcttatcttcatcataattggcgaaagaattccctagatcaaggcaaacaatgcatctcaatagctgagtaaacctttcagcacgatggtttaaatcaacaataatttgatcaagtaccacattaaatatttcattgctgaaatgatcaacctgttaacatggacccaacaacaaatactcccttgtagcagcatccctaatgtttacatccaattgttcgattggagtgagaatcccagggtcagcaacaatcacatttggagcaagcacaacattattttgccaattgttactagcctcggttcctgctgtttctaggggttggatggactcactgcaccggacttggtagaaaataatggtattaatgttcaggtcctcttcatctaggaaatcaaacaaatttctaattgactaattgctatgaaatgcagaataagaatgcaggtcgaaggttagagaggagactcacctggatttgaggaatcaggctcttctggctgctgccgtcggcccatcgccggctcgatgccaatgcgcgccaccgccgcccccttccaccgatgtgatcgatgctgcgagaggagagggaaggacgaggcagcgtgatgcaacgctcgtgtgaatggtggtgcgtgaatcgtgataggcggcagggggagaggagaggatgtgggagacaaagtgttggcttctgggctgtgacctatgatgggctgctcggccatgggtgtttgcgaaagtaataagttcatttcaggtctctcaatttatcaccgagtttgaaatttggtcccttcactacaaggtataacacatctcgcaacatacaaaacctggtcacatttagttccaaggtagtattactctctattttggctgacgtggtggctgaatcagtgtgaaacccatatgtcagggcgttttggtctttaaaaacaaataaaatttggtcgatcccatgtcagtgacacaacctctccttctcctccctctgtttcaacgttctccaacccggaggacacatgctgccgacgagacgggcggtgaccagactccctccaacccgaagctccacaccgcaccggccatgaaccacaagggagccaccgcctccaccagcgccactgccgccaattattattgctcgcactccatcggcgtcgctgccaacgcatctcggataagatcgatgctgcctcctccccctctccaccaggggaaacacaagcgaggccaactccgacgtggtgctcctcttggagcgtgtaaagccgacccactacaggggcataacattctgaaaattcctgacaataaaaatcactaaaatttcgaacattttaatacttttgcatcatgttggttgttaagattgcgattgcctaccaaaccatgaattgtcaaaatgaggaatcaaattaaagatatactcccagcaataattatgacttacaattatatttattattaatcatttgtgcacaagacatgaagccaaataaagtacaagttaattaataattcttgtgatacaaattacaaataaaatattaaatacttggattatgtgatgtgtgtcatgacatctaagtgcatatgaaataaccattcaaataagtggatctctatctatgaaatagtttcactaggaataattaatttgatattacatatattatatgagttccaaatattaaattataatgagctgtatagaggtcaaaccaatttaaaaaggacaacccatccacatgaaatgaaatgatgatcaccactataatgatcctatttgtaaatgagtatttcattggaatatgtaagttaatatttggaacatttcatcaagtcccttgtgacataaaatcaactcatgtaaaatagttggtcacactaataaattgagcaaatatatcactatatttataatggacttttggataaaatctagattttggacactaaatattaatttgggtagcttggtaaattttcatattaatgccttcatttttccattcttccttctcttctttttcttttctttttctaggcgcactgttcattatccgccatctgttcgagttggtcccccaccctagccgtgccgctccagccgctgtgcgaaccgcacacgtgcaaccatgcgccgcattgcgcccgaccaagccagcccgtccgcacccgcgcctctcccacgcccgcattgagccccgcgcccccgcaccgaatcgcgcgcgtgcatcgcgcttagccaagaccccgtgccgcgccaatgtcccgtcgtcctgccacaccacggccgccgtaccccaacccccctccagctcacctgccagctagggcatcttgccgaacgccctacccgacgccattatgccctctcgccccccctcctccctccccccccatttctaaccctctctggctcagcctcatccctctcaaccctctccctcactcgcaccctcctgtccctcccacttcacgcgagcaatcgccgggccgcgccgcacgcccggcgtcgagcacgtggagtgcgtgcgccgtgctgtcatcatgtgactccatcaaccgaagccggtggcggggtagggtggaggcatccacacgagctcgctgccactgaggaaggagaccgaagaccgttggattccaaggaccgcacgtcgaacacctccggcagccaccgtcgtcgttcgcccctgcgttgaccgcaccacaaccgtgcgccaccacccttcgctgttgctccacttcggggtaagccctcgcgccctgagcacctcctagtgacctagtagctggcggcctcctcaatttggggtgcgtgccaccgtggctatgccatccccggccgccaccatgccgccgttgagctcaccgtgggcaaggcatcccgggggctatcccctttccatctagttagcaaaaccgaaaccccagccgtcgtagatgctcccgcgcccatcaatttggccggagaccgtccctttcgccctagccacacggtagccttgatgttaccaaagatgatttttagtcccggttatttcaaccgggactaaaaatatccatcattagccttgattgagcatcccggttgcacaatcaggatgcaaaagggttgctaactgggactaatgtccctttccccagcggtgtattttgcttacgatgacagacctgatcagtgacgctcacccgttcatcatcaaccagaggcaatacatttgtgcatcaccatttaaatcatttatgcatgactcatacgtgctactggaatgatggtttgttgtttcacatatcagcagcaatgcacgggatgcacttcatgcaccggccacttcgaatcagcagctagcgacgtacgcaaaagtcttggttctccgttatttagtcccacatcggggagcctggcgcacgggcgcggggtcataagagcgacagtccggatgtgaggcgtgccgaaacgaagggcacacccggcggtaggcatatgtagcgatcccaaaaacaaatataaccggaagaaatcaagcccaccgcagttgcgacatgcgtgcgagcgtgtgacacatacgcttggcaaaaaactatcatttttttttctaaaactggcttgaccagaattatgagcgtccagtacagtctggtagcataccacgaaaaaaccatcattttttttctaaaactggtttgaccagaattatgagcgtcgagtacagtctggtagcataccaccagttggttttagtttgacttacagaatttgaattcgtagttcaaaactctgacacctaacataacgttttggctagcttagagtttggatccgtattgtcgtaactcgtaagaggatgtttggttggtgttacattttaatttggacctgtttagttcacaaacaaaattttttaacgctatcatatcgaatgtttggacacatatatggagtattaaatatagacagttctccaggaaattacgagatgaatcttttaaatgtaattacgtcatgatttaacaatgtggtgctacagtaaacatttgctaatgacgaattaattaggcttaataaattcgtctcacagtttcttcccgaaatctatagtttgttttattattagactatatttaatattttaaatgtatatctgtatatccgatgtggcatgcaggggcaaagttaaatcataacttggctaacatagagtttggatccgtattgtcgtaactcgtaagaggatgtttggttggtgttacattctaatttggacctgtttagttcacaaacaaaatttttcacgctatcatatcaaatgtttagacacatatatggagtattaaatatagacagttcaccaagaaattacgagatgaatcttttaaacgtaattgcgtcatgatttaacaatgtggtgctccagtaaacatttgctaatgacgaattaattaggcttaataaattcgtctcacagtttcttaccgaaatctataatttgttttgttattagactatatttaatattttaaatgtatgtccgtatatccgatgtgacatggaggggcaaagttttttttctaactaaacaagcccctggtcacacttgagatatgttttgagtagctgtgtcacatactctcggcatagtagaaaaaactggaccggacactgaaccgcttaagctcttggttcactgggtcaccggttggaccgataggtcgaacggttcaattgttgaaccggaaagtatatctatcatacataattttacttaaacaaggtgaccaacttagcttggtggtgtggttgatgctcttatagcccatcagccaaggatcaatccccattgtcgaagagtaatcctctctagcgggcggtcgtgagaccccccccctttgtgagttcggccgggggaaatggcgcgatgatcaagggtcaacttccgcttggccatctaatcactagatcacttgcgtggctgtgtgggagatcaaggattatacaggttcgggccgctctcgagcgtaataccctacttctgtgtgtgggattatggtgaattcttacaagaggttttgagctccagagggaaacctagctgtccttcctcccgagctcaagttgtctgagagtcgtcccttttttcggtagacaaggtcctccttttatagttcaaaaggataccacatgcaccgtttgcacctacccctccaagggaggggggcccacatggccctattcataccgctatcctttgcttcaaccggaagcaacatggtcgcctggcttcaagtggggcccggcgccgccccccgcctgacacgggagacatccctatcattccctattaattgtatgaagactttggcggctcaccacgcgcatgcggcgtccctggcagcgtgccgatgggacagggcatacccgcccccactccgcctgacacagggcagatcgtgggggcactgcccccgtcccgtcgcctgtgaccggtcacaggccggtcatgctcgattgacatgggtcaatcgagcggcgccgcacgtccctccacgccgcggttggggcgccgcgtattgaaggcgtggagcagcgcctttcgcctcgcccgctctccccgccacgtggtggtcaggcgagggcctcggggtagcacaccccgaaagcccgaggggtgcgacgtggcaccccaaggccccctggccacctcagcgctaaccgaggggcggggggaggcgaggtcgcatgggggccccccaaaactgnccactaagaatgcggaagaacacttccccttctactgtgcgtaccctcgggcccatttcaccgacacccatgtgacgcaccattttcccattttatggaataaaagggatcggtccccatgtgacgcaccatttttcctattttaaggaataaaaggtaattgggccacaataatccaagtgggcattagcgaaccggcagttcaatatagccttgttcatccggttcacaccggatcgattgcatgagcggtccttaaagcaaaccgaaccggtgggagtgctggttccggtttctttcggttggaccgccggtccggtccggttttttataccacgactcttagccatagaataactggaacgaacagtatatattcatctgccgtagaaacggataaacagagcagccacaagaaacacagagcggcaagaacagaatatatatatatatatatatatatatatatatatatatatgtatatatgtatatatatatatatatatatgtgcgccttggattattaatccgactcacataccaagtcaaccaaaaccaatcagcagcagcagctaatttaatttaatcgatcaacctccactactgtttcctagcgataaccacattactcctccggagcctcgtctccaggtactcgaccacgtcgccgacggccgggagcaccttcctggcggcgtcgagctcgccgaaccgctccgcccacgccgccagcagcggcgtcctggcggcgtcgagcaccctggtccccgtgagcgcctcgttcgccctcgtccgcgggatcaccgaccccagcgtgacgtcgacgagccccggggcgtcgccgccgaagaagggcttcccctccgcggcggcgagggccccctccagcgcccccaccgcggcggccatccgcgccatcccctccgccctctccccctccgtgctccccaggtacgccggcctccacgacgccacgaactcgtcgtcgacgtgggcggcccagaagcgggcggcggcgcgggcgagggggtcgtcggcgggggggaggagcggggcgccgccgccgccggggaaggggaaggcgtcgtcgatgtactcgaggatgacccgggactcgcagacggggcggccgcggtggatgaggacggggaccttggcgtggacggggttggcggcgaggaggaggtcggtcttgcggtcgaggtcgacggcgacgaggtcgtaggtgaggcctcgcagggcgagggcgagctccaccctggtgacgaacgggctagggttcgtgctgccgagcagcttcagctcgtgatccggtgatcctcctcctccggcggcggcggcggccatcgtcgtcgcgcctctgccgatcgagcgatcacgtgttgggcggattggatttttagttatagacgggtgctggatcgagatggttgttctggagtgggaagtccgcgggtggattgcgtcatccgtgatgtcaggacaggcgaatgtatcttccaatgcgtcactgtcgtcatcatcatcatcttacaggaatgctgcaatgcacgtggtgcattttggctttgtgcaatctccgtttgttatcttaaaatggttagaggttgaatggctctcaaaatggttaggggattgggcctctaggggtttgaaatcacaatgttctaacttctaaactgagggtgtgtttagttcacaccaaaattagaagtttggttgaaattagaacgatgtgatagaaaaattgaaagttcatgtgtctacaaaagttttgatgtgatgaaaaagttggaaatttgaagaaaaagtttggaactaaacaaggcatgagaactgagatttggaaagggaaaggtccattctacaacgttcaactcttaaaccgagtccaattagcatataaacggtgaaggaaaatgttcattttaacccctcatcctatcatcgagtttaaactatgtttttaaaccataataccaaatataatgcgtccctcatctttcaaaaacagtataaatatagtcccaagtagtaggcattttttttggccgcagacgtggcaccagaaacaaaaaccaataataaaatatcttacgagccccacatgcgggtgatacaatgttttcttcctcctctctcaccctctcccctctcttccccatctctgtccaggtctccagctcgtagaatggaccgggtggtggccggcaacaggcggggaggagatgggtgacggccccaacatctacgagctcgaccaccacgaggaggtccagcgacctccgctcccgcctcgccgccgcatagtggatgatgcattgctgaaatcagtacatcttggtcctagctaacgtgttcctctacataatggatgacacattgctgaaatctgaatcagtttgtgtactctgcataatgcaagtggagaacagattattcaatcacgaatacagtaatcacccaaaaaaatttgtaaaaccaatcaactggccgaaaatttgtttgaaacaaaaaatcaatcatcccaaattagttcctaactaggagaaaaccaaaataatcaaagattaagaaagcgcagtggcggttcacaggaaattcggagcaaaaaactgaatcatctgactgttcttgatgcaacgacgatgctacttgccttcaaattcatactactaaacgatttttcatgggctcatggcgccatccttttatttttacttacggattaaaaaacaagtgctttaaaaaatttatcacagggatttagggcacgagcagctagcaaaaatagattttcgctcgtggtcattaagcaaccgccaacgaaaattgagtatctaaagagctatctttgcaaaattattatcgccttactataaatgggccatggcccaccacccattacccacccgccggcatcaccttgacctaggagacgagcccctatagcttcggaaacagcgggtggtcgtcgacaaggatgtagttgcaggcgagcatcatgaacgcatcgttcaaatgttgacggtggttcttggaggacgagcaatgggagcggaggtccctgacctccccgcggcgatagagctcggtgaagttattgctgccggtcagctcttctccaccaaccgtcgcccttctaccaaccagcaaccgccccccgtcagttttgcacgccggagaactggagagatggggaagagagaggagaatgtgagagacgaggaagaagatgtttcatccccataaggttttttattatttgcttctacttctgatgccgtgtcagccaaaaccacctatacaatacttcctccgttccaaaaaaatcttaacatagacaaaacatgcccctcctaggttgagttatttttgggacggagggagtaccgccttgggactatatttgtaccggctttaaaaaatgaggggcatgttttgtctggtttcgtggttcaaggaaacttattcaaattcgacgtcaaggtgagagacctagagtaaacttattcaaacggtgaaagacacgtgaaagtccaagaaatacgaactgggccggcctgctaacacactcgcaggccctcttgcatcctttgcaagtacacagctacggcaatcgcgaaaccgccaccgcggtgtctcatcgtcctcgccgccgcctcgtcagtcgtcgccgccactgcgccaccccgccgcgcacggcaggtcgtcgctgtggcttggacggcgaactctctcgacgtttccaccgttctcgttcggggcctacgggccgagggggcttaggtagaatgaagccaatgcgcactcgggatcatggtgcggccgaggtgttcgacgaaatgcctccccggctggggtggggggggggggggggtcagtccgtcccagagcggcgcgttgcagcgacggagtgattcggggagacatccagggcgctgctgctccgccggtgccggtcccttgacgcccttgtcgcattcctgcgtgcctactacgcaccgtcctacctgtcggctgaggacgccatgcggatgatcgacgagcacgccgggatcccactctgctcatagctgcagctcatccttgcgctcagtacctcatcactgatttgatgctatgctgcccagtgccattgtccaaagcacctagtatgtagtacatgtttatctcctctaatcgatttcatccagtttagattatggagttggctgatctaatcaatgacagcgacttggttccatgttcttcctcttctcctgcaattaggtggctgctatggctgtgagattgaagggtttaatctggtgcaccctgacaccgaagatttctatgggcacctggctcaacatgaaggtgatgcctatttctgtaagagaattcctgctcaagagttcagcaatccattatatgaggattgtgtactctttgagccttgaacactaaatattgtgtagcttttcgtagataacttactctggtagggatcatgatgagattgacttctcttttggctattctgctctggttcgacattctgtacagattttagttctccctttgatttcacaatgtctgtcaatagcgtgtttaagatacagtgatctagcttagtagtagattcttgtaaaatatgcaaatataaatgacttggatgaataagaattatattgttcgtgtacattcgttgcaacatggtaatatgttcttattcatgttgttggttacttt

SEQ ID NO: 17719 - DNA, 4571 bp, Oryza sativa
caaaccgcttgtctctccagaagaaagcacgtcaaccacaccctgcaatcattaaataacactatgatcaaataaccagtatgttgaatcatagatgggagacaatgtcaatagttgtggaaatatgttataccatttacctggtatagctcagcccgaatctttttttggttctcaggttttgagtaccaatcgagcctcatagactcgattttgatgtacatggcaacaacccattgttggaaaagtcgtcctccaaacaaaatgatgtttagaagtccccttctaaactgcagcctgaagcaatagtactccctcgctgtgacaaacttgtcctttttccctttgccagatttactactatcgtcattatcatcttcattgtctagataattgtcaacaacctcgttctctgcgtccaaacttacatattaatatacataaacaatgcataaggacataaagtttagaaattattcgataaaagccacgagtgtacgtacccggaagatcatcaaaagtgctttcttcgttggtacgtacatcacctaaagttgatgtctcacaatgttcatccatttccacatcacacggaatctggttgggatcgttgtatggcattttcaggttccactcagtctcccattagggttaaataaaggatacgctaaagggtcataacaaccatggtatacttggatgtaacagggcttatcaccttttgcatgtaccaagacatgtctatcaaaagttctcattggattatccccctctaaccaaattgcagcaacctgggatgcggtgggtgcattatatcttcgttgggatgcggtgggtgcattatatcttcgttggtcaggtgttacattagtgttgagctcaatcatgtagtcatctatattgggcatggatccaactctgctgaaggtttgtacgtacgggttttgcgccaaaatacatagaatgacccgaacaaggttgatatcaaggtcaggagacctgcgaaccctatgggctagtgcatcagcatcttttgtataataaaagtaaagctgcatatggcgcggcccttgagaacctggaaccaaattatccaggcgatggtacaacgcaccatgcacacgaaatgtatacacaccagttcctgctgcagtgctgacttgttggtcaagggtaactccaaggctcgtgaatgagaaatgggagttgaaataccgtatgtgctttctgaaatattttgcatcattatgcacttggctggtaaacaaccgtattaactcggcaaggatttttggaacatgtacatttattttctcttgcctgcaacagaatccaggagactcatactgaaaccttatcgcgtcgcaaaactgacaatcaggtactttctttaaaatgtggtgtgtcttgggcagttttttgtatacacggtcgtgtggatcattggcttcaatactattaacacccttaacatccacacgatatgactcgtacccatcatttatagaggaaaaatgtttggtattaaaatttgatgatgcatagataataaggataaagtgaacaatattggtaacttactttgctggaattgcatatctaactcatcaacattatctgcgatgtcatggatttctgcggtcacaccatgatctaattcacagtaggttattgtaaatgagatcaaatggttcatgggttaataaataataaaatgatatctcacaactcaccttcatcgacaaaatcaattagtggaggttcaaataatccactatcgaattcaacgtaagtgtcatctgggatatgcacttttgcatcttgcacatggatagtttcttcttgcgtaactccatctggtcagaaaaggtattatttattaaattatatgtaattataagaaatatcaggcacacttataaacaatacccgacacactcaaccgtgtttacctatggtaggggagtctttatcttcttcaatgatcactggtttcctcttgcattgtcgtttgtaggtaacatttctatgaagccagtccgttggatcatctatgttgccatttttattatcagtaacactcgatgcttgcaaaatggtagaatacgtagtcccaaatgatgaccctaggacaaaataattgttagaacaatatataaagatatagtgttgtttgtgatagtaaactttaccaataataggggtggttgcatcaaaatttgctaagatagcattgtttgactcagccttcttccttgcgcgatattcacgttgcttccggtttctatcttctctttgtttctcgcgcttttcgtctcgacagatgttgccaccatcactttgcatggaactggaaattgttaccggttgcattgggatgtttgataatacacttatgtcaacattgttcatctcatccatcttccatttgcgatattcatgttgttttctgttcctttcttctcgttgttcatttgacattttagttggctgggaattgccagtttcatgatttacagaaacacaagcagttggctccgttggttttgccggtgtgattgggttgtgagcatcttctataacggaattctttcttgcgcggtattcacgttgctttatgttcctttctgctatgtgtttgtcaggtattggcacttctgaaattaggagtatgttgtaattgacatatacatgtacatattacaaaagaaaactatataaacagatagttcaatgtaccatgatatggattatttgcttctacctttttccttgcacggtattcacgttttttgctgctagtttctcccttcttgttttctacctcattacaaggtgttgtttgccttacatttaatctgttagttatatctccgaatacaaagcggccttcgacaggtgatccatttgcatccatacctagtcagtaaattatgctattattgagtgcccttgcatgtatattaaataacacttatgataattaaaacattattttccaccgaaacaagaaagtaatggaaaacatcagccacgtgcaaggcattataatgacaaggtttatatatacacgtacgcacgtcacacacaagaaggacgcacatgaaatgaatagatatttttatcaaaaccgttgtaaaatgttatgcatgacatatgcaagaaaaaatatgtgtattgtatagaatatatcgtgagacaccaatagtgcctttggttcacataattattaaaatatttgggatgtcaattattttgtaggaataactatatcggtaaatagaaggtgtaaaagaataattaatatttgagggaacagagaatcaagagaataattacataataattagtggaaaatagcatgctgatgaaatcaaaactcattcagctaccatactgtctagtctcaattttttgccaaaaagaaaaaactaaaggcatttcatcacttctgctcctttctatacatgtttataattaaagctaccacaaaagaaatgctccatatatttacaaaatatgtccactcataattgttttcagtgttcatgtacgagggaataacagattaaatgtcacgcccggaatttctatccaaaattccaaacgcttacatgtgtgttaagccctcgtccaggaatcaaccgaggcacacaatgacaatattgataatagagtataaatatttaactatagaatattcgcaaataataaattattacagaggtggatagttcctctcaaagaaaaacattctacgcagcggaaaaaaaaaactataacaaactacggaacagctatggcaactccactccacaggcatcttaaccgagaacaagcctaatcctccagatcatcaccttcactgagaaactcctcttctgatgaatgaatattgcaagaatgagcatataacatactcaacaagccacacagcaaatatgcaagtgcacaagataacaaaggatggcataatatagttcatttgcagaaaacagcttttttaataatatttaagagaataataaaacagttgtataattgatcaatattaaataaacaccatacaacacacccgtgttgcataggcccaaccccatttgaacaaccaaccccagttgaacaaatgaaaccctccaaaccaggaattaaccattccaaaccaggaattaaattaattaacacattattaccattaatgagtagtgtgagactaatcacgaaaaacattgctcaactcacccataaccgcgggtacggctattcgaatagattaaactttgatcagagatgtaccactgtacccacaagacacaaccccacatcatgttaccatgtgcctcaataccaccacggtacctcggaaaggaattgtgacaatacccctcgcataacacaattcaccacagtgcacctttcctggatcataatcaccccctttaaaacaaggtatggactccccagcgacccccatggacttctcgccacttctcagtctggcacactataatgaatcatgctatacaaaagataaagccgttgcccacgctggcttgtggttggcacgataa

SEQ ID NO: 17720 - DNA, 1217 bp, Oryza sativa
  unsure (1)..(1217): unsure at all n locations
gcaagatgaactgcgatctagtgatgataatttgctaagagaaaaaaggctgatggaagagcttcagtctaccctcgcaagtctgacgtcacaacttggtcacaaggatcaggccctgctttcctttgatgagcacaaaacggagttaaatcgtctgagggaccaagttttggacatggaaagggcaaacagtttgatgcaagatgctctttcacaaagtgaacaaatccagatggatctcaattgtaaaaatatctcactccagtcccagctttccaatgttgaagaccggttagcaacagttatgaaggatacagtcgccactgaaactgaagctagttatatgagaaatctggttgaggagcttactgggcaacttgattccttgagaaatgaccatgaaaaactccagcttaagaacaaagatgctgatgatttactaagggtacacatgtcaactgaagcagaattagctgatagagttgctgcactcgaagcagctatccattctttagaaattgaccttgctagggtcaatgaagagaaggaagaaactgagngagctataaaaagtaacgaagaacaatttgttcaagttggtcccgacaagtctcgatatatagtagaatcaattgatagcagtgagagagttttgaagtatcaagatgacattttgcagcttaaagtcttactgacaaatcttgaagagcaagttgatgatctgaggttcacaaaagatgaggttgaaattctaaacatggttctagaatcaaaattggaggcacaacgtactgaaatattgtcattgctccagaactctggacacgaaagagtgtcatttgggccccaaacttttttaaaagacactagaaccaaggatcttactcaaaaacttgctgaacaaactctgaaggcagaagagttcaagaatttgtctatccatttgagagagctaaaagagaaggctgaagctggaaggaaggagaaagagggatcattgtttgccatgcaagaatccctcagaattgcattcattaaagagcagtacgaaacaaaggttcaagaactgaaaggtcaggtgtttgtttccaaaaagtatgctgaagagatgttactgaagctacaaagtgctttggatgaggttgaaactgggcggaaaaatgagattgctcttgctaaaagaattgaagagctatcaatgagaatttctgaaatgg

SEQ ID NO: 17721 - DNA, 1153 bp, Oryza sativa
gggcggccgatctccactagtggatccccttgaaaactcttgtgacaaggtctggtcgatcttgaggttgctggccgggttcgagatgttctgttatctgtcacgcccagaaatttaacccaaatttccagactattttgcgtattaaatccctgtccaggaccagccagggtacacaaaacgataagtaatatacagttccaaacgtaaataaagcgtaaaatacttacggaagaggcacttagtcctcacaccgaaacagaacgacagcagcggaaaaaggtgatcctagcggggcttcagctccactccacaggcaaaactcaactggggtctgagccttggtcctctaactccatcttcagctcagaagcactacacctctgaaaagggggaataatagcaagactgagtacaaccaccgtactcagcaagccacaccaacgatgcagacgtgcaaggggatacaaggaggggtttgaggctatttgcataaaggcagttgtaaaacattttattgagcaaaacagtaaaactgttgagtaattaaagtaatattgaatctccactgatcaacgctacaccacgttgaacaggcccaaccaacccacctgaactacagtgtattgagtcgatttattaaggtgggactaatcatggtgaatctggtcaaccgcccataaccgcgggcacggctattcgaatagctttactctgatcagaggtgtacaactgtacccacaagacacagccccacggcacatttccgtgcgccgacatgccaccacgacataccggaaagaggccgtgacaggacccttcgcataaccccctctagccaagcacaccacacctcaggtttcacccccgtccccagcgggcaacgggcagtcccctctcgtgcctaggtgaatccggaagcgacagaggccgtcgcagggcccgccccgctccatcacgcccacccttgcctggatgcgtcgactagaggaaagctacactacaagcccagccgttgcccacgctggcttgtggtaagtacgataagttcttccaaggcatcccgcgaaccggtccttaattgcctgggtgcgactagcaaaaccatgcacccacagcccaccattcagtcgcattttagttggataattac

SEQ ID NO: 17722 - DNA, 2440 bp, Oryza sativa
tttcacatgcatgaatcttttgaacacctagagagaatggacatatcaatttcttcgcttgatatgtgttcctcggcagcaggtgatgcggacatcactacctcggatacacacaacaatcctccaacggtcattcaaggaccaataacaagagctcgtgcacgacaattgaatttagaggtgagctcgatcctatgttcttctttgtatgaattcgagaatagattgctacctaatgattatattgtgattaggaacaatgaagggggcaaggagacacttggagaaggacttagagccatggaggatcatcgaggatgtccaagtcaaggtggaggcccaaaccaagtcgaccttcgggtgcaattcggagtccaggaccagtctgcactaaaacgggcgcccaggtcgcatacgtgctaggattggggcgttctttatatggatggaaacctaagaagataacttttccaatggttttggtcccacgtccaaattctttccgagtcaatgggaatcgaccaaacaagttgacattcagaatctgtcccgttgttgcgtcaccgtatttgggcctttgggccgtgtatcgtgtggaacccattagggttgcgtcgagagggggttgcacgaccctaaactctatatattagtaccgccgccatctttaggtttttgggttttgcttagattattccgtcgagaatagtttcgccgctagatcgatttgtaagaccccaactcgtgagcttaatcattcatctgcaattttggttattttctatctcgttcttgtttgtgttcttcgattggcaaatagggattagccttctcggcgaggtcatccgcgtttctacacgggtgataaccagaggagacatggtgctgcgattgcggggctcaagagcgtgcgtgttcaagaagccggatcgatttgtgtcgtgactccgcccaaatcattgtttatcagaacctttcagaagatcgggaaccctagtgcacatcagcaggttcggtttaggaagcataactctcagaagatccatcaaatcattgaagctagtgtccgaccatccatgtctggccttcaatttgagaagttcaagcacaaagcacaacaccgtataatccttgtcacatcctttcgattcgtcgtaaagaagttccttcgctgctttttccaactcttcccaattgttgaaccctcgtcttgtactagttagaacctctggttcaacgtgctgcaacatatcctctagatcaaaatcaatacctgcatcatctataccaaagccaccacattccgggatcgttccctgtgacatgtcttcgattataaaattttctgccgcatcaaagcaaaaatcatcagcctcttcgttacgatcggtgacttctccatgcaaagtccatatcttgtaatcatccataaacccacgctctacaatgtgccccaaaatatcattcgggttttgcatcatctttttcgttcttgcaatcaaagaatggacaaaaaatgtcccttctattctccctcaaagcatgtgcctttgcctgatcaacaaatttatttggatgcttccttcaagaacgccggatgagttcttttttgtcgtacatctatgcccgatccatctaccaaaaaacatctttcatgagtcgaattatactatatttaacatatgaaaaaaggatacaacttaaacagacattatattaatattcatggtctagtggttccaataacattaaattaataaattaaaaattacttagaattactagatttgcaaacctaatatatttttcgaagtccactgaaaaaatttgaaataaatggagggaactaaacaaaaattaaatttaagttctacggaaaatttaaacatgcatacgatatttttaatcattaataaaaagaatgtccatttccagaaatgaaaattttcttagcttttatccgatgacaaattaaactaatggagacaaacctaaaaaagaatcggactactaaatactttaaaaatcatgtgatacaaacaatatatatatttacctattataaaagtttaagatgtttttgctggtaaatttcgtatgtcaccttgtccgactgcgtcccgtacgatttttttttgtccatggtcacgttgtccgtttcgctgccctccgcatccgattgcaattcccgcattccacgctgcgcaccgcgtccgggccatgcgctagccttgacgcatgcacgtgcgcacaaccctgacgcatgcacgtatgccctccagttcccgtgaaagcaagactgtttctgagttttatgttcacacacaactttaatttttatagcacctacctaagattcttctgttcctatataatttcaatttttaagacatgtaccctaaagttattctcttatgtttgtgcatgatttttagagaac

SEQ ID NO: 17723 - DNA, 5571 bp, Oryza sativa
aaacttttatatatgtgtttttagttacttaaaagccaatgctgaaaaagaaactacgttgaaaatatctcaaaatcaatctcaaaattaagtttgaaaatttaaattttggcttattctttggttgtttaggctatccgatgggagccgtataagaaatctatgtaaaaaaactcgcatgctaacttgatatgattttctagagaaatatatatctaagcgaattctcacagtgaattcactactagaatagtgaatgtcaacgaccaaaaactaacgacggctgcataatcttggtcgttgatactgctttgggccgatttctggtatccgacgacgctagttttttgtggtcgctaatgtgtagtgggctgcggtcgttgttgttatttactcaggttggatgggcaattgcaaatggtcgttattactcagcgacctgtgtcctcagctctccggccactgcagccgccgccgcactcggcttcggccaccgccgccgccgctgccctcggcttcggccaccgccttcgattcgctccacagctgcaagcctgcagctgctgcccatgctccctataactttgctctttgctgctctttgccatacaaaggaggtagcggcacagcgggaggaagaatccccatcattggcataggaacagtctatcagatcccctccaatccgctgctcccttccaaatccgaaatcccctcttttccccaaacatatttcgccccaaatcaatatgaatcaacagtttttgattccaaatccgagatcccctctgctacccccacatatttcgccccaaatcagtataaatcatgaggttgagagatgagagaagtgttgattcaccgccatgtctcgtagccgcagtttatcaccggaggtgacaactaggggctgcatcgaatggcctacatggtctcctcagggctcccaaatgtcaatccttcccaccaatgaacatcttgatgccaagctccaccatgagtacatctctccacctgatctgcccagccactctgttatttgttccagttcacttgggactcatcaatcgacgaaaatagtcacaacaggtattcttcaatctcctaatgtaaacatttgcatatgatttgtgaaacatattgaattatgtgctaggttaaatgttaaatcttgccaggttaaagtgttggttgtattgtccacttcgaaactaataaaagctgcaaagtttgctaggtggatactgattatttctatgctgccctcaacctgaaatgtttgatatggtcctgacaatttattgttgtggtagctatggcactttcattagcattaggctgtgtttagttggatccaaagtttggattttggttgaaattggagatgatgtgactgaaaagttgtgtgtgtatgacatgttgatgtgatggaaaaggactgaagtttggatccaaattttggatctaaacacagccttagtaatagaggaatgtaggcaatttgtttgtttgtaggcaagaacagcaagtgttctagctttattcatagaatgaattcataattatattttataaacagaaacattaggtgtgacttctgtgcaattaacaattatagttacatgtgcattagttcttcctaatttgacatatattcttctcctagactgtttttcatgatggtactactagtttgttgattttaattgtaatttgaaataattatagtatcagcagtgctttacttaaatggtgtacatctcttgttttcacctctgctataatgctagcaatacaagttatttctatttacttaaaattgagttctgcatccagctaactctatacatacttcaattgaagggtctgaagaccatagcttctccttggattcagttgggtccaaagaccatagctactcctttgtttcagttgttgaggacactatgggtgatgctgtcgaggacaagatgtaccaagttgtaaatgaagatgaaccaaaggaattacttagagactccaaggttaatttgatggcaaacgttgttgaagacaccatgaaagagaaagagattaatgaagatgaccatatgggttggtactccttagcttcagttgttgaggacaccatggatcagcaagtgggagcagacatcatggaccagcaggttgtagaagactccttggtaacagacaccatggaagagagtgatgaagatgaatacttgaaggcagaatatgaaaagggtgcattaatcttcgctagagatgaggcaaatgcgttggaaagaaaagaagctgaagctcgttatgaaaaatcacttgaagagattagagatgaatttttgaaaatttatgtccctttgtattttactctaagaaaaaagtaaattcagttagatagataatatataaattcgatcagcatccagttcatggccagttatttgttagcaaagaataactcatgcatctgtgactctgctatcactttagtatcttcaatgaagactatatattgtcttattgtggggtctgacttgattgatctatgttcactgtgtgcattcttgtttcagtttatagtatcattctctgcagcagtaagatagtactttgctggacaatatatagtctgaaagtttcacttcaactggaactttaagttatgctagacaccacagggactgggactctaccaatgatttgtttgttctatcccttttaaactttgtatccattgtacagtgcaatatgatttgttcaacaaagttgtaaagtattcaagtacaggtctagatgaagggtgctcgatttgttcaaggaagttgtacatgatttaagtgcagcctgtacactgctatgtgtatttcaagggtatgctaatgctgtaagcctgtaaatctgtaagcataacatcgaaatatttttgtacatgagctatgctttacagctcagaaaatgcatcttaccttttttttctgctctaaacatgatgtgttcgattttctggtcgtccttttatttcagttagtatatgtataaagtagcaatacaataaaataaacatcaaactagcttttcccagttggatattgtgttgtaccttaagttagaaaggtgctggtgctgggtttgagtcccctgaacaaaagtttttctaatgattttactttcttttccatacgttttttttttaaaaaaatacatctactatatgttccaaaatcattctatgtgaacaagatatttttttattaattacaatgttaacaccaaatttagtatagtttatggatttgtcgctatcctgcgtatctttgttcttgggttaagaggtttagacaaccaatccaacactgtcgtctagttataaaaatgtactctttagtataaggtcataaccgatccaacaccatcgggtgtatattcggcatagttcatcaaggcattaggtgttagaggatcgaccgttcaaactagttatcatagtagaagaaaacaaccattatatttctttcaaaaaagacaataaaatatatgccgtgaaatatattgtactaaaatagtgtatattgtaaatgaattttaaggtaaaaaagaacagagaaaatgtattgtccgattatgacaaaaatgagtatagttacaaagtttactccttcgtacaaggtcataaccgatctaacgccatcgggtatatcggcatagttcaagaagccattaggtgttagaggattgactgttccaacaagattattacaatagaagaagacaaccattatatatagtgcataaaactttgaataaacacaataaaatatattgtactaaaataatatatattgtaaatgaattttgagttaaaaagaacagagaaaatgtgttgtgagattatgaaaaaaatgagtctaaaaaaattattagtacaatttcacatcagggacattaaagaaaataagttgtggctttttaaaaaaatttcagatgaatggaaaaaattatggcgggtgattacataccttttttattttttttggcgctcaaaggaggagttttaggcatatgtccatgtacatatctcctcctccattcataatagacccaatatcttctcccctctcacatcccctccctcactagattgagagaaccacggatggagcgctaatcattggtgccgatcggctgatcctctacttctccagcgcggcaccgtgccgcgtggcctcatcgcgctactgatccggtggttcccgtccgagtgcttcttcaatcaaaccctagaaagttctactacaggtcactacttctccctttgcattgaaatcatgtcgtttctgatctggtgcctgtcctctatccttaatcaatccatgatgtttggattctatccttaatcaatctgttgcatgtccgcatttgttagacatttctgaattgttgttttttgaatcaaacatattttatagcgctgggctgtcactttttttgtgtatgaattatttcatctatagtcaactaaaaacagaatgcagtgcaattaatcatattgccaaataataatttatatgatatctatctagtcttgacattttacctaacagtgtatcgtaactctcctttgacattaattatatatacagggtcatataaaacttaatatcaactagcaattagaggggatggctccaagcaaggcacggatgggccttgtggacgatcggctaaatcacgagtacttagagggtgtagagaagttcatagattatgcattcagtaaattagatggtgtccaggttatacgttgcccatgcatcaagtgctgcaatacatattctttgcctcatcacatagtgtcttctcacctgaaagcgtatggaatactgaggagctacacattttggtaccatcatggtgaagtcttagcagaacaagagaatgacatagaagttgatgagtatgattcacaggaatttaatggggaaggatataatggaatgcaagacctgatggaagatttatttcctcagtgcaacacccctggtggagacgaagcgacacatgaatctactgatcagggacctgaagaggagccaaacactgatgcggccaagttctatgctttgcttgacaaatacaaccaaccactgtatgaagggtccagaatctctaaattatctgccttagttaatttgcttcatgttaagaatttggggaaatggagtaataagtccttcaccgcattgttggaattgctgcgcaaggactttctacctcatgactctacactgccaaattcttattatgaagcaaaaaaaactattcgtgaactaggactaagttacataaaaattgatgcttgcaagaatgattgcatgctgtactggaaagaagatatagatgctgaatcctgcaaggtatgtggatcatctaggtggaaagaaaaacacacacgggaaattaagcactcttcagctgggaagaagattccacataaaactatgcggtactttcctataaaacctagattgcagaggttatttatgtgtaggaaaacggccgcatggg

SEQ ID NO: 17724 - DNA, 1276 bp, Oryza sativa
  unsure (1)..(1276): unsure at all n locations
gggagataactggaagaaaaggagcattttttttgagttaccatattttaaaactctattgctacgtcataatcttgatgtgatgcatatagaaaaaaatatatgtgatagcattattggaacactaatgaatgttccaaagggaagaccaaggacaatattaatacccgtagtgacttaaaactcatgaacctgaggccagacttgcatccagtagatgatggaggaaaggtggttttgccacctgcgccttacacgttatctccagatcaaaaaaaagcactgcttagtttttttaaagaattgaaagttcctgatggattttcttcaaatataagtcgttgcgttaatatgaaagagcggaaaatgtcaggattgaagagccacgactgtcatgttattttaaatcatatactccctcttgctctgcgtggactgctccctgaaaatatttatgaaccacttgtggagctatcccagttctttaagaaattaaattcgaaggcattgtcagttgaacagcttgaagaaatggatgctcaaataccagtaattctttgtaagcttgaaaaggaatttccaccatccttctttgatgtcatgatgcatttgcctgttcatttggctagagaagctctaattggtggaccaaccatgtatcgatggatgtatttatttgagagacaaattcactacctaaaatcactagttcggaatatggctcgcccagagggttcaattgctgagggatacattgcagatgagtttatgacattaagctctaggtacttggatgatgtcgagacaaaacacaatcgtccaggaagaatacatgacacatctattggtaacaaatttaatttatcaatcttctcctgtgctggaaggccgaattttttggggggtttcttcggtaaaacnntcgcagatccttgatatgcttgaatcagaacaagctcatatttatattctgcggaattgcgatgaagtccaagcatatatcaggtatcccttgataaaaatggcatttatttatgtcatgtttcttacgattcatttcacaagcttatgtaatttctaatttaaaatgttgcagtgagtactgcaacagtacagagggttcttcaatggtacaatttacctcaacatggaacaaaaaattcatcaactggtttaaagagaaggtaatatttatataattacatatatggaataaactgtttcaaatatgtatatttgttgatgttattttttttaatctttttgccctgtagat

SEQ ID NO: 17725 - DNA, 3530 bp, Oryza sativa
  unsure (1)..(3530): unsure at all n locations
aagccaagattaggagtgtgaactaaatatcttagaattctcttgacggcaatcaaatggcactctttaggctccgcttgaaaacgggcacacatgcaaacactaagcatgatgtcgagacgagatgcacataagtaaagtaaagatcctatcatggagcgatataccttttggtccacacatttaccattatcgtcgaggtctaggtgtccattagtaggcatgggcatcttgataggtttggcatcctccatcccaaacttcttgagtatgtctttcacgtacttggtttgagagataaaggtgccctctagtgcttgcttcacttgtagcccgaagaagaaggtcaactcgcccatcatagacatctcgaaccttttagtcatgatactactaaattcttcacaaaaagaggcattagtagaaccaaatattatgtcatcgacataaatttggcatatgaataaatcactcttaaatttttttagtgaagagagtagtatctgcctttccaatttcaaaaccatttttcaaaagaaaatctcggagacattcataccaagctctaggggcttgtttgagcccgtagagcgccttgtggagcttgtacacatggtttgccaactttggatcctcgaaccccggactttgattttgtactttttgaggggtctccaagcatccatctttcacaccttggactaatgcacctgaaagctactcaatgagctcattagacccttaaccacatttgtcattaatcaccaaaacccactaggaggattaatgcactttcacccatgaccccctgggaaacagtattggtgttgtctgaaagctgcttctcaatgttttcttgtccagaaactgggttcacctcaatgcctgcaattttcatcgcacggggagctattctaaacaattctctagaaattctatataatggacaatatataaatttttgaatacgaagtttttggcctgtttaggggagcttaagattctgataagtagctggttggtagcagcttctgagaatctggaaaagctaggttttccaacttctgacttctagttcattatctggattctacaactacagcttctcaaaatttggaccaaaagctggactgtttgggggagcttttaattatgggagaagctgcagcagctagaagctccccaaacatgcccaaatgtgtgttctggtagaaaagtttggctgttttgagaaaagagttcaataaccgatctttttggagaaacaactgtacaatactaattgtggtgaaagcttgacaaacatatttatacttgagtttgctatgtatatccctgattgtgagttcatcacttttcctcaccagtaatatatccgtgctaatacaacagatacgatcaatattgtaaatgagcaaccacaaagttggtcatatgtaatacattgaagccgtgaactccagcattccagcataatataatcagttcgagtgcaaaggtaatcaccgaggagtacgatgtggccgattaagttcatctgatccatggacaatcgctatcaccatataaaccctctaatgtaatatcgtcttcttccctcatagatcaaatggcttcttgtggcgactattgtggagacgacaactttagtgtgtatcgaggctggtaaagttgttagaggtgtatattgaagctgattaatagaggcagtgcggagcagagttcaccaaaccgttttgggtggggttaccgtcaccccacggtttggtggttatcacggtaaccacgcggttaccgcgatgcataccgtgattttaaaaactgagaagcttactgcacgcgataaccatggtgatcgcacatttttgtaaaccttagcgtggagtagataggttgtggaatggagctccaccacaactaggaaaaagcgaatggagaatggtgtcgcaatagatatgtaaggtggaatatagaggacaggaggagaggtagatatgcaaattgaccgaaaggaatagcggtggatatgggatttgagagcaacaccttaaactagtataaggcaaactttcatacttttatatgtcattgatatgcgggacctacatgacgtgaaggaatctttgataagcgccatcattagacnttaaacgaaaacctctttaaccttccaanaaatttncccaactagattaacttgacaaggtaataagtgacatgaagtaaactcttggagacgaccttaaactaatcaattggatcctttataaaaataaggaaaaaaaatcaaataccccttataagtcacggtctttctaccctctccctacatcttacttttgtataaaacttcccctacaagttcaatttttcttccagtttctcaacttccattacttttcaatgatcttatcatcattggctcaatccctcgtgacgcgtgggcttctagcaagacgagatgaggttaccccatgtcacctctaaagggcacctatctccttaccaaccatgaatcgcactgcgctgtatatgtttcgaacaccaccattgtgttttgcatcgaggtttgccgccatgctcgcgggaggtaggtggaacccacccttgcaaaagatgacacgaggtaaatctattatttttccatgtcggttgcccactaaggcacgagaaattggaaaaaaacaagtgaaaactagcggcaagtggaaagcaagaagagatggatcaaacttgggggggaggggagtcttttgtccaaaagtgaattttataggggtatttggatttattttttatgagaaaataaaaactaatcgattggggaccacttgccagctccacgtcagcccccatccccgggcccacaacccgacaaagataaaccccatgacggagaggaatcaatcatcaagataacgaagagtcgaggagaagagcaaaaaagcaaaacagcaaagcgaggagagagatggcggcgaggcgaggtcgagggcgcgggcgcgagtgggaggacgacgacctcggcgtcggcggcgggcagcccccgcacctcgccgcgcccgtcgtctgcctcgcccgctccgccggggacctcgccgccggcgccttcgtcggctccctcgtcggatacggtctctctcttctcttcttgccatatcctctttgtttgttgatgacttgatatagtctaactagcggttagttttgagatgttagctcgagttttattataggaagaattctggctttgtttctttcttcttcttcttcttgtttttttttttgggggggggggggggattttttgggatgaacagcgaatctgttcttggtactgggggttaactgtagatggcatggaaaatgtacttctttttatattatctggaggttctagtgccgttgcctggacacggattctcaattgaaatggataaaagcttggaaatgacaatgcgagtttttttctttcccccaaagaacattgtcataggtctgttcttagtctatctgaaatgtcctgacaa

SEQ ID NO: 17726 - DNA, 6115 bp, Oryza sativa
  unsure (1)..(6115): unsure at all n locations
cgcagtggcggatccggaggagccgtcctagggaaggccggatccgccgccctagggaggagcttggctctcggcggcgggcggcgggcacggcgacagcctgctccggcggatctggcgacgcgtcctcgggaaggccgaatccgccgccctaggggctctcggcggcaggcggcgggcacggcgacggcctgcggcggcggatccggtggcgccgtcgcagaggcggaggacagcggcgcgtcagaggcggaggacccatcggccaggccggcagcgagacggtggcggagctgcggaggcgggccggcgtggatggggtcggtggaggtggcggcgacctggtacggtggcgggagggagtcaatgcgagggggttcaggcgaggctagcggcgtggctcgcaccgcggcggctcctctcctccagcggcaaggtgctcggcgaggaggagaaggctgccgagaacatctacatcaaggtatatccaccctactcgcttccctaatcttccttccacctcgtgattgttgctgttcttgctgcggtagatgggctacagatgcaactagagatgtattggtgtgctgtgtagaggttttggatgtgctccaaattgaaatgaggctgtttttcgtgtgcgaattgctgagtttgcttcaactttcatccttcccatggtcacttttggtgagttcttatgagtcccatggtcacctttttttaaaaagttataagtgaaatcctattatgaatgtcatatctgatgactccctttatcttattcatgtnaaaannatggttgccaccatatgtggtgcttaggaatgtcaaaactgtaggggcatgtttcttcctaacatgtgaagtggttttttttggctatctagcaaacttgtggctgtgctttctcatgttatactatgctaggcagttgcattgcagtttaagatgtctcagtttatacccaatctttggaaatttgggagcatgatgtcagtcttttcgttttaaattaagggataacaggaagaaaccagggctggcagttctttttgttaccaatttttccaccgtgcaagtacaaaagcatttcagtgtcttttcagagttcacgaaagaactgggctatttatttggtagcaggacaggaagtagggttgttttttacacctgtaaatgttactttagtaaggaaatttgagggtgcctctccctcatgcgtgaaaaccattatttccatagtgaaaaggggtaaaaagggatttaccatatccacagtgtatatccacagtgtgctgtctgtaataatctccatgtcacattgaacgcgcgtgcacacacaccagtaagtgtctactcagcttccaggattgcaagcaacttaattttgcaagcaacgaaaatcagaaacctggtgcatacaaattctaagagtccctcttgtgcgattgaagaatatttattttcttaagtgattgcaaacatagtacttcacattacaacttgtgattcatgccctgtaatggaactgaattagcctcttttagaagaggatgaatgattaaaccattttttaatacattattataacttttattgctcttttgggtatgataaattgttgtggtttctaaacttattaggtgattttttatcttgcagtatttagggtcaatttcagatcatcatgttacatcggaattcaagttatgtaacagcttgtgctagaatgaaggttcttacgaactcaacacttaccaatataagtacatgttttgacttgtgatactatttaccaataacaaacggtagggcgccgcgaagcgcacctaaagttctagtataactttataggtggcatttagacacagccacagcacagtgtactgctctgaagattgcaatatatgttgtttgttgttgccgaaaaggagaaagtccttcacatctatcactgtctaactctccaccagaagcaatttgcattttttgcattcctcacctcacctcacctcacagtaacataattcttgacttgtaatcaaattgaaggtttgtttgttaatctcatcagaattcagaaaccatccaattcatctttcaaaagaaagtatatatatatcgttttgcctgatctctgagcatgcttagtttctttgttacaaaatgctaaactgagatgaactgaaaattttagaaatgtgcgatgcgcaggtggagataacatgcagagggagacagctcctcccgatcctgacattgcagcatgtccgtgacatcagtaactgcatgaatattttttattcatctattatactgcttgaacagtagaagaaactaggatgatatggtagttattgatgttttatcttgtgcatatgcagtgctgctaagctcacttggaagatcttggtcatgcgacatctggtgaaattttggttactgtgattgtatttggaatgtgactggatttggctgttaactgtgttgtaaattttgtgttgtattggatgtttgtcgagttgtgttggtttgaatctgagatggtatgagaaattggattgaatttggtgggctcaaatttaatgggcatgtttagtgggctttaatctgatagttggttgacaaaataggctagttttgaaatgggcctagttctgaaatgggcctattttaaaatgggccagttaaaaatttaatgggttgtttaaaaattaatgggccgtcaaaaaaataatgggccgtataaaaaaattgctgatgtcagcagccacgtcatcagtgacatgtcatcgcacaggtgtcaaaacaaaccatgtcagctgccacgtcatcagtgacacatcatcgcagacgtgtcgaaacaaccacgtcaactgccatgttggcctccatatggcaaccatccatgacgtttaatttcgtcacagaggttgggcttgggctagactacacgagcccataagcgttttatgacggttaaaaaacgtcatagattgtgctgatctgtgacgatttcggagaaaacgtcagcagatttaatctgtgacgctcaatagatgacgataagtataatcgtcacggacaaattcctatgacgaattttcagtgatacatgacgaatttttttcatcatagattaaatagattcttgtagtgtaatatagatcatagcatttggagagtgaaagagaaactacaaagttcattgccttggatggcagttcattgccgttgtgctctacacatacctactccaacaaattaatcttcaacctgtattagcacgcagggaatgtctaaaaaggaattcattgaaaatgtcataactcacaaggcactttaaaacatgattcatcaattcagaactgtattcttttaacagctaatttgaaatgttacagaaattaacaaaccattactaaggacaaacggtgataatccttgtggatcaaaggaaatgaaagtatagaaggttgcacatacctgaaagaagacaactggataatgtcacaccttattatgcctctcctgtataggacaggtatctcagtgatcatctcctgatgcccttgttcattaggaagacaagttggtccttaaccctagatttcttgcatggacagtaggagtatcatctgaaccagattatttgataattggagagcaagttgctgtctcgaaataatcagtggcaatagtaataggattagatgcttacttgcactgcatgtaaattcatacattaatattccctaacccagagcagttcaaggtagtttacaccatacaatttagacatgcaattatgtgagctagctaatatatgaattatccaattgcaatgatgagcaaaggttaattaaatcgtaccaaaccactggaattataagcataatgtacaaagctgaatcttgatgagtttccgaacagttaccaatgatccgaacaactgaacgaacataacacgatttacttgtactgcccatgagcctagtaggactaataaactcaaccatgagcctagtagggccaataaactcaaaggatcatgatcttcctgaaaaaaatgttaaatgaattagaaaatgaggcatgccaccgttgtatgttctctgaataaaacaaaacatatatcgagaactgatgcaaatgtagaaagtttaatgcaacatgattcaacggagaaataggtgcaccagaattccatctatgacttaatgcttgggctaggcattttgacaagaacctccagtgcataggactgtggcttacctctgggctgtggcagcatccacagatcttatgtgcaggtgtgctggcagaggggatcatgtacgtcttcgatgagcggcggacagcggacgacctggaagtggcggtgacttggcgacaggaattcggggcggcgcggggcgtggcggcgagcggcggacaacctggacccgacggagacctggcgacgggagttcgacgtggtggatgacccggcggcgggcttcggcggttgtgagattgaggggccatgggcgagaatctcgccgcgaggttggtgggggatgggagttatgggagagagagagggggaggcggggagggagactgatctagatcgttgtttctacagccatatgatttaggccgttggatgtgtgatatgatgaatgatgaataatgatgatgaatctaccctatagttgaacaaatggttttactcattcatcattgatcatatcacacatctaacggtgtaaaatcatctgatgagttaagatcgtacgtcccagatgcgcgcgtgtcgctcctcctcctctcccgcacccccctctctctctgccgcaatcgacgccgcatcggcgcgaccgcgcatcctctcccgcatctccctctcttccgcattcgtcgcgcctcctccgcatcccgtaccgcatccacgcctctctctcccctcccgctccgtcgtcaagtgcgccgccgccgccaccgaggccttcaatcctccatcgtcaagggcgccggctcgccatgctctccatcgccccgacacaggacgccctcatctctcccctgccgtcgcgccatcgccgattcacctccgccaggtcgccgcctatccccagcagccgccagtccacgctcgccctcgccgtcgcacagatcggcaccgccgccgacccgatgctcgccctcgcgcattcatcgccaccccatctggcccctctgcccatcgcgccaactcgccctagcaccgtctcgccgcctcgcgccatctctgccggtcgccatccgcatcaagcggtcgccgatcccatcgccgaccgctctccatcgggacttcatcaaatcgccgccgcgccgcctgaccactatccccgccagtctctgtagcgcgctcggtcctctccgggccctgacgtccggtttctagagctctacggcaagtttgattcttctccatcccagttcattatttttcttgtgcctatttgattttgactacgatgcaagagcaaactattagatgttagcgagcctgatctacctctgttagtccaccagctaatttgcgttcccttccagatttcgtagggatatgcctcacaacaatttggttacggtaaaataatttgattctattgttgtgctttcaaccataccattacggtttcaaccttatgattgatccaaggctaaccatttggaagcatcgaatcatatattattattatttttggatgggtccatgaccttctctcagttttttttttcttttgctgttctaacatcagttctgattggcaaaattgttttttacagaagctaggaggggagcaaaggaggtgctgggactgatggaaggggagctgttcaggtgcttgctcggtaatagttgggtttttttatgctctataagtacaagatatttctttttttatttgaatggaaacattctgcctgggtatccactttattaggtccatttcctgatttctgttggttatttaggtaatcattttctcaataaaaatagtttttctaatgattttgaggttttccattcgcgagttgtaaaatgtagctgctgcaataagataaaaatcaacaagttgct

SEQ ID NO: 17727 - DNA, 730 bp, Oryza sativa
atgttacatcctcacccccttaatagagattgacgcccccgtcgatcaaccccaggccaggaatgtcccctcttggccacgtccgtgtgtccagtgccagcacatgtagtcggctctgataccattttgtaacgtcctgcccgcctctgataccactttgtaacgtcctgcccgcctctcccaggccgggcccgcttacatctgatagctttcatagatcatagactaccctcacagaccaatacacgtcttttctgcacactttgtcctcactcgtgcgcacccgggaagtatttcctgatcggtcacccatcccgaaattgctccaggccaagcacgcttaacctcagagttctttcgagttggtttccagaaaagaagttgcaacttgttgatatgagtattctattaatcctattaagccgtgggccgggatgttatagaacccatgtgacctcaagctctacaggtcctaccgttgatggacatcatcggccctcttgtcgatcaccaggcttccgcctcccttaaggagaaagtcacggaagaggttgttgtcgcttccactgcccctatcgtcgcagggggcagtggaaccaagaggaaaatttgggccaagacaagtggcgatgccggatctcggcagaagtccagcagctctgaggtaagacttggcgttcccctttgtccggtttttccccctttcatgaggtgaacgaaatgaagacac

SEQ ID NO: 17728 - DNA, 5052 bp, Oryza sativa
  unsure (1)..(5052): unsure at all n locations
ctctaatccaccaccgagccgccctccccactacaaccagagccaccgtcgccatttccgcctccggccgcgccgcaccgcctcttcagtccgccccgtgttgtgccgtcgccctctgcggtaccgcagccatcattcgtggctcagcaatccctccgtgttcgccggtcgtcgccggactcatctccccgtgcctcccggtgagctccgtcgtcatttcggtcggcgtttcccgccacactgcaactccctaccctctcctaacctcttcatttccttccctaggtccctccaaccatcggccgccggttcctgctcacggaacgccgccgaaccgccgtcgccgttgcctccccgaggagcgccgccgcctcttcccgccgccggcgacctcccgctctgcctcgttggcccgcatgctcagtgagcccctcctcccgctccccttccctttcgcgtgcatcgccactgcccgtgagcgccgccgtcttccggctgctcgccgccgttcggcgccgccggctgctgcctccagaggccgcnnntgcccagcaccatggctcggccgtgtccatgccccagccgtgccgcctcgtggccgtccgatcggctttgggccgatccgggccgtcggttcccgtggaccggcggtggaccgcctcggtggtccctgtccacggtggaccggcgctcttatgccgctgaccggtgggccccgcatgtcggcgccggccgcccctttgctgacgtcagcgaggaccatttcctttgtaaaaataaataataattgcgcaataaatcgagtttaattctagaaattcatttaaacggctcaaaacttctaaaattcatatctaattcattcgaactccgaattgagccattcaacttgaaaaattcatctaaaattgagctctacatgtttgtttagtttttatgtactgtttccttggtttttattagagtttttcctcgttttgcgtgccagcgtgtagaatccgtcgtttcggaagtccgcggttgcgaggaaaagagttcggaagatcaaagtgaagaagcaaggcaagtcacacattccccttgagcatgttgatcccaatttataaatattttaccgtttacaaataaatatgcatgttttgctaattacattggatccgggtattacctatctgctcgcttgtgccatgtttacttgatatctgttccttgtcaaccttgggtaatgaatcgactagctcatgttacttatgtgacctagctagaactgtatgcttagccatgcttaatcaccactagctcagttgatggggtaattacagtattagacctttttagtatcagagtgagctgcgtgctcgagacatctggccatgcttcatggtcgtaattatccaactaaaatatgactgaatggtgggctgtgggtgcatgattttgctagtcgcacccatggcaattaaggaccggttcgcgggatgccctggaagaacttatcgtacttaccacaagccagcgtgggcaacggctgggcttgtagtgtagctttcctctagctgacgcatccaggcaagggtgggcgtgatggagcggggcgggccctgcgacggcctctgtcgcttccggattcacctaggcacgagaggggactgcccgttacctgctggggacgggggtgaaacctgaggtgtggtgtgcttggctagagggggttatgcgaagggtcctgtcacggcctctttccggtatgtcgtggtggcatgtcggcgcacggaaacgtgtcgtggggctgtgtcttgtgggtacagttgtacacctctgatcagagtaaaactattcgaatagccgtgcccgcggttatgggcggtcgaccagattcaccgtgattagtcccatcttaataaatcaacccaatgcactgtagtccaggtgggttggttgggcctgttcaacgtggtgtagcgttgatcagtggagatttaatgttactttaattactcacagttttactgttttgctcaatgaaatgttttacaactgcctttatgcaaatagccacaaacccctccttgtatccccttgcacgtctgcatcgttggtgtggcttgctgagtacggtggttgtactcagtcttgctattatttcccccttttcagaagtgtagtgcttctgagctgaagatggaattagaggaccaaggctcagaccccagttgagttttgcctgtggagtggagctgaagccccgctaggatcgcctttttccgctgctgctgctttcgtttcggtgcgaggactaagtgcctcttttgtaagtattttacgctttatttacgtttggaactgtttattacttgtcgttttgtgtaccctggctggtcctggacagggatttaatgcacaaaatagtctggaaatttaggctaaatttctgggcgtgacagtcggtcgactagattttacaatagtcccagttgtattaaaaaccaggactaaaaatatctttagtcccggtttaaagatctatttgtagtcccggttgataaaacaaccaggaaaaaagatcgccatacgctttactcccggttggtgttaccaaccgggactaaagatctatttatagtcccggttggtaaaaccaaccgggaanaaagatcgacgcggagatcggagaggtgtgcgcgatcagatcgaggtatctcctcgtctcctcaaccttatctcctcctctcatttttaactcctctgctcaaccttatctattcttcttcttatctctattcctctccttctcctctctactgccaggccggcgcgaaggcggtggggtgtggagggccggccggcgcgggggcggcgcggagtgcggtgaggcggcggggtgcggagggctggccagccggccggcgcggcggcggcgcgcggcaaggcagcggctttctcttttttttttgagaatctgagattgttgtgtaatgtatttgattggatgtgagattgttgtgtgatgtatttgatttgtgtgtgatgtgaatatgtgatgaattttgtagaagttgcgatgtaatttttttaaagattttgtgatgtatttgagtatttgagatgatcgatttgtggatttggaggcaatttgaggatgattgatttgggattttggggacgggatggggtgaaatcaatatatttaaaaataataaagaaaagaaaaaaataaagaggaaccggtaagagcaaccggattagcctctttagtcccggttggtaacacaccaaccgggactaaagatgctttatctttagtcctaaaaatggatttttactcccagtttttcccggattcgtagtcccggttggaaaaccaggactacagggggttacgaaccgggagtaataaccctttctccaccagtgtttctatacacgtatgaatagaaacaatccaaaatataatactaatactcaccactttcaatcaatcgatttctgcaccttctcctagtaacatgaagaactcacatgactgctaataattgtcataggtagtggaccgagaggataggtcataaggatagggatagagatagagttggttggataagattagactgagtcctcccctctgtttatataaggacatattgtatcattattctaattagtcactgaatcagaattagtctttcccaacctaagttcccctctcatccctagcagccgtcgccgcccggctatcctcccggcggtgtttaccccctatgaacactaacccataacaacttggtatcagagccatggctagtgaagacatgatcgaagatcctgagacacctgcatccgggtcctcaaaaggatgcaggctgatctagtgatactagtagcctcaagaaaggcagagaaagcgccaaacgggaaggaagagagccacaccgagcaaaaggtggtcatgggctccctacccgtgacaccctcatctcttccctcgctgctggagatcgtctacttgaggaaggagacggcagtggcgcatctagcacaactgtcaccattggaggccatcacgcaacaccgtcgaccaccatccttgtgacgacctcggcgtgtcttcaaaaggcatagtggcggacccagaaaaattacactgggtgtgcccattctaacgatcacttcactatatatatattttttcaaaagaaaacacctatttctgatggaagaattttggcaaattttggtcggatttttcaatataatattcaaatgtggtccataattcatgaaaaatctataaaattcataacaatcaattccataacctaatctatttagctgttcttctttcccccccccccaccttttctcttcatctagtcctttcctcttcctcttatttgatttcttgacgattacaagattaagacaaatcgtgctcattgttatattctattttttgagaggatttcatttttatatccttttgattgcatactacatcctagtgtttttcttaaaaaaaaaaaaggtatgccggtgccaaccagcacacaccctaggtccacccctgaaaaggcacattaggagcaagtcgggacggagggtgagctcccagctacagccgaaggagaaggaagcagtacgttccccctgcgacgtcatcctccagtgcacgacggtgggatattccgctgcggacaaggccgctcctaggagacccacaacatcgctgctcgccctggcaacggcggcgtcgtcgccgtcctcagcggaagtgacaacctcgactgtcccagcgacttccggaggaagcggcgtggtacgcaaaagagacagcacggtgggaacgacgcaaggcggggaggcagcacgattttcgggagaagcagtttttcgctctctgacggcgacacaatttcagaaggcggagcattgcgcggaggcgtgggggcggcacggcagttgcgcgggccacgtccactcgcggcaaaagcgtggctccaactcctggcaacgtcgtgtgcagtggataaggatccacgtccctggttggatgag

SEQ ID NO: 17729 - DNA, 1716 bp, Oryza sativa
  unsure (1)..(1716): unsure at all n locations
attgatacattgtagttcacatgcaccgataaaaataaaagtattgtaatcgttgctttataattcatcaaataaacgtaaattggtattttattacattataacaaaacgcataatgtgtttttctgaattggtaattctagaaaattgttgtctaaaatccaaaattttctgaacctagacatccatgatccccaaatttatggatctgaaccatggtgtccatgtcgttgatagctataggttggcacctcctttcgatttgacattcaatattctgatgaacataaccatgccagctgcaatacagaactgggagtttacagaaaatgcaaaatgctaagaaggaaagtacatatatacagtaaaataagtttgcagttttgggattgtgctacctacttggctacttctctcttggaactggtcagatgagaagcacttatgcttgtttccatagagttgctaaactcatcagaaacaatccgtaagcttgcttcagaaatttttgtagctcgaacttttccataaaacattagaagtaactatctgtatcaccagtgaaaaagaacaatccatgaatggattatgctgctgatttgatacaaaagacaactgagacatgttaagagaacaattcgtcaagctatttattcagctcaatttgggaagcacagtggaatatccaagtattgaatacaataaagcaaacatctgtttgctgccatcttcttttttaatgcttcaacctgctgcacctagagttcaggtttattgtgtaaacaaagcaacggagttgtatatatcgataaaattttgccaaaccaagattatagcacttgtgcacgactcaccttttttcctaaaagcgagatttttatttactattcaccgtgtttcagttgcagccttgcttccttttgcacaagacacattgcggctgtcaggattaagctggaaatttaatcncaatctttgatatcaaaggaatgcatgcaataattctctatttctcttcctgaaatgattaaaaaatatatgttgatagggttgaccccctgagaacctggatgatctccaaggctggaaacaaaaggggatccattattatttaaacaactcctaataacaaagtgcatagctttttgacaacacagtgcataatttcctggcttactcaagctgaggactacataaaacagaagcaatgattcgccttcagatacaaaattcagaagcaagcatcagcagacacacaattcagaaacaaaattgagagtgaactgaaaggtgtacatttgagtcccagtaatacctatacaaagaatttgcacttttgaaatttaatggatggaaggttaggcacacataacaagaggaaaatgcacccagcagttgctaggaaactcaacaaatttctttgttcagagaccatagtactactatgcagtttcagttattaacttccctttttcccctttttagataaaaatccattaaacttctataagtggtgttagctgtgatcaatggtattagctgtgaactaatcaaatcatcaatctgaggaacttgcatctgacagcaattcaaaaatttccaagaccctagtcaataaatactctatatacagaattaggtgcagatgatatactccctcgataatggcaagatggaattaaggtactcgccacaaatgaaatggtgaggctgcat

SEQ ID NO: 17730 - DNA, 685 bp, Oryza sativa
agctagagactgaactatgaagaaataaaagttcaatcaagcttaagataacaaccatataaaatgcacctgatatcatcttttactctgtgagaccatgtggtgagccttgacttgcactgccttaacagcattcttagaggaatccacgatgcctttagtaaaagagccaaaaacgccagattgtgctgttgttggggttgtgctgccttcagcactctcatcttgctaaggagcttttggagacaagcgcaacccaaggccactcgtgaggcgagaaaatgtattcttccccgttggtgattcttgacctgaagaaggctgtggtattttcaggttttttgcccaggaggataagccagatgtagaaaatatggaggattgtgcctcgcgccctgcagcatcttgtattggaacagcatttggaacaggtgcaggtgaaggggctacatggaatgtactggcaaactgggtggcagaatcatttgaagtagcctgagaaacagggtcaggagttctgacaggaggtgcggttgaatcctggctgtccaccggagtagcaggtggtggatgtgaatcagagggctttacttgctgttctaccatgatcgggtaacagatttaataaacctctttgaagcactagtaaaatttgcaaaaatcattatatacagatataaaacat

SEQ ID NO: 17731 - DNA, 697 bp, Oryza sativa
aaaaattgaaataacaaaaataataagtatagagaaaacaaaataggatgctcaaacagtaacattcacaaaacccacagaccacatttcatgttatacattcactagattcctaaagtatgttcatttgtcatcatgagatgcataaataatgtaacccctgcgacaagtgaaactaagctatttctcgaataggatatactgccaactctaaaagataattccttacttagcattaatacctaaaagcttctgtcaaaatttggatgatatcattaggtattacataaacttaaccaaatgaaggaaaacgtgcagaactgagcagaagctattgaaaaaaaaaaagacatgggtaggttacacggtcagaaggcataccatcagctcctttgttctagggtgcttcttagttgtgaaaagaacacctaaacaacaaagttattactcagtgtatgagaaaaacttcaaaccacagcaacagtcatttaactaaactatggtaccatgattttttttaacaacaaaatcaatttcaagcaaatagcaaaacataccattgtgattagacacagtgattgatggtctaatccaataagggcatctatgaaagccaaatcccctgagcatgcacctgcaaaataaaatcgcatattaataagatatacatgtagcgcatatcctcatactgaaacca

SEQ ID NO: 17732 - DNA, 1132 bp, Oryza sativa
ttgatgatgatgagaacagattacaaagagagtagtcgaaacagatggtgccgacgagatcatagtcgagggattcgacgagatctcccggcgagttgactccacgtactctggcttcgtaaattttggtgggtgtgttggcgattgaattggatgtctcgaacccctcccaaggggtccgttttataccgtggatcatcttgatccccaagaaaggtttgaggatatcggatctggtacggtataatagaaaccctatctcttccgagtaggactttggaaatcactttgactcgaagagatactttccacaacccgagtcggtttcctcgtgacattcataggaacaatccgtatacgtgaaggtatacctcatcaatatattccataagtcacaggataggaggtataccttatctataaccctgacagtagcccccgacttcaactcaaatgaattcatgttgtcgttcatgacttctctcatcagcgacttgtcgtactcactagatcgttctcggtatggaccgagaagacaaggagttattgaaaacactaacggaagtccgtctggctaatcatgaatttgaattgaagtctgaacaaccgcccttaatgggcctcaggattttcggcggcaatctctctccttcctcgaaattcgaaccattaggtagtgcgcttatataaagggattttgggatccatttcaggtccgtttgccaaaaaattctccaaccttccaacaatcttggacctttcgtctcccccagttccttaggttttttccgtcttgctctggcgatcttcctccgatggcggacctcggcatttccacctccgatctggcaacgctagcgaagctctccatcgagggggcccttcctccagagcaagacatggctagagaagaaggaggtactgccccctcccctgccctaggtcatatggtagtagtagaagatttcgttcgtagtgtctttctaccgctgccatcagaattccttttgttggtattgaacttctacggcctttctctcttgcacctcaaccccaactccatcgctttcttgagcatttttacccatttgtgcgaggcctacatcggggtagtgcccttcttgatcttttt

SEQ ID NO: 17733 - DNA, 1434 bp, Oryza sativa
aaaagactattgatttcaggtcactatgctgctccttaccatcatttttgctgtcgtccatagtggtatggcaagcttacgtgaaactggtgagaaaataataggggagagagcttaccgtgtaatgtttgctggaatctcactgcctttagcagttagtactgttgtaagtgcttggcatacctttttttggacagttggcatctcaatggctaagttcttctgtatcttagaacgttgtcctttcttgtaggtctactttataaatcatcggtatgatggcattcagctatggcaagttcagggtatttcaggcatccatgagcttgtttggctctcatctttcatctcattcttctttttgtatccatctactttcaatcttttagaagtggcagctgttgacaagccaaaattccacatgtgggaaactggaataatgcgcatcactagacatccacaggtaattccaggaggccattttaaagatacttgtcatggaattctttagtgatattagatataaacctatgttttttatctgttatctttccttgcatatgttttgactcataacatataatatggtttgctttatggtattctatagatggttggacaggtaatttggtgcttagcccacacgttatggattggcaattcagttgctgttgcggcatccgttggattaattggtcaccatctgtttggtgtttggaatggtgataggaggctggcatcacgctatggtgaagcctttgaagttctgaaaaagagaacaagtgttattccttttgctgcagttatcgatggaagacagaaactacccaaagattattacagggagttcatccggttaccatatctcgcaatcactgcattaactttgggagcatactttgttcatcccttaatgcaggcgtccagctaccaactcccttggtgattggtgtacataacaatgtccacaaagagaacacgatacagaaatagtgactttgtactttgatagacctgatagcctggccttgcattcgttattttaatactggcctgctcacacttgttgtaaaagaagactaacgaaagagtaccaggttgatgtagatgggagtattcaagacaaatggattgcacgttgccatgcttcctgaggacatctctatactcattagttgtgcatctataccaactagtgagcgtgcacatgcaaggcacgtcacggatagacatatataaccatataggcagagtaaaagtttttgttacgtagatcgtgcacaaaagtcatgttaagcattaggagtgccaattggtgtagcaaatccctttttatttgcctaatattttgtgtgttcatttgcctcttcaatggcatttttaatgtcatggacactcctatggaagaatcattattatccgtcgctattttaa

SEQ ID NO: 17734 - DNA, 2233 bp, Oryza sativa
aatttcctccaaaatccacatgcaatgtgccattccataggaatttcataggatttgaaaaacttcaatcctttgaatcaaagggccaaatagaaaaatttcctatagaatttgaatcctatgaaatttctacataaattctttgattcaaagaggccctcaatgccttaaccccgtgctattcctagcattgggtccttcgaacaaaactgtgggctgttttgctcctgctgcctcgattcaaaatcatgtagacaaaatgcagagtattaattacaaaatgatatcagcagcagttactcagtttagcataggatctaataaaataaaatgtttgacactttggataagcaaaagaaatcatgatatgtcttcctaggtagtgataaacagcaaagccaacatactcatttaactatttcctgagaaacaacaaaattggcaagttctaaaagacaagagaaaaaaaaatccaaaaatgactaccaaaatataccagtggagacgtacttaaattgtttatctggaaggtttaggggacataatggccatgaccggggtgtgggccgaacgcgatcacgatgcggaagggatctcaatatagataactatgctcacctgaacaatgcatgttcaggacatcatatcaagcagaagagagtcaactgaggcatgctacttctcataatttcatagcttccctgtaaagaaacaaacagaacaattaaattttacatgaaccaataaaaggtcaactgtattgtgtagaagaaattcttctaagtttaatatatacataacaccgaaggaatcaacacatgcatgggcccctttaaatcacaggattgagaaaacagaggaatagaaaaaacgtaggaattgaatgccacacttactgaattcctatgggattttgaaacacaggaaagtcttcgaactgtcgtttgattagcacacatgaaaaacgcaggaaccttagacacatgaagaggaaaacatgaggtgagacctcatgcttattttccttcaaaattgctctagtaaggttcattccataggaatttcaaaggaattgataggaaacaatcctttgtttcaaaggactctataggattatttcccataggataaaatcctctagaattcctatggtttttcctttgattcaaagggggcctaaaagtgcttgtatttatctattaaaaatgcttgtgaatcaggggagttcaggggaaatttagtgcactccgcacacatgtaagaattgtacatcagtatagaaacttgcagctaacaacgaattcatatggaacggcaaaaactcaaattattttgaggtgtacatcgaatgcagagctttctttcggccaattactttcttcttatttcactattctctcagaccatttgtggcaactttcgagcagattttgttcagaatcatcaaatattcgagaagaaattcaactttgcaagcaattaacttctgatgataaattgaagagaaaggggagatgatttaaaggattcactcagattggccatagaaattatgtagaaacctgtagtgagtaatagattggatttaaatatatctttgtgaggtatttaacttctaatgatgaattgaagagaatggcggtgatttaaagatttcactcggtgaaggttggtcttgcaaaattatgagataggcctgcaataagcaagagaacatttatttgggaagaaattcaactttgtaagtatttaacttctaatgacgaattgaagagaaaatggtggtgtgcttcactgagacgggccataaaaaaattactcctattcagagactgacggagcgtggggctcctcaccgggagaccgcgcaggcccccctttgccggttcggccgggggcgctaagcgagtttcttcgtcctcgatctgtggaatgttcgcgagagagcaaatgcacgagacacgggcgatgtagacaggttcgggccactgagaagcgtaataccctactcctgtgttctggtggatctgtgtgtgaaggagttacagagagccggagagcaagagagttcaggctctagaacccctcttcctctttctctcctctacgagctcaggtattctccgagttgtcttcttttttctttttctgctttggtgggcaaggtcctccttctatatctcaaggggataccacatgcaccacttctacctactcttcttttgggtggaga

SEQ ID NO: 17735 - DNA, 2537 bp, Oryza sativa
gagctcgaggcgcgggcgaaggagctagacgcaagagcgcatagcggcggggcggccgcgggcgacggcgacctagccgcccgcctcgcagccgccgaacacaccatcgccgagctgcagggcgcgctggactcgtccgccggggagagtcgaggccctccgcttggcgggcgaggtagggcccggcatgcttcgggacgccgtctcccgtctagaccgcgccgggcggcaggcgggcctctggggcgggcggtgcgcgaagtacgccgccaaccaggggggcctcgcccagctcctctcagagatggccgggaccctccagcgactccccgaggagctcgaggagacgatcaagtcatcctcgagagaactcgcccggggggcggtggagctcgtactggcaagttaccaggccagggaccctgacttctccccgtgggcagcgctggacgagttccctcccggaaccgaggacggcgcgcgcgcgcaggtccgggacgccgccgaccacatcgtccacagcttcgagggtacggcccctcggctcgcgttcgccctcgactccgacaaggagggcggtgacggtggtgcggacgacagcgacgacgaggctggcgacccgggcgcgtcgaagtgagcccccaggcccccgccaatcttaaatagctttttctttcttcttccgaggccttcgggcccccttcttgtatagactaatttaatctgcaatcaaataaagaggaaatttctgtgtcaattctatttgtcgtgtgtatgagacgaggatggtctgtgccgcggtccttctgtgtcttggcttgaacaagggctcgtgcccaggtcccagcctcaaatggcgcgggtcggggctagtgcctggggagatccacatgtcgagactggcaggccgggagcgcggtgaccgagggttatgggtgacccgattgtgggcctttgccgattcccccccggagttcaccatgccccggggcgcggctcgattctgggccccgtttggcgatttccgccggcccgggccaccgagggcagggtcgagcacgagcgtgctaattcaagccaagattcttcaaaaggaaacaatggcacagacacagtccttaggaaatcgaaaaagcttttattgaaatacggaagagaaaaaagataagtatatacatgtggtagcccccggccaaccctgcatgcccgggggggtgcggggttggcccgagcccgagacctgacacccgacccccactaggggtagaagcgacgaaggtgttcgatgttccacgggttaggcagctctgtgctgtcgcccgtggccagccgaacggagcccggccgggggacgccgatcactcgatacggaccctcccacattggtgagagcttgctcagtccagctcgcgtttggacgcggcgtaggacgaggttgtcgacgcagagtgatcgggcccggacgtggcgctgatggtagcgccgcaggctctgctggtagcgcgcggctcggagggccgcgcgccgccttcgctcttccaagtagtcgaggtcgtctctgcgaagctgatcttgatcagcctcgcaatacatggtggcccgaggggaccttagggtgagctcagatgggaggaccgcctccgcgccgtagatgaggaagaaagtcgtttccccggttgctcggcttggcgtggttcggttcgcccagagcaccgctggcagctccttgatccacgagtcgccgtgcttcttgaggatgttgaaggtcttggttttgaggcccttgaggatttccgcgttggcgcgctcgacttggccattgcttctggggtgggtgggggaggcgaagcagagcttgatgcccatgtcttcgcagtagtcaccgaagagcttactagtgaactgggtgccgttatccgtaatgatacggttaggcaccccaaaccgagcagtgatgcccctgatgaatttaagcgcggagtgcttatcgatcttgatgaccggataagcctcgggccacttagtgaacttgtcgacagcgacatacagatactcgaacccgcccggggcccgcctaaacggacccaggatatcgagcccccagacaacaaacggccacgaaagaggtatggtctgcagggcctgggccggctgatggggttgcctggcgtggaactggcacgccctgcaccgccggaccaggtcgaccgcatcgttgagagctgtcggccaatagaaaccctggcgaaaggccttgccaaccaaggtgcgtgaggcggagtgggctccacactcgccttcatggatatcggcaagaagctcgacgccttgttcccgaggaatgcacttcaggaggactccgttagccgcgcgccgatagagggtcccttccaccagcacgtagcgcttggagatgcgctggacgcgttcactcccttcgcggtcctcgggtagagtcttatctgcgaggtacacctggatctcagcgatccaagcaatcaatctaagggagctgggagcgctcccctcgggtcccg

SEQ ID NO: 17736 - DNA, 6196 bp, Oryza sativa
cctcgatatgaaccgacttagggcggccatgcagccggtgacgcattgcacatccctaagcttgctggggggggcgcatccgctctatagctcgtatcttctcggggatggcctcgatgccttgggcagagatcaagaacccgagatgcttgcccgcaggcacgccgaacacgcacttgtcggggttcagctttatgcgggcggagcggagactttcgaaagtttccgctagatctgagagtaaggtctcttggttgcgcgtcttcacaatcaagtcatcaacataggcctcaacattacgtcctatttggctacccaaagaaattcgagtagtacgttgaaaagtaggacctgcattctttaacccgaaaggcattgtcgtataacaataagttcctatgggggtaatgaatgcagttttttcctcatcctccctagccatgcaaatctgatgataaccagagtatgcatctagaaaacacaaaaggtcgcaccccgcggtggagtctacaatctgatctatgcgtggcagggggtaagggtccataggacatgccttgttaaggtcggtgtagtcgatgcacatccgaagcttgctgttcgccttgggaacgacgaccgggttcgccagccactccggatggatgacctcacggatgaatccggcctccagaagtcgcgccacctcctcgcggatgaaggcttgacgctccggggcctgccgccgcactttctgccggaccggccttgcgcccggccgcacggcgagacggtgctcaatcacctccctggggaccccgggcatgtccgccggtctccaggcgaagacgtcggcgtttgcccgcaggaaggagacgagcgcgtcttcctatttgtcgtccagaagaccaccgattcgtgtggtcttggacgggccgtcgcccagggcaacctccttgaccgggacctcgtcgcacgtgatcatccgctgcctcggggcggctagaacggaggtgctgagcctctcgtcgccacccgcgggcttggacaccgcggcgaggtggtccgcgcgctgctccatacaagcaagcgcgactttgaggtcgccatggacggtgatggggccaccggggcccggcatcttcatctggagataggcgtagtggaccgccgccatgaacttcaccaacgcgggcctccccaggaccgcgttgtagggcagactgaggtccgccacatcgaagtttacccgctccgtgcggaagttggcggaaccaccgaaggtgatcgggaggtcgatatgacctagtggccaagtgtgccccggcgtcacaccgatgatcggctgggacggccggagcaccatccccggggccttgatggcgtcaaaggccgcgggggaaaggatgttgagggctgcacccccgtctatgaggacacgccccaacttcacattgcaaacggtgggggaaaccaccatcgcgatctgtcctccccgggcaacgcacggcgggtggtcggtctggtcgaaggtgagggcaacctccgaccaccgcgcccgccgcgtcgcctcatgggtaggggccgcggccagaagctctcgcttcatggccttgaggctccggcgagaagcgtgagcgcacgctccccatcgacggtggcgacggtggccccaggctcctggaaccccaggtcatcgtcgccatcgtcgacgtcctcggcggtggccttctgcttggcctcacctcgccggttgccggcgggagccgccggggccttgccctcacggcgctcctgcctcctctcctcctcccacttcctcgtccgctcagccaaacttttgaccgcgcggcagtccgcgaggtcgtggagggaggtgttgtgtacggaacaccacttgccggtcgggcgcttcctgctgggagcgccggcctcctttttgtcgctcgcaggcctcccctttcaggtggcccgcgaagcgccctcgatggcgaggacatgaccctcattgtcggaatgggccgacctcttcttccttctcctgtcccgccgccctgaccgagcgacggacccgggggcggccggagctgccacaccggaaccggaggagttccaggtccaggcctcctccttgcgagccacacggtccgcgagctaaaaaagctccgcggtggtctggggctccttggaggcgatcttctcgagcatgcggttgtgccgcacgccccccctgaacgcgtagatcaccgcgtgtgcggggatgcatggtatggtgttgcggacttgacagaaccgctgaatgtacgagcgaagagactcatcgtcccttcgctgtaccgcatgcaagtccgcttcttcacctgggcgcggatatgtgccctggaagttcatggtgaactgctggcacaaatcctcctaagggtggaccgacgcgggtggcaagttcattagccaaccccgcgcctgacctttcagggccatgggtaagaaattcgacatgaccctgtcgtcaccccccgcggcctcgatcccggtcgtgtagatctggagaaactcggcggggttgacgcttccgtcgtatttttcggtgatagtgggccggaaccttgggggccaacggacgttccgaaggctcgccacaaaggctcgacagccagcaccgccaaccggggactcggggggctggcccccgtgcccggaccgaagtggcgctctggacgaggaagcgccctccgttgcgtgggcagcacgacgaccattgcgccggcgctcgatattgaggcgggcatccggccccccacgcacatcttcttgggtcggaggcgttgatgagggaatggcggacgaacggcggataacggccgccgctcgccgcgccctccgcctcgacgacacggagtcggcggtagcagcgccagaggccttggtggcggaggaccgcccgccggcgcctagacgctgctgcgccgtcatgaccaagttggccacgtcatccagccaacgtcgagctggagtctctggatcggggacgacgggcgggtgacgcaggagcgcgcccgcagcttggagcgcgccctgaggcgtgctgccatcgccgtagacgaggaggcgacgctccccatctcgccgtccttctccatcgcccgcgggcgtcgaagtcgcggatctttcgacctcctcgagcgcctcctcccgcccaagacttcggcgagagggggacggtggagtacgagctcgacggcgcgggttctgctccccgtcgtcaccgctagcgctcggagagaggttgtgcgccactgcccgttcggccattgggctgagcgggagaagcttggcgcacacgaaagaggacgagggcttagaaagacacacgcgccctctacctggcgcgccagatgacagagcgtggggctcctcaccgggagaccgcgcaggcccccctttgccggttcggccgggggcgctaagcgagtttcttcgccctcgatctgtggaatgttcgcgagagagcaaatgcacgagacacgggcgatgtagacaggttcgggctactgagaagcgtaataccctactcctgtgttctggtggatctgtgtgtgaaggagttacagagagccggagagcaagagagttcaggctctagaacccctcttcctctttctctcctctacgagctcaggtattctccgagttgtcttcttttttctttttttgctttggtgggcaaggtcctccttctatatctcaaggggataccacatgcaccacttctacctactcttcttttgggtggggacccaccctatcttgaccaaaacttggcttgcgccttcccctggaagctaaatcacagcttgtccttgagtgaggcccagcgccgtcactcgcctgacacaggggatatccctgtcattccttcattaatgtgtggagatttgcaatggccgctgtcccaatgaccctccgatgggatgggtcatacctacctccactccgccggaagcagatgcaacgtgggagcacggttgtctgccgatgacgtgaccggcgtcagaccagtcacagatcgatcattcttgtccaccacgcgtcagtttagcatgccgcacgtctgcccttcttcatacaatgacttccttgcaatggttgcgatgaagcctggcatgaatctggcggggactgacgtgttaactccaggagttagcacgccggctccggcttagagacgagtgcctggaggctctcatcattccgacgggacagggcgaggcgtgtgacaagccgcctgttgccacctaacccgtgatctgaccggtctgtgaccggtcacacactgcgaccggtcacggaccggataagcgtgcgctgcgctgcattaaatgcggcgtggcgcgctcgtccaacccgcaataaatgcggttaggtgagccccgctgtgctcacctaacccatacacgtggcgccaaaatcatagggggtcggggcaccccagccctcggggccaaaacgggagcggcccgacccctcggggagacagagggaggggtggcctcgtcaccctcgggcccgacccccccgagggggtcaggccacgtgggtgacagcggctgcccaagcctctagtcatgatacctccggtcccatgtcaccgacaaagacctacagagagcaagaatattattttggaagaaagtagcctaagtacagaaaacatgaattaaagactgagtgcatagggataaagcctgtcttgagctcgtagaccgaggcaggtttgggttgcaaattccatctttgttatgtgctatctcaagaactaagaattactgacgaaaaacatggaaaatttgattaaggggaattgttgatcacacaaaaagaactgccagcggcctgtatgtatgattccaattcatgcagcaaataggactcaccatgagatgcaactccaacaattctgaagaacaaccaacggcccaaatcagacttttcaggcataaatcaaatcgcgcgcccggggggggggggtcagaatccaaacaaagcattgctattccatctgacaatctctcgtacatctatctcgaaaccacttagaaatctgcacattttgaggatctgaccaaaggaaatccagtgagggttgtcacggcaccacaaactttcgtgtcagaataatttcaaaaccatcatgaactaatcaaaagaaccatgaaccataacaagcaaacctccaccaccccgattcatcatgaatataactaataatcaaagcaaccatgaacctggaccataataatcaaacctccatcaattcggttcatctcaacaggcactctccttcctgcatcatctagaggagcacaaacacataccacaagccagatcagcggttacaaataacaatcaacccagggtatcgaatcacctcgtgtaaggactgatagaaaccgatgatcatccatccatcgattgaaggttgtaatcaaccactcaaatctgaaatcaatcaccgaacccaagtgactaaatcaaacgaccggactgtagacgggaaactgacctcttccttgagacctcgacttgggaacttccaatcaaatccgctccagcaacaaccgaacacggcgaaaggacgaccacgggaaacaacatatagaacacaaaaaaaaacaaaaccaacaaaggatcggattgaatttgaatcaaatcaccggggacaaaaaaaatcaaacacgtcacaagcgggcggatgcaggtgaaattcagggcgacgaaggatccatggctccgatggcggcggttgcaggcggagtagggtaccggccggcggcgaggagttgaggaggcggcggggggaagtgcggctcagcggtgaggtgaggcgggcggcgcggcggcgtggcttcggtggtgtggggaggtccgtggagatggcggcgtgggggagggcggcggcggtgagttcaggcgggcggagcagtggcgtccggcggccggcgcggcgtgggttaggtccggcgggcgtacgcgttatttgtttttcgcagcgtttccttttttttttggggtgcgagcggtgcggtttctttattaaggatgacaggtgggtcccacgcaatagtggacctgatgaattgcaggattagagatgaactcgtactttttatattagtatagatataaaatacaccaattcatcaaactccttagatct

SEQ ID NO: 17737 - DNA, 1331 bp, Oryza sativa
agctcatggaggaggtgtactgtacgatgagaaaaccgagacctatttctggtatggggagaataaggatggcaaaacatacaaagctcacagcaagggagctgatcgggtaggttgaaaattttcttatgctttccatattttgacatcatttatgtgtgcaagagcttttgacatgagttagataggagtagtcacttgggtagcacttctcacagaacctaaatctaatacatgtagtatgcatgtttctttggagtagtgtgtgctaatggatggaccaagttttcctgcccttttacattctgttggtgacaccccattgatagtggacatgttacaattatgttatgttggggaggtacggaaaagcctggcttgtgtcaaggcaggccactaggaatttagtctaatatacatagattgcagagatgaaaagaatagataaagagcttcaaagtgacttcaatagtgccatggcatctgatattgttaactaaccagcatgattggaaattatgtctctgggttttagaaatgagcaaaagggctggttctgaaaaatgggtttttatctgttcagtaaggattccctatgtagtgctttacttggttgtcctgatatgcggagcactgtctctagatagatagggaacaatcatcattttctgtctcagggtgtgtttagttcacgccaaaattggaagtttggttgaaattggaacgatgtgacggaaaagttggaagtttgtgtgtgtagaaaagttttgatgtgatggaaaagttcgaagtttgaagaaaaaatttggaactaaactcggcctcaagagcaaaatgcaccatcctgcagagacacgtagtatttcagagtcaaagtgacatctgtagcgtgtcagagctagtggtgtcagagttagtgactgtcattgtaattaattgtgatattctgttatactgttctgtatagatttctgtgcgtccctatgtcattcctaaccatgataacctttttcaggttgacattgtgggagtaagttgctattcatcaaaggacctgtggacgtggagaaatgaagtagttgttctacgaggtgagaaaaagaatgtgacacatgatctccataaatccagatgtactggagagacccaaagttatatataatgatcggtgtggcaaatatgttatgtggatgcacatagacgatacaaattactccaaagcatcagttggtgtggccatcagtgactctcccacaggcccattcagttacctgtacagcaagcagccacatgactgtgaaagtagagacatgaccatcttcaaggatgac

SEQ ID NO: 17738 - DNA, 778 bp, Oryza sativa
cgtatggcagcttaaatgcatcaaattagatatttagaagctacctaaatgagtgtacaaagtacaaacaactctccaccaggaatttgatatagttaaatgagtgactaaagaatccaaattctttgtatgtttgcccaatttagttttggggccacttcaaatttcacaatctttccaagcaacattatcttgcaattttcagattaacatcattatgaacaatgatgcaatcaatgaccataaacattgagtggtctctttacaatttctgtaacatatggagtggttgattcttaacccaaaaaattcagcagctgagaatttagaaagaaagataaaaaggaaaagacaaattaggtctattcaagatatatacacattacaaatatcagccaaatttccgggacctaatatggccggttttcgaagctaggggtgaaaaaaaaccggtattgtatttcaggggtgaaaaaaaaaactttgagcaaagttcaaggatcaaaaagactttacccaaacaaataatacatgatgcacaagtaacattaccagttttctatttggggggtgattgaatttgcaggtcatcccaaacctacatagtccagtcctcatataataactgcagtctggctctcctatccgctcagggtatggagtggactccatagactctcctcctcctaaagtcatttgccacattgcttctgcaatatcattgagaaacattgttaacaatcacttggcatgactggtatactagagacaaagagca

SEQ ID NO: 17739 - DNA, 2117 bp, Oryza sativa
agtgtgtcatgcttctaagagtaaaacaaaattgaaaaggatgaatttacagtgagatatggtcattattcattgtatacaattaaaagtatacccttgcacaatagaatatctcctagacgatagatatctttagctatgtgttgttgatataccatccatgagtattctctattgaaaaaaaggctgtctaagacggtttatccaataaaactttcttcacaaaacataagcctaatgtaccattgatacactgcccaacagaatctgattctccttattggcagcttcatcagtattcttccaatcatttagtttttgtagggaccttttagcatcataaacaccataaactttataataccacaccatccttgatacatcatcctgcggtgaatttatctccttccttttgattgtcttatgaagttcacagaagaattttggatcttgcagtttaatatactcacgcaatacaagctcgtggtgaggcacccagtttctagggaaaggtgtgtagtcacacgatggaattgatgacatgcgtgcaaattgtacaccctcaataatatcaactagtcccattctcaagagatcagagtattctggtgcatcattccttgtgctctctctcaatgggcggctaaggtcacgtgaggcaatctttgtaaactttagctcgagacttgagtctataccttgccgcataaagctttgccaaggaactcctaatgacatatgcacagaaccctacaatcttcttccggttgtctgcatatctgtaccaatcagccatggtctcaagaaatttgttcatctgagagttagtgtgcgcctgcccagagtacagcattggtgaacatggcaatggctcaggatccgatccccctttacaagttcaagcttcctgaaatgccttatgcacctctgaaggcttgctgttactgataataatgtcccaatacctttctcactcacaatgttccctccactagcggtatatcttaaggttgggtagatgacccggcgggtgatcacatgatccaagaactcaatccctcttgtgatgtgctcaatctctaccatcgaattctcaggcctcaaaccaaacgtgctctcgcagaactccatcagttgtctccttatctcaactgcgtcctcccttggtcccctgatcccaataagaacatgggagccaaatctaaggtaatccatcttccttgtcttctccttcccacttgatgggacaaactcaggccaggcaggattatggcatccttcatcacccgcctccttccaaatcgaatcatggcttgacgggcggaagtactcatgaattctctcctcgagccaccaatccagttcgttaaggcacacattggcaagcaaagggctaatatcccacaatgcccataattcggtgcatggcacgcctgttctggggcaaacccgaagaataacctcaaccaatacggatcaggcttgggctcgttctcattgagcaccttcttcttcctgcttttcctgagaaccttcctcttcagcctcttcttagctaggccatcaagctccttctcccgtggtggcacagacccaggccggacaggggcattgagcgccgacttcagcaaagataagaccttgcggtcagagacggccttctggacgcaggagagtatggtataaggcgagagtgcgtcgaccaccccggtgaggtccgcggagatgaaccagaggtaggcggcgaagtgggagcggacggagcggatggcggtgtggggcccgcggccggggcggaaggcgtgggacttcggagagaaacggggctcgaagacgggctcgaggagcaggaggaggagctcctggacgacgcggtcctggaacgggggcggcgcgttggcgaggcgggcttcgagcttgcggcgggagatggtgacggtggaaggggggtcggccggggagcggatgaggaggtgcgtggaggcgccccaggggaaggcggggtggcggcggagggcggcggcgcggaggcggaggagggagtggagggtggggagctggacggcgtggcgtggcgggaaggagcccgtggcgtgggcgcaggctcgctggtaaga

SEQ ID NO: 17740 - DNA, 2643 bp, Oryza sativa
  unsure (1)..(2643): unsure at all n locations
tttaaaaattcgatctttagaatctcaaaactgatctcggtctccaacaaaacttaagaccgagcaattcggtcttcggttagttcggttcggtctcggttatagacctaactaaccataacaaaagtttgaacaacaaaaaaacaaattaaataatcagtaagatcgatgaatcaagcaattaggccgcagatgacacactacaaattggtgtcactagcaaatcgagcacgatttagaaaaaaaaaagcaaatcgagccgatttagaaaaaaaaaagcaaattgatactgtcaatctgccatgacttaaatccattgacttgaatctgcaatctactcatggctgtcctcttcccatcaccgagctcatagctcacagcgaatcggcgatggaggttggctggaggcggaccctacttgcaaggtctctcaaaccattgggggaaaagtgtagttctacaaaattggtagtccttatttaaagaagtgcaattttgtaccaattttggcaatataagtgaatgcttgcacaaagatttattaacacataatcttgctcctcaagttcaggtaggaattgcaagtgcaaatcaaaatgtactgcatatgcataccagagcaggaatttgggcaactcaaagtgcttgcaggtttgcaaacacacaaaaaccatcccaccatctaggcattcgttctccggatccacagttacataggagtaccaaattgaatggaaataaaacaacatcatctgtgtagtgtgtaggtgctgtctagcctttaaatttttcctaccctattcaatgaaacaacgcattttctggtgcattcgttcaaagaaaaacatctcccaagaatctcccaagtaattcctttcaagacacattacaagaatcgacaaaatttctgaaatactcccaagatcatgtattcatgttacttccactcatcttgcactgaatttacatgatgaaagaaagcgagacgagaacaaattgcagagaagaagcacaattgttatgcctgcaaatttacaggatgcaaacgagaaaacaaatcggagcatttcaccaaattaataccacgaattatatgattatgcaagcgctaaacctgattagagatgcaattggaagaaccgtgcgagccgttgtctcctactgccgccgccgccgttgtcgtcgtctctactgctgctggcgcggtggcggaccgttggcatggccgtcgagcttggccctgagctccttggcgccctggcgaactctggcaactcggcctccccgacctcgcccacgtcgacgtcccaccagaaccgcccctcggccttcgcctgcaagatcttcgccgtgatgccgcgcatccgcgccttctccgccgcgacctccgccctggtctcccccaccgcctacctcagcatctcgaggtcgacgtccttgcctaacccgccgctgtggacgggtgcgggctcagcatcctccccggggacggggccgtaggagaggaggacggcgtcgacggatgggtcaccgaaggcgtaggcaaggttggtctcggagaagacgacgacggcgatgctcgcgccggcgagcagggcgagctccgacgccttcttgannnnnngccccgccgcttggtgaaggtgacctgccgcctttccttgttgtcgatgtgctgcctccccttactagtcctcccgagcggacgcatcgtcctcgtcgatcaagagacgcggatgagggcgacggcggctctgcttcttggtttcttgggtgctctggttcttgcaagtgctgcttctccaaaatgaaaaacaatgcgatgatatcccactacaaaatggagatcgaaattttgggggcttcggttgcccacatttcctaaatattgaggtgggataaacggggaagtgtgctagaagaatatgtgcggagaaaataaaaaaaattcactaaatcgcaattggaactgggaaaattgttagaagaataggtgtggagaaattttttgttaagtaaatgaaaattgtcaaaagaatgctacatacatgtatatatttgttaagtgaagatgtttaataaggcctaaagattacacggagaagacataaaaatccgagaaatgaatcaaaggggaaaacaaagaataatcaatcacaaatcaagtttacaatacaaagatagcatgtctcatgcccacatcgtgtctttacgtcgcatcctaatcagtgtttaatttggtaaaattggctatgacatgcccttttggtcttgttttgcatgcattagacaacttcatacaccaaagcaaacattttaaattcatgtactaaaaagcattcacctaacaagtttgtacatcatcaatacaatctactcaaaattagaatttcatttttctagttgcactctcatggatcattcaaaattagaatttcatttttccagttgcactctcatggatcattgacaagtgatggatccaccggtgggtcgtagagacagctattattcttagactattactatagccctcatttcaaatataagtcatcttagtgttatatacaggattaagaaaaaaatatacaataatcatagaaataagtttaaattccctaggatcacaattcgcgtgtttcg

SEQ ID NO: 17741 - DNA, 1341 bp, Oryza sativa
ccatggcgcgagcctcaagggcctcttagcgctgccgggacgccgcctcgttttccgccgcccgccgttcccgtgcagcggcggcgtcaaggactccccgggcggcgtcgagccaatcgctcttccagtcgtcccacttcttgcggagaacgcagggaatgtagcggtgtagcacctgcccccgcggctggaagtagcaaccaccaactaccgtcggcggcgacaccggctgtacggtgaagaaccactggaacagccggagagatgggcgcaccccgataaacatctcgcacaggtgcgcgaagatggccaacgtcattattgcgttaggggtgaggtgcgccatctggagatcataaaactccagaatatccatgaaaaaagaagagaatggcgggaccagccctgccattgcgaaagagaggaagaagacggaccgccccgggtagtgtggcgccgggcgtccctcgcccagctcgaccacctcccggccggtggcagattccggcatgaatcggcgcggagcccggcctgcctctcgctcacgatgcgggaaggcggcagcacgctaccgtcgagcggtgtggagccccgtgccatgacgccggcggaggaggagcttgagagcgagcgagtacggcgagggtagggcacaggaaacgaagagttagagcgcaagtggcgaaggcaaggggaatagtggcgagaggaaggaaacgaatctcttcctcggcgtctttatacccttgccaacgctattcccggctcctcgtttcccgcgcccactacctcgcccctcgtttctcgcgcccacgcctccactaatcccactcgcccgtttgcggcgcacgcggcagatgtgcggccgtggcagttgagatgggacagatcgtgctcgcgttaactacgctcgccgaccgaagcgccatcatcatgtctccaggcgaaacgaaccggctcgtcccgattcgcacgctactcgagtaatgtagcggtcttaaagagaccgctcattattgacggtcgtttttcccttgccgatgtgcgcgatttgcgaccactgggtttctgcccgcctgtagagaccggccccacctgtcaccaggcctaaggagtggcgtcacacccgagcgcttccctcgaggggggcgatcgccctggcgtaacgccgggggctactgtcggtgacatgggaccgggggtatcgtgactagaggcttgggcagccgctgtcacccacgtggcctgaccccctcgggggggtcaggcctgagggtgacgaggccacccctccctctgtctccccgaggggtcgggccgctcccgttttggccccgaggg

SEQ ID NO: 17742 - DNA, 1422 bp, Oryza sativa
acatgggcagagctacattagattaggcgggtgctcaggaacctggtcaagcaattgttttagctataatctgtctattttcaccatatgtgcaccccctcggttcaaattcaggcacccgcatcagcctaaactcggtccaaagtagagcaaaacaagcgagtggcatccctgccatttagttctagctccgcccagtaggtgggacaaaaacctaggcagaagtatcttgcatagtaagcaagcccccccataagcctttctttagtactagtatgtattcaatttctctgtaatattcaggatcaaaccagttatttctctaacttcaatttagtggagtttaactactacagctttttgttgattgattgagagctggagttatttgagttgaaaattggatatctataccgagtaacttcattgtgtaaggtatttggtgcatatttcccttcctagtgtggtagtacagattatgaaaagtttcttttagtactaggttgacaagctcacttgcaaattccattactttctgctttatcaagttttggtacgaggaactggatttctgattattgttttttgtggttcatgcctgttagtagttccaataaattataatacttgagtaatctgtaatttggtactttttgcctatcgggggatgctaccctaacatctatctctttcctgctaacagggagaacctgtctgcacattctattctcgttacgggatctgcaagtttggtcctaattgcaaatttgaccatcctatgggaacccttatgtatggaagtgcaacatcaccaagaggtgatgtgtcatctatgcattatcagttgtcaccctcaccagggcatccaggaatattgcttgatggaggctctggaaggtctcaccgggttcctcagtctgattcccagcaaataccctctggcgatgggaatgccgagagagaggcatcataagccctcctcggcctttcctcatgctacctcccattcttgactcttcagtaattatctccaacaaattcaaagagctgaagctgtacaggtccttgtccatcctttttctgcttctctgaatcaccacacaccggtgcttcatcatgtatcacattcaggcaggaaaatgttcttgcttgcccctccccgccccaattcctgcatgccccgtgaaaataaatggggcaaccattcttatttatccctaccatatatacacacacaagatacactcacctcctgacactcggttcggcgaatgatgtgccttgatccctctgttgtagttatacaggtggcctgcagtggacaaagcttaccaaactgactgtattggggattctgtttcgttttgctcttcttcctttctaggcattggggagtaagcgcaagacttgctgcttgtgcaa

SEQ ID NO: 17743 - DNA, 999 bp, Oryza sativa
acaccaccctccaaatccccacgccgaccgcatcctcctcccgaagatgccgctccaccactctgacgtctataacccccctcccaccaccaccaccaccaccaccaccaccacgcacctctcccctccccgccgccgccgatggcctcccatctcctcctccgccttcccgcccctcccccgcttctcctacacttcccgcagcggcgagtgaccctgccacagagccgggtgtcccccacggcgccgctgctcggggcccgcctcgtcttctccccagcctccgccgtccgtccggcccgggcgagggggtcctcgatcggcggcgcgggggaggacgactcagacggcgaggtggacggggccccgcgcctcgtcggggaggactcggcggcgttccggctgggcgaccagcgggtggcgtcgtgggtctacttcggcgggatactcgccgtggtgctgtgggggctcaacgtgctgtggatcgacccggccaccggggtcgggaccaggttcctcgaggccgtcgccgccgtctccgacaaccacgaggtgcgccggtagatatcgttttcccttccagaaaattgcttttcgcttctcttgtgttaattagtgtactttgagaggagagcctctttactttttttttttggccaaacctaatatttctgcgttttatatactgaattaataattcagtatggactaaatatgcatgcttttagtcaacctgtactgactagtgaaatgacaaaccagtgcagattccattttgatgctctgtggcatgtaggtagttcaacgctttttagtttggactgccaatgaagcaattgaatgtgatattgatttcttgtgtgcttctagtttcggtaattcaaacataaattggaccaaataagacagatcaggcttgatgcttgtgaaactgaacattccctccctatatttacatgaaagctataaactgggtatatggcaaactcctatttatga

SEQ ID NO: 17744 - DNA, 713 bp, Oryza sativa
tgtgaggcttgcgaggttgcttcgattacacacaactgtggcacttagaacctttgacaatggaaaacttaggaattaaatacatgctggaaagccgagacatcaagccaaaattaatatgacataaacgtgagtgccaaacattagcctcatcatccacactaccacaaatatggttcacagacttattgcagaaatcagaaagggaaaaacggaacaggcctctagacacaactactttattagactcaaaaaccaacttaaatccgtctctagtcagacgggagccactaacaagattcctgtcgatagaagggacatgctgcacgttcttcagctgcacgatctttcccgaagtaaacttcagatctaccgtgccaacaccatgaacagaagcatgtgacctagcccattaggacggtggaaccccgtgcgacctgataagaagaaagcaatgagatgtcagcacaaacatgtacattggccccagtatcaacccaccaattagtagactgattaactgaaaaaacagtaggtaaattaccatacccgcttccatctccagtgttgccaatggtcacattagcagacttagaagtctgccctacaggtgccttcatccccttgcgttgtggacacttcctagccagatgaccaggttgcccacacacaaagcaagtcctctcatcctggttaggattgttgttgttctt

SEQ ID NO: 17745 - DNA, 3783 bp, Oryza sativa
ttctccttcccgaatcattcacagttactgcatataacaaattctactgctccgaaattagagcaatattggcaaaaattacagcaatgcacacttcaggaaaatattatagcataattgtcctgcttcagttattaatgggcgaaatttatttatgaacaatctttcttcagtggcctgtttgttgatgacctgggaaccaattttcttgccagaaactctatactatagttttgcaaggtagcataaggaaaaatttagaagcttcacatactggatggatttttttagtagttagcattttggttattggcagtcaaattttttttagtagaatggtaggaggatgggcttatatttggcacaattaattattcagaagatgttgtctcaatcttccattttactctactaaacttattccatatgttttcttaaatgttaaatacttaaaatgggactgcagtgggtctctgatggttgcttgatagccataaggaaaagagagacaaaaataatgaattcatgcagaggtttcagtcaattgcaaataatatgagattggtcgacttaaaattgaggatggtgtgatatgacgagcctctggtgatatgatcattttcctttttcatgtcaggattgacatctttggattgcataccagaattttccatgttcttcagctcgcaataattcatcttcaggtaatatgatggtagtctaggtttttagatgatttgcagcaaggagtgaaaataaattgatcagcactgcaacattgattttcttatggtttgtcgctttagcaaccactctccttatttgcaagctcatgatgtgttgtaagatctagagttgtctagcgaaatcaaacctaacctcccccagtttactgttcgatgtggctgctacaattcttttactaaaagtatgtcaatttatttgttctatatcaggcttgtgtcgaggagaaagggaagcgaggaaaatttgtaggtgaagaaattgacagattgcaatgggcaccagttgtgctggtaattttcttgaaacctgacactataatttcaggttacactcttaatccaagccacaacaaatgtgagtggttttatatgttgaccatctgttatgagctctagaattttttttcatactgcacaggaatggatatcatgcttaatgaatactactgtgctgcagttttcctttctgttttggtgaatttagtaccatatatgcagcaggtcgtgatcagtttttgctacttttgcttgcagtcggtggaactgaacctggctctttctattcagatacagcggttcctgcgtgatcaatatctcaaatctcaatgaagataggcagattgctattccaggttggttctctgaatgtgtgcaagtttgcaatttgtatatcattggctgtatacggttgatataaatttgcagatcactggctgtatatggttgattacttgatatgagggtaactgggaaatccgtgataaggtgtgaaacatcccttttgatgcatttctgtagcactattgaagtaccaaggagtttttgtggccatatttatttatcaccattcaatgaataataactcttcctaatcagcgctaaattttttaacaaaatctgtaacagaattgttctgatttgaaacttagtaatctggtgtgatgcatattatatactaatgtaatgctgctggcggcgtgatgcccactcagtgtaggagttggagggtgtaggactggggttcgcattgccaatgagaggaggaagaccgcctccaagagccttgtccccatcctgtacatggccgtgatgatcgttgacatcgaccaggatctcttcagggtaagtagaacgacactaaaattaggattaacatttctaaacaccatgttatttcagaaattgattagttggaatcttgtattcattttgctagcctaagtgcctactgcctaacttaatggaaatatattggaaaagtttctccatggcagatcgaggctgctatttcctgtagatttaggtttcgctgtaaatactgaacaattgatgcaattttctatttgtattgagtacttgggtggttctttctatcaaccaaatcaatttttctaccctatatctaccctatagttcaacaaatagtttcactcatcactcattctttcattcctcgtgtaacggttcagaatatctgcgtgaaatccaacactcacaatcgtctccgcctcgcgttttcctccccaatcgctccccctcccgacctcccacaataggcgcctagattgctcccccgttcccctgccgctgccaccttctcctctctcctctaccgccacaagcaccgcccctaccaccctggtgaaaccctaatcgccggcgccacctcctctcttcccgttggggctgatcccccaccgccaactcgtcgtcgcgccgatctccctcccctgccaaactctaattgccgttgccactccctcctctctccgttgtctccctactccgatctctctccgttgtctccccatcgtcccctcctctctctctcgcaccgagacgccgccaacgcgtcgcgccgcccctccgtgattcctcctctccgcacgggcatggccctctcctgctttccacgcctcccctccctgcttgactccatcccgtcaaacgccgacctcgctgcacagcaccgcacccccatcccgtcggccgttctctccctcaggcgccgtcgtggatctcccgccatgctcgcaccagcattcagatcgacgccacctcgccgatctcctctgtgccgccgccacgatccgccatcacacacaaatcatcgtcgaagattcgctgcccgtcgtcgacgacttcatcgctgccatctccgacttctttgccctcgacctccgtcactgggcgccatccactggtatccagattgccgtgtgtagtcttcgctccggtatgtctatgttaaatagtcagattcatgtctatttgctatttttgttgttcgcggctgtttgttctaatcatttttttttggggaacgggtttacaaattgcagcagctaggctattcatcaatagtaaaatgttaactgtgcatatctgtcattttgtaatatgataacttgtgtgtgatggctcgcggataacgtatgagaatttctatagatttttgtttacagcatgaactaactatttttttttgaggagaacgacggcaggagatctgccggaatttaattagaaggaagaaaaaaacagtacaaaaccagttcagtcccgaaaataaaaagaaaatagtacaacaatacacggcacaaaacaaaagaaactatggaggcctaaaagccgagcaacggagatcaagatcttgttttactatatatgccactgctctctctaagattgaaatgttgttgaaaattctcctgtttctttctaaccaaacattccaccaagtggtaagcagagctcctcttatcgccttcttttgctccttcgatcccatacaatcaatttgggcccaccaatcggaggttccgacagagaggccaacattgtttgtagataaatgttgccaggaagtaactagagaccaaacttccttgaagaaggggcattcactaaacagatgattagtgtcttcaaaggcgcttgtgcataaactacaaatccaattgcacggccagtgtcttctcaacaagttttgagccgtaagagttttctggtggaggactagtcagccaaaaaattt

SEQ ID NO: 17746 - DNA, 1802 bp, Oryza sativa
gaagagaaatctaaggaaacaaaagatccttgatattggaaaagataagcactcttacttgtgtaaactttggatccattccagttccaagagatgtcatcaggacgcggggtaagcatgactccctgaagcatgctcccaaggtgaacaagttcgtggatttcttctattgatgttatttgcctgaaagagatcaaccagttattgttatggagctcttgatggacgcctttttgctttctttttgccaacttgaaacacagtggtgcaatgtcttttgggcagctgttttgtagccaattgtcatgccaaaagtttatttttgcgccattacctagctcaattgtcgttgctgcctgaaataaccttttatctgtatcatcacagggaacgctcatgccagcccatggtttgttttcatccttccaaccgagccaaagccaacgaagacgatgggctcgcgaaaacctctctaaaaccaactatgaacaattgcaatcttacgtgttgatgatcatgggtgaagttcacatgtcttttctctaggattggtcactatatgccattacagtacacctgtgagtttaatgttttttaaactacgtataacgctcacattgcagctggtttattccataataaacagtttttttcacaaggttatcagtgattagattctttgagcgtaggaaaagacaaagtttgatttttcttttttgcatgtttggatgggtattttggtttaatctagcgatagggtggttaatagatcaatctccttcaaagcacattatagctttcacatccagtagcgacttatatgaagcacattttcttgccttttttggcacttaacttttaccatccagaggtgacaaaattgttggtagaatttctttttccccttcaacaactgctaataaattgttgcaattcagaaagacagaaaaaaatgactttaatatgacatagctcaactagaagcgaaaattgttagcacgacaacacatggttcaaataatgaaagggtagaagcagaagcatattccaaataaggccactcccgatcataaagaacggattcagggaacacgtatctgatattctgatctcatctcagaaaagtgatgtacaatcatgcatcatggtgctacgaaactacaaatattaccgtgtggatttaaagagttccatattcaaatatctatgttatatcaaaaagagaaccttgacaaatgatatgttcaatctgtcagaatagttatatagtcaatcaacatcctaccatattaatgatcaaaattctgaaatatctactgcacaatcccatatagtcaatcaacatcctaacatattaatggtcaaaattgtgaaagatctactgcacaatcccatagcaacctacaatcgacgaacaaacaggaaaaacaatctacctaaggattaatatcattatagagaaaattatacgacccttcctctataacatatagactcaaactttaaattcgcattagcactcaatgcatactttctggttgccatccttgtttaactcaaaacatttcatcattcatgttaaatatttgcatcattgtactcagacaacacaaacatagtgaccaactgaccatcatactgtgatgtacatcaaggaaacatatctgccatgggcaacaatagactaatatttattgaatatcaatttgttcaacaaggctgaggccgcatggcttgataagggcctcatgtgctctatatgtgtgaaacatcatatagactgcaagaaagaattttggcga

SEQ ID NO: 17747 - DNA, 1327 bp, Oryza sativa
aagttgtaccgctcaataatataactcacacagagctagttttctttattttcaagcatattatttatagattcggtatacctcaaattttcactacggatcaaggagcttcttttatgtctaagaaagtaaaataactttgccgaatcttagtattaaattgttaaattcttctccttacactacgctcaggctaattgacaagtcgagtcgagtaataaggttttcttgaaattagttaagaaaaagattggggaacatccaaagagatggcattaagtgttctttgaagcattatgggctaatagaatatctaggtaaggtgctaacatgttaacaccttttgagttagtctatggacaagaagttgtttgacttggctctcttagatatatcaagtaagatgatttatcggtgacggagcgtggggctcctcaccgggagaccgcgcaggcccccctttgccggttcggccgggggcactaagtgaggttcttcgccctcgatctgaggaatgtcagcgagagaggaagtgcacaagacacgggcgacgtagacaggttcgggccgctgagaagcgtaacaccctactcctgtgttctggtggatctgtgcatgaaggaatacagagagccggagagcgagagagagagagttcaggctctagaaccattccccagagtcccaaccctccttcctcttttctttcctccctttttttctccctccttctctttttttctccctctttctctttttttctcctaggcctgggcctcctttttatctggtcaggggtcactacatgggcctctagctgcctaagaagggaaacatgctttttacaatgagggctagtctacagccggaagtgacctctgacaagcagagcacacgcctcctgccccgctcgcctgctttcccggtggacgcccatttcaaccttcatttaatggccagcgacttccttgccatacctgcgctgaagcctggaatggatctgaccgggactgacataccaactccaggagttagcacgccggctccggctagggacgagagccaggaagctctcatcattccgacgggacggggcgaggcgtgtgacaggccgcctgttgccacctaacctgcgatctgaccggtctgtgaccggtcacacaccgcgactggtcacggaccggataagcgtgcgcggcgccgcattaaatgcggcgtggcgcgctcgtccaacctgctataaatgcgggtaggtgagccccgctgtgctcacctaacccacacacgtggtgccaaaaccacagggggtcggggcgccccagccctc

SEQ ID NO: 17748 - DNA, 620 bp, Oryza sativa
cggtggacaggttgcacggaagcggcctatggaacgaacggctaagatctaatctaaacaaaacggacggccgagatcgatcggatctaccacgggtctacggctgatgtggagctgatgtcgacgaagacgtcatcaccggcggtggctcgacacctcgtgctcgccggcgaatgacggcgcggcggcgcaaacggaccacacctacgggtagagggcgacacggcgaactcaccgagggctcgaacgacgacagacggcaaccgacggcgacggcagcgaggtcgaagcggcgaagacattcgggtcgacggcgacggcgatgctccggcgatcttcggcggaaacggagaacgggacgaggacagcgacgacttggtgaacacgacagcgaccttcccgagcgacgatgacgaccagagcagcagcagcgcacggctggacttgcggcggcgcacgggctaacgcggctagagctctaccagcggtggagggctaaggcgaaggtggcggcggacgaaggaggtctcgggggtcattttataggggctagggggcagcggctaggcccaagacgttcggcgtcggcgatggaaggtttagggttagaggagagaaat

SEQ ID NO: 17749 - DNA, 1718 bp, Oryza sativa
aataaagtaaactaatcttgcaagataagttgaaacagttgaaaacaggatcacaaattttgcacttttgaataacaggtttcaaaagacataaaataaaagagtgttataaaatcaacatgctaagtttatgatatttcaacatgattgaatgaaaataaataatgttgtaaaacttttgctggtaaatgggccattagtacagtaatagatgtacaataccaacaacacaggaataatgagtaaattttgaatgagaacaattgaagagactataatctgcatgtgccattagcttggtttaattaaaagagaaagagaggagaataattctactttttcaatatttttagagggcttctataggtaaccatttggcataacctagggttaaggaggctctgataccaacttgtcacgcccggaatttctatccaaaactccaaacgcttacatgtgtgtaaaccctcgtccaggaatcagctgaggcacacaataacaaattgataatagagtgcaattattaatctaattaagaggcgaataaaaagtcattacagagatggatagttcctctcaaacaataaagatctaagcagcggaaaataaaataaagagcacaggcgactccatcccacaagcagcttgaccagggctacgcctaatcctccacaccttcagcatcactgtagaactccttctctgatgaatgattgcaagatgagtatatgacatactcaacaagccacgcagcaaatatgcaagtgcaggggataataaaggatggcataatatagtctcatttgcataaatggcattcaataaatacttcagaatttagaaaaacagtaaaggatttaattaaacaatattattcaacgctacacaacatacccgttgcataggcccaacatttctagacaaccattcccggctgcacagttctatctccaaaccaggagctaagcaagttattaccaattacagcatcatttattatggtgagaggtgtgagactaatcacgaaagacattgttagacccgcccataactgcgggcacggctattcggatagtttttactctggctagaggtgtaccactatacccacaagacacaacctcaacatcatgtcaaccatgcgtcgcgatacttgacaagtacccgaatagagattgtgacaataccctccgcataacacaattcaaagtagtgcaccatggactccccagcgacccccgtaggcttatctccgccacttctcagtctggtgccccacaatgaaccacactatacaaaaggtaaagctgttgcccacgctggcttgtggttggcacggttaatgtttcacaaccgaaaattgtgaaccggtccttaattgtcatgagcacgaccatcaaaaccatgtgctcacaacccaccgttaccatgttttagttgacatcttaattaatcatcctatcatgattaaccatcatgagctaccattaatccatcattaagtaataatgaatcattaattatcccattcatatgagctagtgtctctaagcatggctaagcatcctaattactttagccaaaaccatataatgttatagctaatccaattattaaccaggtgacaaagtataggtaatcaataacaaaaggctataacaaaggaaataggtcattcccactcgatgacattcaaaaataaatgcaatagttgaata

SEQ ID NO: 17750 - DNA, 4846 bp, Oryza sativa
ccccaagaatttataaatttgggatttttagggtgtgacagatcttgtcattggcagtgagctttttacttagagcatcggtagttttagcttgcgcaaaaactagatccttcaaggaggattggttagaaaagttaccgttgttattacctcctagataatacgggcgtggctagttccacccttgaccgccttgtggatggtaaccgttgttgttgttgcccatgtacatcgcctcctcataggtttctgggcaatcattcccagaatgacccatgttgccgcagacctcacacgtaacgtgtgagtccaaggccttgatggtgccttgaggccgtttgtcgtggtcgtccaatcgcttcatgagaaggtccagcttggcagcaagtaattccgtctccttgacggtgtgcatgcctcgctgacgggtctggagtcgttcctcgctccaacccatattggagaccatcttctctattaaatcagcggctcctcgaaccaatttagagaagatagctcctccagctgccacgtccaggtgatcgcgggacatgggagtccattgtagaagttctgcatgattagccagttgtcaatcccatgatgaggacaggcggccacatactcttgaagtcgttcccatgcttcaggaatggcctcgtcccttgtctgctggaagaactcttggttttgcccatcgggaagaacttcgagaggaataccgtagaacacttgtcccaggtgttgacagcagcacggttagcgtagaaccactgcttcgctctcctgaggagggaaaccgggaacagccttagcctgacggtgtctggactgacgccctttatggcgtacgtgttacagttctccaggaactgctgtagatgagcattggcatcctcgttaggcttgccgcagaacgggctagcctacgccatagtgatgaggctggacttcaagtcgaaatccatgtctcccatgttgatctgtggtccaatggccacattctcagcagagggagcagcgaactcatggagagtcttgtcagctatagtcttgaaagtcggtggcgctggtacggctggtttctttgtcagtagagttttctgcagagcagtggctcacggcctgacgctctggaagaaagcttctggattttctttgaaattttccggcaagttgaaatcagtcatgtactaccctgctttcacaacaaaagtaaaaacaaccaaggttagcttgcaaagggaaatgattatacaaaggtaattagaaagtattaggtcaggtaatctctattatgaatcttccctggcaacagcgccagaaaagcttgttagtatttcttaatgatattactagaaatataattcccagcaatggcgcagaattactcctggtatattatggttacagagttcatccgcaagcgcacggatataccattgtagcatttcacccgagagttttccaagggtatcgtatttattttatcccgtgggaagatcatgtggagagaagccgcccctgactgccgagttccttacgacagcccgtcatgaccatacaaccggggctaaatacggaggagtaccctccccagggaattaacttaggattatatacgcgcgcggaggaatacccgtactgagctatcaccatcagtggcccacctctcatccgcagcatataactccaaataataatatcccgtaatccagacgcgacgtctaaactaccagatactactctaatatcatcgtcatgacatagagtaattgcgtaagcaaacattatacccgcaccaaagcatctcccatataagctagcaacatattcagtataacatgaacataatttaaagtaggcattaatatacttggaaagtatttcaatatcataaatgtataaagaagagtattctaataatagtacaaagcttacaaaagagaaaaggaaagatactagagccattcccgaactcttccaaaggctttcggactcccgatttctactctatttctattccactagcttaataacactaaactaacttgagagaatatgagagagctcttgcttgaggtgtgtgtgtgatgtaagaatggcaactccttttataggcaggtaatgacggttatatggttggaatggtcggtaatatcctgcaaccgtcattggtgatcaatcccagctgtccatcaaaaccctgcatccatcagcgccacgggaggttaggtcaaacccactggttcggccgaaccaggggccggaccaaccagcccaagtttttgctagtggcctcctccgttgcttcacttcgtagacttgtgaattttggcccaattcatcgtgtcaattctgagttcttggcccattcatacataagtctgatcgtcgacatcgtccgattgatttatcgtctgagttgatttatcgtctgatcatcgacatcgtccaattcgtctgactcattgttattctctgcaaaaggttagtaaacctaatactagtggaatattattattcttacatgtatatgcattgcaagcatcactagttctcctctattttggtaatattaacgatcaaaattgatcgataacgaccgtcaacagccagcgtggcatcgtttagtggagaggtcggagaccggcttggcacagagaggcgcagccgatggcagcggaggccggctcggcgcgagaggcgcgggcggcggagatcgaggccggcttggcgtgagaggcgcggccgatggagggaggccagattggcgcgataggcgcgtccggtggaggaggccggcttagcacgagaggcgcggctgacagtggagaaggctacctaggtgtgaggaggagctggcggtaggtgtggtgcggtcttcggtgcccgaaggctagccggcgggggacgccagtgtaggggtcccacatgtcggcagagcttgtgtggtggtggagcatcggtgtgtcagacgtggattcgcaggtggtgagcggcgagtgaaaacctagtccggccttggccggaccgacaacgatgtcatccccctcctgagggcgttgtcgtgctatctcaccccttaagggtgattgccaggcgaaagcccagtcttagctcctttgagtcccgacggacggcggcggcggtttttccgtcgcctttcttcttgaagacgtcattttggcatcccctagggggcgatctcctctgtgtccctttattggtctagtggcggtcagtcatgcttagtgacagccggtccgatgctagccttcttctgggctggtgtgttggcgatatcggtgtgtgggtggtggtatatttttttcctttttcctggttacgaccttacagggttgtaatcttataatttttttctgctctatcaatataacttcgcacagtttcgtacgggtcgttaaaaagaaagatgatgcatatgcagtctcgatgtggttgtagctgtgataaagaagcttgctgtgcagagttttggtactcgagctcttgcttggtggagatactctctgagccatgtgcaggatgtgattagacaatggatttggtactagtttgctagttgcatggaagagctgagacctgtatatatggtgggcgcatgcagcggcgcgcgtggtattggagttagtctttacttatcggagatactagtctttacttatcggagatagtctttactttatttctttatcgggttgttttcgtttttgttaagattttatattttgtgtcggatcggttgattgacgcgtatgcaattagtataggcaaaatagaaagcaattagcccacgattaattaagttttaactattacaaacttgacaaattgatatatttaattcttttaaaacaacttctatataaaaagtcttcgcacataacacaccgtttaataatttaaaaaacgtgctaacgaaagtcgagataaaatctaaatcttaattaatcagaaaagaatatggccacatagtaagttaattaatttatttttttttgttttagcgactgaaataatatttctaacaaattttttagatggagggggaatatataacagcaggtacaatagcagactataagccagctataaacatattttgagaagataaatgatgagagagaaaagtagtgggttacagccagctgtgcaacatgtgctctaagataaatatatgtatgacacgtgggactaggtattaattgtgtactatatgttataggtaactattggataaattggctattaaattaaatatagataatttagagttagtagttagctatagtattaaacttgctctaaagcgtcttaatcaaaacgatttaattatagatggtttcttgtagcatcgaggtcctagctagttgtaaaaaagatatacagtagcccgtcatcatcaaagaatgcctatataagaccgagctttggtagccagagatctcaaagctatagctacatcatttcctcttagagtagttgccgtccactccaatactgcctgatgggatcctcgggggcaccggagttgacacatgaattgagcaacaatcctcgtgccggcgggagagcaacaagccaacaatcttgggaatcggcacggctgtgccggtgcatgtgtatgagcagaagtcattccctgattattactttgagattaccaatagcaatcacttggtcgatctaaaagccaagtttgcaaacatctgtaagtgcatgcgaaactaccattctgtatctgtcacgatcgatccataaacttaactgccataaaatcatcaaacacacacacacacacatatactatagagggcgcagg

SEQ ID NO: 17751 - DNA, 2051 bp, Oryza sativa
tgaggagggcatacctcggctcggcgcagaggcggcgtgcaacgccatcggtaactggggaaagccggcgtcgagcatcacgcacgtcgtgttcgccaccaccagcaccggttgcctgcccagcgctgacgtcacgctcatcaagctcctcggcctcccgctgtcgaccaagcgcgtcatgctctaccagtccggctgcttcggcggcaccacggcgctgcgcgtggccaaggacatcgccgagagcaaccgggacgccagggtgctcgtggtgacatccgaggtgatgtcgctgatcatccgtgggccctctgagtcccacgttggcaacctcgttgcccaggcagtgttcggcgacgccgctggcgccgccgtggtgggttgctgccgccacccgtcgtccaccggcgagcgccccgtgttccagctggtccgggcgtcgcaggacgtgatacccggcacggacgacgctgtggtggtgaaggtgcagcaggaaggggtggtgatcaccctgcaccgcgacctgccgctccacgtctccaacgccatcggcggcgtggtcgagagcgcgttccgcggggtaggcacgacggtcaccagctacgacgaggcgttctggttgttgcacgccggcggaagggcggtagtggacggcgtggaggagaggctgggcctcggagaggggaagctggcggtgacgagggaggtgatgaggcagtacggcaacacgcgtagcaccaccatcttcttggcgatggaggagatgcgaaggaggtcggaggagcgagggatggcgacggcgggggaaggccttgagtgggggatgctcatggccttcggccctggactcaccgtggaaaccatgctgctccgcgcgatgccacgcaattaacgtgtgaaatcggccagcacacgaataaattaagcaccaaggtactctacatgttaccagtacagtgctgttacatgttacacgaataaattatttccagttaactgctgcttattactgcacggttaatttagatgttgggttcggaaccagctgaagtattgtgtggacgcctggaacattattgttccatacggaataaagttatgcatgatcaattctaagcttgctcgtctggtcgatcggaaagaacatttctagcacgattattgctttgtatggttagttcgacccttgcaagaaatgtggtgtctgtcagcacctgggaggtataataattttctgaaccttcgtttttgttgtccatatatatagtttccatactccggtcgacgtcacaagaaaaaaagtaactgaaaacgaagtaagattactccctctacttcagtatatcgtgatatccgatgtacaactctgatcactactgtatatattacgtaaccacatgtaccactagctagtcaatggtttggatgttattacagcaaatccttagttaaccaagctccctagctatctcagcgcaccttgtgttgctacagggtaacagtgtcgggctgtgcatgcgccgtccgatgctcccacaccgcttccatccactcgtccacgtatattctctccacaaccatcccgtcgccctaacctccaactcccgatccctgccgccgctcattccagttgaggagagaaatcaagaatcctgcctttccacagcgccttacgacggccgccatctttcttcccatcctcctctcctctcaatctccctcttgttacacatacgtcaccgcctcctgcctttcgagttgctctagcacgacagcgagggggtcgatccagtgaagtgtgcttgatttggtgaaccggccgatggcgaggtggccgatccggtgcgcaactctttgatatagtggcgtgctactagagatcaaagttgagacttaatctggtgccatggagttctatcttcgctgcgaggttctcctggcagcgattggtcgctcctgtctggctattggcggtgagggtgaacgggttaactttgctagggttgtcagcaccaccaccgtgtactgcttcctccatgggctgcaggaat

SEQ ID NO: 17752 - DNA, 1662 bp, Oryza sativa
cctgcagccccgttctgtagctgcacggtctttcccgaagtaaacttcagatcgaccgtaccaacaccatgaacaaccgcaagcgaaccgtttcccattaacaaggaggaacctctcccgacctgataagaagaaaacagagaaatgtcagcacatacatgaatattagcaccagtatccacccaccaatcaggtgagtgaaaaatagagagaactgtaggtaatattttaccgtacaccgatgttcctccgccctcgctaatgaccatgttggcagacttcctgtctttgcgctcaggacagtccttggcccaatgcccatacttaccatacacaaagcagtctccctttgcctttcccttgcctttcttcttaaagttggttgcagccttgggtttgacatcagacttgactttcttgttgttgtgggatgcatgagggttcttcttctgtaccatattggcactagaacctccctcaacctttttgccccggacgtcctttgccctcgccttctcctcaacacccaaagagccaataagatcagaaacactgaactcttgtctcttgtgctttagagaagtggcaaagtccgaccaagaaggtggcagtttggcaataatgccacccgccacaaacttgtccggcaactcacagttgttgttctcaagttccttagccagcatctgaatctcatgagcttgttctactacagaacggtcatcgaccatcttgtagtcatagaactgctccatgacatacagctcactgccggtgtcagaaactccgaacttggcctcaagtgcatcccacatgtccttcctagaaggcatgtgcatatacacgtccactatgttgtcagcgagtacactgatcaatgctccacagaacaggcaatccgaagcctcgaaattagcctcctcctcaggagaaagaggtggttcacttcgtttgccccgtgaaacatagaagcattgcatcgctgtcaaccacaatagtacacgtgctttccatctcttatagttagaaccatcaaaagcatgtggtttcagtgcagcagcaaagccaactaccgaaaataacctatcaggtttttggattgttagaaatatggtcataaatcggcatattttaatccaaaatgttaagacaataatcatggcataaacagtgtagggtgatctagtgacaacatgtaacataaccagtagcatactaatggcatcatgcgcattatgaatatcaggaacaagaacatagcagtaacgcagtagcatgctagagacatcatgaatatcaggaacaggaacatagcagtaaagcgctaacaacgggaacaggaacaggagaaggatataccccgagaatggccctccactggattgcgaggcagaattgactccgttggtgttgttgttcgcggcacaggctccagctcctggcgcaccacctccagctccagctcctggtggcgcaccacctccgccatctcctccagcagcagcagcggcgccggctccaggcgcagacatggtgggcgaggacgagcagtcgtgcgggaagcactccccaaaaacctgatcacccgcctacccggtgcagatctcaggcgaaggtgtggttccggaggccctgctccttccgatctctcgtgcgcgcaag

SEQ ID NO: 17753 - DNA, 2509 bp, Oryza sativa
atgattatcacaagtaatatataaattattagtcaagttctctctacaagatcatcctatgggataaaataaatacgatacccttggaatactctcggtgaaatgctacaatggtatatccgtgcgcttgcggatgaactctgtaaccataatatactaggagtatttttgcgccattgctgggaattatatttctagtaatgtcgttaagaaacaccaacaccggccagatgcagccgtctcccacgccctcggctagccgtccgaggccgtcatgcttccggtgaccgcagtcacggtcaccaacaccgcagctgctgctgtcaaacgcccaccatcttgccgttgccatcctcacctcgcacccgactccttccccgccgccgacgtcgccaccgcctccacagtcacggctgccgtcgccgctgccaccgacgctagtcaccgcctccgcagacctcttctgtgccatcgccctctgccaccaagcagccagcaaacgccctgacgccgccgccatgtcctccgcccgccgtcgccagccgacgccgccgctcaccgctgccaactgttgcgaccaccaccgcccgccacccctccaccgctatcgcggccaccacacctccgtctccagcgcctccgcgccgtcgtgcccatcgccgccagattcggccacctccgcaccagtcatcgtccggctctaccgccgccagttccggccgtcgtggcatcggcgctgccagaaacctccccgccagatccgcgccggatctggcggcctcgtccactgccgccagtgcctgcaaacctctgccgccatccccccaaataacgccgcccgaacacactaccctgccgccgactaactccccgccagctccggccggacagcgcggatctgggcggtttccgcctcccgacatgagaagttcccctgcccttgtgcggaaagcggagcgaagccccaccgctgccatctatgccatcgcgcggctttgccgacggccgctcgggtggcggcgaggtggaggaggagggatggaggacgggagacgacggcctgggcgcctcttgtgccccccgagaggaggtgacgtgagagtcgtgactacactcagtcacctgaattactgcatatgcatcgtcacaattggtgaaaatggtaatggtaattcacggccaaccggcattcgtttttgactttctcctggccgagccatatggtcgggccttcatttttgactttctactggccgagccatatggaaatggtaaacgactgaataaaatggaaatggtaaaaaatatggaaattgaaatagaaatggttttgccgttataccaatcgtttccgtatttaccttgttcttctgaaaatcaccgtttcttataatatggtaattaccgcatctctaaaaatgtcgatattcataagacatatttctacttgacccacagtttagagattgattgactcttcaatcaaatccctaacttgagtgcatggctaaaatggagttaatttgtaatttatatagtataagcttgaatttatttatacatataacatacttatgtaaagttaaatatatgttttacagtttaatatatgtttccgtatttgttaccggtttctgatatgtatcaatatgtttctgtccatattgttccgattcaggttttccgatattgtttttgttcctcacattaccattttttatttttgaaatggtttaggttgttttccgattgtttccgaccgctttcatccctactgcacacactgatcaagacactacagctccccagcaactcgtacccctcagtgcatctccctgcatacaaattgaattgattttccatgctaattgccagacaattaaaccggctattctacataatatggccagctcaaatgaaaccaaatattgaccaaattatggcacaaacaaagtaagatctagctagtccaatcagcggttccatgtgagaagcgtgtgcactagcttgaagatcacaccaaaaacaaaatgcccccgtttcccacttgtacctctccttgtgtgtcacatctacattttgtttgccttttttctttcaaatccatttgactattaagtagtaattgttgtttttttcatagtactcattattttttcaacttcctttgaatgtagttctttaaaaagtaaatgtgacaatctagtggattaaaagtatattaagtattcggatagttacataaacattttcttgaagtacgtgattacacattgtcaggttacggataagacatacctccaatcctacaatttactaaatataccggattggcaaacctcatatccaacgatatttttccgtatgcaataaggaaatatacaagatattatggaaaatatcctcacgggctgatgattatcaaagtcctactcggagaggatagggactattctatatcgtgcagggttcgttgtctccgagttctacttgaagactaaggcaattc

SEQ ID NO: 17754 - DNA, 10113 bp, Oryza sativa
gtcggtatcgtcggattcatctgttccctttttactctgtggttttctatatcaatctcatataaactggattagggctattacctcacgaggggcctgaaccagtataatccttgtctcttgtctactttgatatcgtatcgtatagatcctcgtaccaacgtacctcaatacacattttatccggtctacaggtatcccccatcgacagtggtgcgccaggtaggggactttggtgctcaaggttctgccgacatgacttcaagccgctccgacaacttcatctacatcggccccaatgcaggagatccaacctcaattccgatgatgtggactcaagtcggatccatcatctttccggtctactctgtgataccgatctcgtctggcccaatctctgttaggaacgagaacgtcgcagctacgactttacggaaaaggcaaatttatgtcatcagtgcctccctccgactgtacggaaaaggcaaatttatgtaattggctaggagacatcgtaaaattgcgtcgttgctgatggacaccacaaaattcgtgtaatttgctataggacacccgagacaatattttttatttccgagaaaaaagaggagagagaaattttaaaaaaggcaaagttgccctcagccctatctaacacccctaacccatcggcaaagcaggccaggtgccgacttcgacgactactggcgagccccggggtagcagcttcggcagtggctggcgagcttggcagtggcctcgatgatggtcggcaagcccggcagcagcggcttcgatggcagtggtggtggcggaggcaatggcttcgacggtggcgatggcggcagcggcgggttagacggcggttggtgagtggctctagaaagcacgcagcggaggcagctttgatgatggttcgcgagcccgacggcagtggcttcgaggcggaggtcaaggcgaaggccacagcgggtggtgacaaacggcttcgatgatggtcaacgaggccggcggctgcagttttgatggcagcggtgacggaggcagtggcgggcagcgctgggaagcaggcggggattagatagggccaagggcaattttgtctttttgaaatttctctctcccctttttgataagaaatgataaaaaattgtctcgggtgttctacaacaaattacataaattttatggcgtccatcagcagtgacgtgattttatagtgtcttctagccaattacataatttttgggtgtcctagggacaattttgcctacggaaaaacagacgtcgactacgacaacatctagggaacaacctcaagcggccaacctctggtgcaagaaccttgtgccttgaaggcgtgttccattggcactatgctgtagagacgtgggatgcatctctttttgggcaaatatgcaagtaccaactggaccggagcagcaaacagctagaaaagaagagggcatctcctctttcttgtgtgcgagtaggtgttgcggaagcaagaagctgtgcatagctaagagtggatgaaggctaaccaaggcggcacatgagctcaagagaggggctgggtgcagctaagcagcatgatcacaactggcgaggtgtatagccagaaaagactcgcacataatgcggtctttgatctagatgtagcccgtcagccctcttgctctcttcctcttctctcatctttttctgcttttcttccgtctctcttttcttctctttttttaagcaaggtgacaccaacttaaaaccttgatggaactcatcatgaaaatcttgtcgatcgccctcccccacacttggacttttatgtcatgagacgtcaaaaaccaagtgtctgagactgggatcttcataaagtatgttccaacatcaaggatctccaaaatgaatagttgatgtagctcccatgttcttaggcatcgtatgtccctcgttcttaatcttaacctgaaatggttactgaccaagaatacctgaagatgcatactattttagaactggttcttgcttttattggaaggaaaacgtaccaagataatccgggatatctcccgtagtgctttgtttatggtcacaagctcgaccatggagacatctagctgcaagattagtgccacaaaaaaaatacgagatttgcaatatttctgataaacaaaagcatccacaaccacacttctaatcatgttagaaatgaggaccataaggtggttgtggtcctcgtacaaagaagcggcactaatcggacaagactttggagattccttatgtgagtatcaatcctgaggaactttgaaagaaaaactttcatactcatttgtggagttctcatcctctagagttgatgtctcgaacttgtccttggcttgaaggttctccttgtcaaaagatgtgtcatgcaagatcagggttatttcttgaaaattgttgagaacaacatcttgagggctagagggacaagattttggcttgataggaggttgtgatggcggttctaggattggaagttcaaaagtttcaccggaatcaacttctttttcaatgaaatctgagacatcattttcaagaaatgattcgggggactcagatggcagaacagtcgtcacctcctttgcgtacttatctttaggcagaaagtcagtcaaggcaaatcttgactgcgagaatggcagtgagaattcattcccgcctaaagagaaattgaacctgcctactcgaggggtgttgatgagatgtttctcaatagggtgcccgattagaatattgaaatcctggacttcaaaaacatggaaatccaggataacctcgttgctatcatgaatgactggcatatcttggacaaccccaaatccttcaataatgctcccattgggatgcttgaagaatttgtcagttggtgtaattgtcttatcacttaggtatgcaaacgcaaaggattctgagacaatattgacaccgactattgggctgtagagaatcacaacattattcccctctaagtgacaaggaatgggccgaggagtggaatttatcggaattacttcagaagaaagctcaacctcctttagccattcgtcactcataatagaggtcaactctcgaactgtttccttaagaaactggaattctatcgagtcaggaggtagtgagggaacatatggttttctcttgctaaagtagttcaaggtgtttccgtaatcttcatcaagatcatccctcaacaagagagcacaacccggagtttgaatttcttcggtctcaatgggtcatggctcgggaagaggttctcgggtcgaatcaggagaagtagagacttcaactgatgcctcggggaggggctcattatattcgttcatgaaggaggtgttttttagaattcaatctagaattaccttcctttcaatcggagttttgtgcatgaatgatcctacagcagtgatgtctagatagattgcagactccttttctaaacccgaataaaaatgttgcagcagcacatgatcgggtatagatagggatggcattttcacccgtggggtcaggtccaggggacccgccctataggggtgggggtggggccatttttcaatccgcggggcttcatggccgggggagggcatccacccgtgggtgacccacggggccctggggtggtatgctacatcacaatacacagcccattctaggccgaataagtccgacttgctgaaatagtggcatataaaaggccaaaacctaaccctatcctcactttttcctttcccctcactccatcctcacagctagctgccactccaccatctaggcgagcgtcgcaaccgagagaccccgccgcaccgcgcactgcctcacacaccagcaggctcgacgcccgcgcatggccctccccatccggtctcatgtcgtcgtcgcatcagccacctgagcccggcgaccaggtaaaccgatgtggcgtgcgggtgggcgatggctagggttcacgcgtgcaagcgccaggcagcgagcagcgcaacgggctgctaggctgtcacaccctaaaaatcctaaatatataaattgttgtttaattggaattattagaatttattttaaaaacctaaaagagaagatctaattttaattaataaattccaatataaaatggggccagataaaatttcattaaatactttgcttaattctataattcctagatttttctgggatttatttgagctaaggaagtatttttaataaatggaattgcatttcatgaataatttaaattgaaaaaggtttttaaaatcctcttttggctttgggccgaaagtcctctctctctctctccctcggcccagtcggcccagtccggcagcagccgcccgcgcgcgtgtccgcccgctgacaggtggggcccacctgtcaggcctgtcgtcttcctccggccgcccgccgcccgaaccctagcgccgcgccgccgtcgtctccttccaaattcggccacctctttccgtttccggtgaaatcaatagaggggaaatgatcttcgggatcccctctatcttttctcttttggaatcgtcggctaaaatcgtttggaaatccgtggattcgagttcgattcggatcgatctctctcctccgaaccctagactttccttcgccgtcgccggtcgccgtgggccttcgccgccgccttccaacccctatataaggacccccaagcccgccgctacccgtcgccacccttgctttcgcctctcgccgtcggtagcgccctagccctgtgagacctcgcgtcaccgtcgtcgccgccagccgtgcgccgccgtcgctccagtcgtcgccgtcgctcggggaggtcgccatcgtggtcgccgtcgcgtcgccgtcctcgtccgcccctccgccgtcgctgtcgatcgccggaacaccgccgtcgtcgtcaagccgaaggtcgccgccgcttcttcctcgacgccgtcgccgtccgttgatcttccgccgttgctttggtcaccggtgagttcgccgtgccgtccgctacccgtgggtgctctccgttcgcgccgccgcgccgtcgttcgccggcgagtattgtcacatcctgatttttgtttcaggatttataaatcatttaataaattattattagaatttatattaaatgatctttaacttacaagtgaagttaaatgtgggaaataaaatttcctaaatataaagcatggatggatttaatttttattaaattctccatgattaagtcaactctctgaaatattctcggatttttcagagctcaattcctaaatgatacaaagaacagttcagtaattatttgatcattaatgatctaattatattttttaagagcttttcttgtttaaaaatccttaaattacaaattgttgtttaaaaggaattattagaaatgatcttaaaagcctaaaagagaagatctaattttaatttgttaaatctcaatataaaattgggctagataaaatttttttaaatactttgcttaattctataattcctagatttttctgggattaatttgagctaaggaaataattttaataaatggaattgcatttcatgaataatttaaattgaaaaaggtttttaaaagtctcttttggctttgggccgaaagccggcccaaaacctctctctttctctctccctccccggcccagtcggcccaggccgccgccgctctcctctctctctcgctgtcgctgacaggtggggcccgcctgtcggacccgtcttcctccttcggccgccgccgcccgaaaccctagcgccgcgccgccgccgtctccttcccaaattcggccgcgtctttcccgatccggtgaaatcttttgaggggaaacaatcttcgggatctcctcttccttttctcttatagaaactccggtcaatttcctttggaaataggcggattcgagtttgattcggattcgtttttccccgacctttccttctcgtcgccggcagccgtgggccttcgccgctgcctccttgcccctatataaggatctccaagtccgccgctacccgccgccaccctcgccttcgtccctcgtcgtcggaagagccctagcaccgtgagacctcgcgccgccgtcgtcgccgtcgctccagccgtgcgccgccgtcgtttcggtcgtcgtcgttgctcggggaggccgccatcgtggtcgccaagtcgtcgccgtcctcgtccgccgcttcaccgccgccgaagaccgccggagcaccgtcgccgccgtcgacccgatctccgccgccgcttcttcctcgtcgccgacgccgtccgttgcttttccaccgttgttttggtcaccggtgagttcgccgcgtcgccctctacccgttggtgtcctccgtttgcgtcgccgcgccgtcgttcgccggcgagcatgcgttgccgagccgccgccggtgctgacgtcatcgctgacgtctgtcacatcctgattttttcgtttcaggatttataaataatttaataaattaataatagaatttatgttaaatgttctttaatttacaagtgaagtaaaatgtgggaaataaaatttcctaaatataaagcatggatggatttaattttttattaaattctccatggttaattatactctctgaaattttctcggatttttcagagctcaattcctaaatgatacaaagaacagttcagtaattatttgatcattaatgatctaattatatttgttaagagcttttcttgtttaaaaatccttaaattataaattgttgtttaaaaggaattattagaaatgattttaaaagcctagaagagaagatctaattttaatttgctaaatctcaatataaatttgggctagataaaatttcattaaatactttgcttaattctataattcctagatttttctgggatttatttgagctaaggaagtatttttaataaatggaattgcatttcatgaataatttaaattgaaaaaggttttaaaagtcttcttttggctttgggccgaaagccggcccaacacctctcttctctctctccccggcccaagttggcccagtccgccgagccgccgctctcctctctctctcagccgctgacaggtgggccccacttgtcggtttcgtcttcctcctccggccgccgccgcccgaaaccctagccgagcagctccgccgccgctttccaaaattcggtcgatcctttccttctccggccgaattgatagaggggaaataatctcctcgatctcctcttccttttctcttatagaaactccggtcaatttcctttggaaataggcggattcgagtttgattcggattcgtttttccccgaagtttccttctcgccgccggccgccgtgggccttcgccgccgcctccttgcacctataaaaggacccccgagctctcctctacccgccgcctccctcgccttcgtctctagtcgtctgtagcgccctagcgccgtgccgcctcgcgccgccgtcgtcgccgtcgctccagccgtgcgccgccgtcgctccagtcggtcgccgtcgccaccatcgggttcgcaaggtcgtcgccgtccccgtccaccgcttcgccgccgccgaagaccgccggagcgccatcaccatcgtcgacccgatctccgccgccgcttcttcctcgtcgccggcgtcgtccattgatcttccgccgctcctttggtcaccggtgagttcgccgtgccgtccgctacccgttggtgccctccgttcgtgccgaagtgccgccgttcgccggcgagcatgcgagcttgcgcctcccgagccgccgccggtggtgacgtcatcgctgacgtcatcgtcgccctctcccgtgagccggtcgtggaccgatcgatctcggccgttcgtcccgtgaaccgctgccgtgcacccggtccaccgcaaaccctagccgctgacacaataatccttcttttccttttcaaaaataattcattattgcgtcataattcaattaaaatcaatataagtgttttaatccgatttaatctttaaaaattcataactaattcatttgaactcagtttaatgtggttcaagttgcaaaagttgtgtaaaataaagatctacatattaaaattgtccataaattgaattaaatttatttaattctttttaaatgggctttaattagatttaatcttgtaaaattcataataaattcatttgaagtcagaatgaggccgttcaagtctcataattcatctaaaattatgatctacatgtttgtttactttttatgtattgtttatttggtttttattagtctttttcttcgttttgcgtgttagcttgtcgtttccgtcgttgcgaaggttcgcgagtgcgccggaagtattcaagaagattaattgaagaccgattattgcaaggcaagtcacacagatcccaaacacaatcctttgagcatgttgatcctatatttaaattctctatttatttcaactatgcatttattttcgaatgtcaccgggtggtgtgaacttattcctttgttatggccaatttgcattgattactttattccttgataccttgggttattataacttgactagttgagctttacatattggttcagctagatattagttatgattgcttagccatgcttagaaacattagcacactattgggataacttatgactcattattatttaatgatggcttaatgatagttcacgatggttaatcgtgattggttaattaattacttgccaactaaaacttgataatggtgggttgtgagcacatggttttaagagtcgtgctcatgacaattaaggaccggttcgcgagctactattgtgaaacattaatcgtgccaaccacaagccagcgtgggcaacggctttacctttcgtatagcatggttcattgcagagcaccagactgagaagtggcggagataagcccacgggggtcgctggggagtccatgccttgtttataagggggtgactatgatccaggaatggtgcgctttggtgggttgtgttgtgcaaagggtattgtcacagcctctattcgggtactttccagtatcgcgacgcatggtagacatgatgttgaggctgtgtcttgtgggtacagtggtacacctctggccagagtaaaactattcgaatagccgtgcccgcggttatgggcgagttgagcaatgtttttcgtgattagtctcacacctctcacaataattatggatgttatacctggtaataatttgcttagctcctggtttggagattagatctgtacagccgggtatggttgcttcagaatggttgggcctgagcagcatgggtgtgctgttcagtgttgattaaaatttctgattaattactccactgttttacttctcttaaatgttttgctaaaagctgcttttgcaaatgagcctatattatgccaacctttggtatccttgtgcacttgcatatttgctgtgtggcttgctgagtatgtcatatgctcaccttgcaataatcaatcaacctcagttgaagaaaaaggattcagaagaagaagacgtttagcttataccccagttgagctgcctgtgggagtggagccggagcttcgctagattttattttccgctgtaattttcttcctggtgaggactaagtgcctcataagtaagtatttatcgttttagttaatttgataaatctgtatattaaattgtcagtttgtgtacctcggctgattcctggacgaggattttatgcacaaataagttcggaaattactagtgaatttccaagcgtgacaacgtcatcgttgccattccccgtgagccggtcgtggaccgattgatctcggccgtccgttttggataggatcgatctcggccgtccgttcccgtgaaccgttgccgtgcgcccggtccaccgcaaaccctagccgctgacgcaataatcctccttttccttttcaaaaataattcattattgcgtcataattcaattaaaatccacataagtgttttaatccgatttaatctttaaaaattcataactaattcatcttaactcagtttaa

SEQ ID NO: 17755 - DNA, 16530 bp, Oryza sativa
cctgtgggagtggagccggagcttcctagattttatttttcgctgcagttttcttcatggtgaggactaagtgcctcttaagtaagtatttatcgttttagttaatttgatgaatctgtatattaaattgtcagtttgtgtacctcggctgattcctggacgaggattttatgcacaaataagtttggaaattacgagtgaatttccgggcgtgacaagtatgcacgcccgagccgccgccggtggtgacgtcaccgctgacgtcatcgtcgtcgttccccgtggcctggtcgtggaccgttggatcttggccgtccgttttggataggatcgatctcggccgttcgtttccgtgagccaccgccgtgcacccggtccaccgcaaaccctagccgctgacgcaataaacccctttttccttttcaaaaataattcattattgcgtcataattcaattaaaatccatataagtgttttaatccgatttaatctttaaaaattcataactaattcatcttagctcggatttagttggttcaagtctctaaatttttctcaaattgagatctacatgttaaaaatatccacatgtactgttcatgcttgtttatgtgctgttttggtattttgctcttttctgtttagattccgacgtttccggagagtccgttttcgcaggagaagaatttgaagagttccaaggccagtaaggcaagtcacccagatcctaaacacaatcctttgagcatgttgatcctatatttatattctctatttatttcaactgtgcatttatttttggatgtcactgggtggtgtgaatctattcctttgttatggcctgtttgcattgattactttattccttgataccttgggttattataacttgactagttgggctatatatattggttcagctagatattagatatgattgcttagccatgcttagaaacattagcacactcttgggataacttatgactcactattatttaatgatggcttaatgatagttcacgatggtcaatcatgattggttaattaattacttgccaactaaaacttgataatggtgggttgtgagcacatggttttgagagtcgtgctcatgacaattaaggaccggttcacgagtttcggttgtgaaacattaaccgtgccaaccacaagccagcgtgggcaacggctttaccttttgtatagcatggttcattgcggagcaccagactgagaagtggcggagataagcccacgggggtcgctagggagtccatgccttatttataagggggtgattatgatccaggaaatgtgcgctgtggtggattgtgttgtgcaaggggtactgtcacagctcctttccgaggtaccgtggtggtattgaggcacatggtgacatgttgtggggctgtgtcttgtgggtacagtggtacacctctggccagagtaaaactattcgaatagccgtgcccgcggttatgggcgggtctaacaatgtctttcgtgattagtttcacacttctcaccataataaaagatgctataactggtaataatttgtttagctcctggtttggaatggtatattcctggtttggagatagatctgtacagccgggtatggttgttcaggatggttgggcctgagcagcatgggtgtgctgtttagtgttgattaaaattgatgattaattactctactgttttataattctcaaatgtttgctaaatgctgcttttgcaaatgagccctatattatgccattctttggtatccttgtgcacttgcatatttgctgcgtggcttgctgagtatgtcatatactcaccttgcaatcattcatcagaggaagagttctacagtgatgctgatggtgtggaggattaggtgtagccctggtcaaactgcctatggagtggagccgtctgcgtcgtttatcttattttttcgctgcttagatctttattgattgagaggaactatctacctctgtaatgacgttttattcgcttattaattagagtaataattgtactctattatcaatttgttattgtgtgcctcggctgattcctggacgagggttcacacacatgtaagcgtttggaattttggatagaaattccgggcgtgacataggcgagggcaagcaggcacataggcgagcagcaaagcaggtgacggccgacgggcaaacaaaaactcaggaggtgtcgatctaaatttctgtaatgtgttctttcattgtttggtaattatatatcccgatgacttagaacatgattctggtgctttctcagtttgatgatctttggtttgaacgcagaacaccatttctttggatagaatgtcaaagttataaattatttttgatgaaccactgattgttctgctatttttttttttgctaattgaatggtgcggacactcaatcggggccccggtcgggctagggctgcgggctgttttagccccgcaactaacctcgggggcggggggagaagttgggagtcgggggcgggggcgttccagcccaaccccccctcgacccgccctgttgccaatcctaggtatagataaggttgggccaaattgcactagattaggatgtgtttggatggagggattggctgggatagggtatggccacccaaattttggaggtgtttggatggtgggcggtactgggatatggccaccccctagggaatattccctccagatgccggctctgtgcatccggccaattcggccggacagggcggcccaggaccgcgcgcgactcatgcaagtgaagtggtcgcgtgccctcacctcctcccatccttttctctcttttttctcctctgttctcaccggttcacagtggcaaaccctagctctcctccctcattcagcggtgcaccaggcggggtggttcggcggagcgggtggccgcgccggggacgagcggtaggcggggcgggcggcaggtgtcggcggcaccaagtagtgatacgggttatcggaaaaaaggcaagacaaaatctgtctcgcagcttttccagtcaccattcacacatccaatggtagatgtgtatcaatggttcgctctctcgtgaagagagaacggaaacaatttcccctgaacagtattttgtctcatgccacgaatcttaaggcacgaacatagctgttcgaattcccgcaaataatggtaaggattttctcggtcaagaccagaaaaaggattttccttaatcatacgtattaattcagggcagatctcatagccagttgtataaataggctccgatgaaggaggtggctcgtaagattcgcctcgtggagcagatagctgaaaaattgatgatggctccttcggtcaagaaggttttactggaattcttctctagggtagcaggggtgatggtagaagatgaacaaggttcggagatagacagcaaccgttccccgacaacggcggcagaaatgcttgttggtatttattaacctcacagataaaatccgcaagcgcacagaaaataccgatgtagcacttcactgggagtattctcaggtatcgatttccatagggagcgtgtgtgtcaactccagatcaggttgatccaaggacacgaagctaatgataggcaaaggatagagaggaacagtgtctacggaaagcttaactttaatcctaacgcgatacttcgggcactggccagctcgctgctcctagatatcgctctactatgcacccgggcaaggaggacttcagtgatctcgagggttgtcaccacctctacacccacctcacacctactgtgggaagcggagcaaacaccggaaatcaactacctagacaccgcgtataagcagttaataacttactttaatgttagctataaactaaagcactcactatattttactggattatagtgaacgatgatcatgtccgctgattaggaactaaccaagacataattttcaccaagcaaaacaaaattactcaaaagatatttctattataatcagagtaattaacatggcaaaaaataagaagaggattaccgataactccagaactcctccgacttcttctactctactctccctaatcaagtataaaataaagttcaatagagcctcttataattcagcgcaagcttgcagtgtgtgtgtgtgaagtgagtgaggtgaggtccttaaatagggcaggtataacggttaggaaaacgtgacatgtcctttttgcccttcaaccgccattaggagctcatctggaccatacacgccaaaccctagcctgaacggctgagattgtggttcggccgaaccctggccaggcccaacaggcctgcactttggcctgttgcctctcctcctcctcttctatccatttttgtgtgtggaaggcccatttggtcgtattttaatgtagttcttggcccacttgtgatatggacaggaattctccttcacttaagtctatatttcatccaacttcgacggtttatcacctgcattcaaatgtacacaacacttgtggaatatgtcataattaaaccctatcactatgttggatgttttatttccttgatttatgcaggtattttgttaggagctaccataggcagcccccgattacgcaatgcgtatgtgtggacgacgggaggacgaggtcaatagcttcgcctccccggcgccgtgctgtgagatggaacagagagggagagattagagagaacagaggaaggagacagtagatgagattaaatttcttgcttggatttaaccataacaatccacggcttaagtagccttacatgctagcaaactttagctaacaaacttgctaattaaaagggataacagaaacaaattatcaagctgatcctaatccaccgaattcagtggcacgagatactattcctcgtccggcacggtgttcgtccgtccgcccgcaccgctgaaagggaattccccacataacatattggcggcataaaattggcatttagcaactgccaacagttaagttgagggacctccggtgaacttagtccttttaattattgggctgtgtcttctactttctacaaagcccacagatattttttcgggcagattggaaaaagttcactttgactccttcaaatagaggttcgttttgacccaataagtattgaaaccagtgcagaatgactccctcggtgattttgtgggtgattttcgctggcgtggctagttgatttggtctaacctgctgagtcatcatgtaaggcccacatgtcagtgtcacatatgtttccttctctcgttcctttttctctcctccctccactttctctctcaaccttttctctatgctccatgcatctccctcggtgatggcgagaactcttcctctctcgataatcatggaagctgcagccaagacggcgtccaagaaggaaggaagtgggcgacgagcagatccaagcagcgtggtggtccttccatactcccgcctcccgcgccacgccctcggtcgttgtgggcgtgctcccttgaggacgcgtcgccactgctgacgcaaccaacggagccgatgctggcgctgccgcctccgtctcaccttcttataagtcccaacgctaggactcgtgtttgtgctagatctgctggccgaagcaggcgagatagagaaactgctggggaaactgaagcctgctcgagtggatcctggtgacctccagaccttcctcggatcctctgcagcgacggaggagacaatggagttgcgcatgcgagcttcctcctctgccattggtgccagttcatcaaggacgcacgccgcaggcatgaagtagtgggtagcgtagatcgagtataggtacgtatccactggatgggtggtgatcagttcattcctatttcatagatcttgttggtaggctagtcagattttttttatctaaatctctctttttcgaactgcatgagtgcttaaagttttgaatttttcatggccaagttcatgtgtattgtgttgttttagttctaagtttcttgaaccatggttcttctctcctgtgttgtttttgtgtttttcagagccttgattacatcttttgatagcaaagttcaatgtagttgtgcagacattcgatagttgccgccaccgacagccgtatggtagacatcaacgagctcgacgagtgggcagctggcggcggctcaaccacttcggcacttgtgcccatcatccccaccgtgaagaggttgttctcgacggctcgctgaagagaaggtggggaagttcctgacaaactgggcccactctttttttttaattcatatgctgactgggctaacacgtatacaccacgtcaaccaaaaccgctatcaaaatagctgagagagtcgttttgcacggttttcatagttataggggtcgatatttttggttttacgtttaagggatacgaattagatctgacgtatatttgagggagtcaaattgaatttttttccaggtagattaggagcataggacttcattcaaatgtttcttgttttttttgggcttcactgctggagaaaccatttattctcccggttggtaacccctttagtcccggtttttcaaccgggactatgaatccgggactaaagatgcccatatttagtttcggttgaaataaccggggctaaagatccatttttgtcccggttggtaacaccaatcgggactaaatataccttatctttagtcccggttggggactaaagagagggtagcgacagttccatttggtctctttttttttcattgttttttagctggagtttaatccctgtattttctcccaaatcaagtgggatacatatcccaaatcaaacctcaaatcaaagtaacatcccaaaacattcccattacaaatcttaagttacttatacacacaaatcaaatatatcataaatcttaaaaaaattacacacaaaccaaatacatcacagattatacatctcaggtcatgtcacgtcccaaaacgactctaaaatacatcctctaaattatgcctagaataattaaaatccgtgtgaaagcctccaacaattaaaatgtgcaaagttaaaagtcaaataaggcttggaggatttttgtatatttcctaaaagcctaaaatgcgtaaataaattttagtggaattttcagagcacaaataataattattaagaaataaacaaagttaaaatggttttataaaaagaaaagctctaaaaagtcccctttccctccctctccctcttgggccggctcggcccatctccctccccctccctctcctctccccgcggcccatccggccttcccccgcgcgcgcgccgctgacgggcgggcccgcccgccaccctcgctgacgggtggggcccacccgtcatccccttcctcccgccgctcccgccgcctcgcccgcgccctagcggcgccgccgccgcgaatcccgccgcctcctgccgtccccgcgtgcaatcagtagggggaattattccccgtgattccctctccctttccccccacttttccctctctctctcgcgttcaaacgggcgaatttgcccccgcaaatctcgccggcgccattgatggcggccggacctcccgcgcctattccttccccgccggccgccctctcccccttccaaccatatataaaccctccccgcgcctcctccgtccgtttccgcctctcgccgcccttcctcctcgacggaatcgagctcgcgccgtcgctctctctctccgccgtcgccgtcgagctccggtccgccgtcgtcgtcaccccggaccatctcccaccccggcgtcgcctccttcggcttcgccgcatcctcggcgaccttgtccacccctccgtttcgctcgccgaccgccggaacgccgccgtccccgtcgacctgagccgcgccgccgccttcctccgctccggctgccattccgtcgtcgccgtcgacctagggtgagccgtggaccgccgcttcttttcccccttcccttcccctctctcggccgccgctccgccgtgcctatggccgccgccggcgaccataggggcgcgggtgcgccgcctcccgccggctgtgccggcgtggccgccttcgggcgcaccgtgcggctgccgcgtggggcccggccgtcagccgcccgcgccctcgggtgcggctgacgcgtgggacccacggcgccggccggtgtgagcccgggtgcgcccggtccatcgtggaccgtgaggctgccgcgtgggccccactcccgtggacccggtccgcgcgcccctcccctcggctgacgcaataaaccttttttttaattaaaatttaaatgaagaaattcgcaaatattcatttaaagagcatataaacttcaaatggccaactcggaattggaccgttcaagtctctaatttttccttaagaagtcaagaacccatttttgtgctttgtttcagcttgttatatggagtttattagagtaaaagccttttcttttccgttggtcgtgtagacgctgcagcttcagaagatccgctcttcgtggaagttgaagccgacgtttgggaaagcgagcaaggcaagtcacatcatccttgaacatattgaatcccagtttataaaattattttgatttaaattattgcattatcgctttatttaaattcccgcgttatcactgttttatctagccatgcctatttacttttgttatgaccttattattgttattgttattatttccttgttcaccctagaataaacaaaaccccaactagtggacactctactcatggtaccactagtatgattttaggtagatgcttcgctggttaattaggcaacattatgtggttttacaactctagactttgggatattcatatcacctggacactatggaatggtttgattattgtggaattggattcacacctccccctctattcaaaaccctcaaaatggttttaggctgggctcggggtgcatggttttgatagtagcacctcggccatacaaggaccggtcttcgggcctctgttgcaaagcactaccgtacttccacatgtctagtgggtaaggcttagtttgtggctcagtctggttataaacaaaagtacacggatggagatggacgaagtcgggggtcgatggacatctctaggacaaatgaaggctacacgagctgcggcccggtagtcgagatgtcatggcacagggccggtgtcctgctgctcggggctcagtcctgactacctgtcacatcctgatttttgtttcaggatttataaattatttaataaattattaatagaatttatgttaaatgatctttaattttcaagtgaagttaaatgtgggaaataaaatttcctaaatataaagcatggatggatttaattttttattaaattctccatgattaattatactctctgaaattttctcggaattttcggagctcaattcctaatgttaataatacaaagagcatttcagtaattacccacatattaaattaatcattaaatggtctgattataattttgttaagtactttgagtgttcaagtattttcaagatttttcttggaattatttgagcataggaagtatttttaacaattcaaagatcatttcagtgattaatttaattggaaaagtatttaaaatccccttctccttttcgggccgaaataggaaaagttcagcttcagtcctcggcccattctcccattttttcggctggccttatccctcctccaaagtctgctttgtgtccctctttcaatcgggccaagaagtagaagcccagccgaaagtctagttggcctccctgcgctactgttcatcttccagctctggacagagcccgagccagccgagcctgtgcacagtgccgccttcttccaccaaatccggcctcctcgttgctcctctttccaaattagttgcgggaatggaatcctctcaatctcctcttccttttccccaagaaatccccaaaattttatatggaaatcctttccaatttcgcggttcaacctttcctttttccggcgaaccctacctaatccgtcgccgattccatccgttcccgagtcgttctctccctcttctggctatataaaggaccccctagtcctcctctttcgtttgccccctctcccgtggtctcccgtgcctcgtagcgccgccaccacgtgctccaccccgccgtcgtcgccggcgccgctccagccgccgtgcgccgtcgccccggccgtcgccggtcagtgccgtcgcctccctcagcttcgcaagggtgagagctaccccggccacccgttcttttgcgccgaaccccgccggaagtcgccgtcaccgtgaaggccgaaccgttgccatgttttgatctccggcgaagctttgccgtcgactccgtggtcgccggacctcgccgtatccactgtcggcatcgcagcagtgaggagaagcccggcagccatctccccgaagccaaaatccaccggagctccatcgtcgccgtcaaccctgtggagattatggatatcccatatctacacggcgatggtatttggactgggtacaggatacctaatgtagatagaatatcttatctgtatctcgggtttgtttcttaacttgtgtatcaaggaaacaccctgagacttagtcggttacgactatatttcatctgtatttgcatattccgttagggatatagattatcttttgtaacacggactcctccccatatataaggggggtccgggtgcctctaggggcagatgttgattttccctaaatcatacaatcaataatacactcggcggattcatccccggacaggagtagggtattacttcttttataagaaggcctgaacctgtataaatcctttgtctccaaacccatacactttcctagcttgatagccacccccttttattattgccgaaatctagtttcgacagttggcgcgccaggtaggggtagcgtcaagcttttcgccgatcagtgcaatgggttccgtctccggcatcgacgacctcgtcttcccacccgggcagacgtttcggttcggcagcctcgacttcgtcaccaacaacttcggcaagatctctctccttgactcggaatcaaaccagtcgggagagaaccggctttcagtcccgtttggattcccgaacgcggctgaaagctacttcaaaaccatctcaaccgagtcggcttcaaaccactcggccgagatcgcatcttctccaacgacaccagatcaagatgatggggcttacccaccagtcctgatgaagctccccgacgatttggtggccgtctccatcgcgacagcgtcttcttcccgtaggcctaggcggaagtcggcttcaacactgatttcgcctagcttcagggaagttggcgtcatcctccaaccactcggcacggtttcgacggatcagctagatggcgactacagctctcccaccgtcgactcgcgccccaccaacatcgtggagtacgacgagtttagctctcgctaccacgatccggatctcgacgacttcgacggaagcctagatgacaactacacccctctctactttggcgtcttcatggccaataacgagacggaggagcaacgccaagcccgggagaccgaagcgcgtcgcgagactgagcgccgccgactggaagaggagcatcaagcacaagaacaagaacgattacggcgtgagcagcaggagcgtgagcggaccgcgaaggaggctgaagatcgacggcagcgagctttggaagcagggcgccgggcgcgtgatctcatcggccagcaagatgttgaagggacgccggttttccgcacccctcaacagaatgcggttgccgcgatcacccttctcgacaccctcctcaaccaaaacgagctcaatcaatccgaccacgtcgtcaacatcttgaaccagacgaagaccatgattgcggcttcagtcccagttaactccgaaagcgtccacacgccgactggtagccgagtccctcacttccgatctcatgactaccgtcatccaagcctcagcatcaccggcgcaggatctaatcgcaggagcaggggtcacgacgagcggtccattcactcacctcccgaccaatatagggagcgccgagtggaacggcctcgctcaccacctcgtcgccgccccgtcgatcttcgcgacacaatcatacagcgccgagcagctcgaggccatcatcattcgccgaaccgccacgacgacgaccttgacggagtagcagccttcaccgacgatctgcgtcgagtggattggccagccggcttcaagccgactggaatagagaagtacgacggtaccactaatccagaatcgtagcttaccgtctacggtcttgcaatccgcgcagcaggaggagacaacaaggccatggcgaactatttaccagtggctttagcagattccgcccgatcttggctccatggattgccccgtggtacaattggatcttgggctgaattaagcgaccacttcatcgccaacttccaaggcaccttcgagcgtcccggcacacaatacgacctctacaacgtcattcagaagtccggagaatcccttcgagattacatccggcgattttctgaacaacgtaacaagatctccgacatcaccgatgacgtcatcatcgccgcattcaccaaagggattcgccacgaagaattggtcggcaagttcgggcgtaagccccccaggacagtcaagcttatgtttgaaaaagccaacgagtacgccaaagccgaagacgccgtcaccgcatcaaagcagtcgggtcccagttggaagcaaaacaagggtacgccggctacgggaggaggtggaagtaacaatcataaggaccgcaagcgtaagcctgcggaacttgttgcaaccgccagtcactcttctcgacagcgttcgcgcgtcaacacgttcgacaagatcatgaactcccaatgcccgcaccatcctaactccaaccacgtggccaaagattgtttcgtctacaagcaatttgcggatcaatacaccaagactgcacgaaagaactctgacgaagaacaaagcacgtcaaggaagaaggacgacggcgacaccccggcaggttttcaagatcaccgcaaggagctcaaccatatcttcggcggccccctggcttatgagtctaaacggaagcagaagttgactgaacgggagatcaatgctgttcagcccgacacgccccagtatcttcgttggtcagagattgcaatcaagtttgaccgctcggatcatcctgaccgagtggtccacccggggcggtaccccctggtactagacccagtggtccgtaatgtcaagcttcgcagaaccctcattgacggtggcagtgcactcaatatcctcttcgccaagaccttggatgatatgcagattcctcgctccgagctaaaaccaagcaatgcgcctttccacggagtaattccaggattatccgcaactccactcggccagatcaccctcccagtcacttttggcactcgggaaaacttccgcacagagaacatcagctttgaagtcgccgatttcgagacagcataccatgccatactcggacgcccggcgttagccaagttcatggccgtcccgcactacacttacatgatgatgaagatgcctggtccccgaggagtcctatccctacggagcgacatcaagcaagccgtcacatgcgacaaggagagttgcgacatggcccaaactcacgagatggcgtctgcccgagaggttatccgactggctgcagccacggcgagcgaaggagaagtgcccgctaccaagatttcaaagaatggagaaagcgaagccaagactaagaagattcccctagatccctctgatcctactaaaactgctgtaataggcgccgagttagattgtaaataggaaagcgcgctcatcacctttcttcagaacaataaagatatctttgcgtggaaaccatctgatatgcccggtattcctagagaggtgattgagcactccttacatgtcaaagaagatgccaaacctatcaaacaacgactccgccgatttgcacaagacaggaaagacgcgatcaaggaggaattaaccaagctgttagcagcaggcttcatcaaagaagtccttcatcccgactggctggcaaacccggttctagttcggaagaaaacagggcaatggcgcatgtgcgttgattatactgacctcaacaaatcctgccctaaagatccttttgggttgcctcgcattgaccaggtagtcgactcgaccgccggctgtgagcttctcagttttttggattgctactcggggtatcatcagatccgactgaaggaatccgactgcttgaagacttcattcatcacgccttttggtgcatactgctacgtcaccatgccgtttggactaaaaaatgcaggagcaacttatcaacgtatgattcagagatgcttctcaacacaaattggccgcaacgttgaagcctatgtggatgatgtagtcgtcaagaccaagcaaaaggatgatttgattttggatctagaagaaaccttcgcgagcatccgcgctttcaggatgaaattaaaccctgaaaagtgcaccttcggagtaccgtcagggaagctgcttggttttatggtgtctcataggggcatccaagccaacccggagaaagttactgctatcctcaacatgaaaccgccaagtacccagaaagatgttcagaagccgactggatgcatggcggcgctcagccgatttgtttcaaggcttggcgagcgggggatgcctttctttaagctgctgaagaaaacagataacttccagtggggacccgaagcacagaaggccttcgaagatttcaagaaactcctcaccgagccaccagtcttagcctcaccacacccgcaagagccgttgttgctgtatgtatcagccacctcccaggttgtgagcacagtcttggtcgttgagcgcgaggaagaaggccatgtccaaaaagtccagcgaccaatttattttgtcagcgaggtcctagccgactccaaaacgaggtaccctcaggttcagaagctgttatatggtattctaattactaccaggaagctatctcactactttcaaggtcactcggtaacggtggtcacatcatttccactcggtgatatactgcacaaccgcgaagcaaacggacgtattgctaagtgggctttggagttgatgtctttggacatatcattcaagccccgaatttcaatcaagtcccaagcgttagctgattttgtcgccgaatggaccgagtgccaggaggatacccccgcggagaacatggagcactggaccatgcattttgacggatccaaacgactttcgggcactggagcaggagtggttttgatttccccaactggagaaagattgagctatgtgctttggatacatttttcggcgtcccacaacgtcgccgagtatgaggccctccttcatggactacggattgcaatttccctagggataaagcgtctgattgttcgaggcgattcacagttggttgtcaaccaagttatgaaagagtggtcctgcattgacgacaatatgatggcatatcgacaagaggtgcgcaaattggaagacaagttcgagggactcgagctcagtcacgttcttcgacacaacaatgaagccgccgacagacttgccaattttggatccaagcgcgagacggcgccctcagatgttttcgtcgaacacctttatacaccgaccgtacctcatagagatactactcaagatgcggacactcatgacgtagctatggttgaagccgactggcgagagcccttcatacgatttttaacttctcaagagctcccttgtcacgcccagaaattcccgaatagaattccaagcagaatgtgtattaaaacccccgtccaggaccagccggggtacacaaacgacaatgttgacatacagatccacgtcttacaaacattataaaagtcttacagaaatgcagcggaaaacaaaagaaactggagctaagccttgacttgaacggcagcgggaacaccactccacaggcatcctcgacggcacggacgaagcctactcctcggagaacccgccatcggacacatactcgagctctgaggttggggggaaaagtagagcaagactgagtactacccactgtactcagcaagtcataccggaataggggtatgatgcagggaattaacaaagaagagctagagtggttcatttgcataaatactggcatttataaacaggaatttaatgcgaaaacagttgtaaaaattaaacagtattaaacatccgctgtccaacgctaacccacgttgcgacaggcccaaccatccacctaaactatccaaattcaacagattacactagggtgagactaatc

SEQ ID NO: 17756 - DNA, 10951 bp, Oryza sativa
ggatactatcttcttgggtaccccatgcaaacacatgatccttgcgaggtacaattctgccaatctctttcccgtataggtggtatgtactggtataaagtgagccaccttggtaagtcgatccacgactacccagattgaatcatgtcccgatgatgtccggggcagtcctgttataaagtccattccaatctcctcccatttccattccgggatttgaagaggttggagtaaacctgctggtctttggtgctctgctttcactcgttggcaaacatcgcagagtgcgacgaattcagctatttctctcctcatgctgacccaccaaaatttttccttgaggtcttgatacattttggtgctgcctgggtgaatggagtactgggtctgatgagcctcggtgagtatcagatccttcagttctttgtcgtcaggtacacacaatctttctcccatccagattgtgccatgctcatcttcatggaaatcccgagcctttccgactctcatgttctttttcagttctgctatttccggatcatttacttgagcggctctgacttgatccacgagcgtaggccgtgcctccaaagcggctacaaacccgtgttcaacaattcccatgttgagatgttcaaattcctgccgcaattcctcacacatgccctcgatgcatagggcagtgcagtaacttttccggcttaaagcgtctgccaccacattggctttacccgggtggtagtgaatactcatgtcatagtctttgattagttccaaccatcttcgttgtcgaaggtttagatccggttgggtgaagatgtatttcagactcttatggtccgtatatacttcgcagcggtttccaatcagataatgcctccagatcttcaaagcatgaaccactgctgccaattccaagtcatgagttggataatttccttcgtgtggacgcaactgccgcgaggcatacgcaaccactctgccctcttgcattaggacacatccaagtccgtgacgggatgcatcacaatagacttggaagtctttcgtctggtcgggcaggatcaaaaccggtgcggatactaatttccttttgagctcctcaaagctcttgtcgcactcagctgtccatttaaacttctcgtctttcttaagcaactgagtcatgggtcgggcgattcttgagaagttttcgatgaaacgacggtaataactagccagtcctagaaaactccgaatctgcgacacggtctttggtggggtccattttgtaactgactccacgttcgatggatcaactgccacaccctgggctgtaatgacatggcccagaaatttgacttccgtcaaccagaagtcacacttgctgaacttggcgtatagctggtgctccttcaacttctcgagtaccagacggagatgttgttcatgttcctcttcggactttgaatagataagaatgtcgtcgatgaacaccacaacaaacttgtccaaaaattctatgaacactttgttcatcagattcatgaagaatgcgggtgcgttggtaagtccgaaagacataaccgtgcactcatatagcccgtaccgagtggtgaaggccgtcttcggaatatcctcttcccggattctcagctggtggtagcctgatcgcaggtctatcttagagaacactttagctcctttcagttgatcaaataaatcgtcgattcgcggtaagggatatttattcttgattgtgacctcgttaagtgcgcgataatcgacgcacatcctcttcgtcttatcctttttctccacaaaaatgaccggagcgccccaaggtgaagtgcttggtcgtatgtaccctttctgcagctgttcatcaacttgcttcttgacctctgctaattcgttggccgccatcctgtatggtctcttgtaaattggagcggttcccggtgccaagtcaatccggaattcaatctccctcttgggtggcatggtagtgaggtcttcggggaacacttccggatactcgcagactatgggtatatcttccaattttctcaagttcttccccacggtgtccactgggatttccgtttcaatttgattcaaggagactccttgctttggtgagtctggtgatttgtacactacggtttctcccttctcgttggtcaaggtgactgtgcgactcgcacaatcgatgacccccttaaacttggtcagccaatccatcccaagaatgacatctaggtctttggattcgagaagaatgaggttggctagaaatggtgatctttggatttctattagcactgaagggctaaaactgactgaggttgaactatttcccggggtacgaaccctcattggtgtgctaagctcgtctttccttagcccatacattcccacgaatttctttgaaatgaaagaatgcgttgcaccagaatcaaaaagtactgttgcagggattgagttaacagggaacgtacccagtacgacctctggtgctgcttgtgcctcctccgcagacgcgtggttgacacgagcctggataaaccttggcccggcacgcctgggcttcgggcatttgtcagcgaagtggccaagctcgccacagttgaagcaggaccctggttttgctcccgtctccttcttggcttgcgcgggctgggctgactgtgccggtgccattggtgggcgtggagctgcaccgcggttgggctggcctccctggtggttctgactgccactagtgccctggtggaagttgctggagttgaacgggcggtgctggcggacgatcatggtggtaggtccaccctgctgtccgggagtgaagcgcggtcggtgctgactaccttggttggaccggaattgcgccgcctttcttttcctgtccattttgttgcgctgatcctcctggcggattgccttgtcaaccagcctctcaaagtcggcgtagtccccagatatcagttggttggtcagctcatcatccagacccgccatgaacttctcctgcttctcggcgtcggtgcggacatcctctggtgcatatcgcgcgaggcgattgaactcgtggaggtactctgtcacagtcatgttgccctgatggagcgcccggaattccctcttcttttgtgccacgaccccgtctggcacctgtgccttcctgaagctacggcagaactctgcccatgtgacttcagtacccggtgggcgggtggccatgtggttgtcccaccaagctgacgcaggaccctgaagctggtgtgtggcgaaagcgaccttctcctgatcattgcactgcaggagattcagcttcttctctatcgcatggagccagtcatttgcctccatagggttggtggtgctggagaaggtgggtggcctgacacgtagaaactcaggcaacttggactgggggggagggggaccaaactgctggtgctgctgttcggcgtgctgcatcatcctctgatgcatctgctggtgctgctgctgcatctgctgcatcatggctgccatcatctgagtctgatgtgccataacttgggcaagcgtcggattctcgggaagtggtggtggaccattgccagaatcaccgttggggtgcacaccatcagcgcgttcttcgccgttgctgccctcgcctgttgcgcggctaccagtcctggtgtagaccatctggagggaagagcagacggggaaaagaagaaaaacagatgctcaagaactaagctttattacaaaggaattaaaactgtaattgttctgatctgaattaaaaacacttaaaagggcaagcaaatatccttattaagacagccatatcataggcacatgatatcgaccgccgactgaccccaaacaagcaacctacacacacaaactaacaaacaaaaactagacagtcgatgaactagtggaaaaacgagcctaatgctcggaacggctcctgcggtcggtggagtcgaaggcgtcctcctgctcgtcacccggtccctctgagcgactcctggagcctgacggatcggtctcgccgctgccgctgggagtagcagacagccaacctccggtaccactggctgaacctctggcggctgatgctggagcgaaggagagagtgaacgcgggagttggagctggagctggagctggaggaactgcgggaactgccggagctgcgggcggaactggaggtgctgcgggagctgctggtggaggtgggttcctgggcgcaagctggatgcgcacgggtgcagtcgtcctcttacggggcgtagtgcggatccggactcctcctggtgctggaagacccttcaactgagcattctccttcttcaggcgcgctatctcgtccttcagagcgacgatcctcatgagcttcccatcattcaaggccttggtcgccttgtgcaggtccgagtgcatcctgtccaatcccctcatcacagcacacatgtgaccaaaggtggtgtcgttctcgccagctgtcggacggaaggagctgacgccatcaccatgggctcgacgggggtggtagcggtacgccgtgtcgtggaagatgtagtcgtggcgctcccgtaacctggccatcatcaagtaggctgcctcctgacaggcgtgatctgctgtgcctcctgatgcctcgaccgccatgttagcgaggcaagtccccacgtagccatggacctccaagcggacacggtaaggaagctcgccactgagcggtgggatggtcgtgtattccggcgcgtcggggtagcccactaccagtgtcatgcgtgccaactctgccacgaaatcaatcatgccttctccgcggtggttgggtgggtgaccggccatctagagaagacaaagaagtaggatcaatgcatgctcaaatccaaatttaaataaagcaataaagactcaaataaaggaatcaaataagagcaaaattttatgcatagatcattttacatgagcgcgaataaataagacagactcacataacgataaaataatgggaaattagatacataataataataacgaacaaagcataaataccttgcaacccatgataccgagctaggaccgaatgcatttcacccatcaaatcccaactgactgacgaataaatcccaataattttactaaaaccctagactgactcgttttgaaaaactcactttaaacgagcgaccaagatttttcccttgaaccacaagaacagatccccattttcccggaacaaatccaattgcgaagaacatatgcaatgaaaaaggattcagagggctcttaggtttctccatttggcttgtcctacggtcaaggtcggctctgataccaacttgtcacgcccagaaattcccgaatagaattccaagcagaatgtgtattaaaacccccgtccaggaccagccggggtacacaaacgacaatgttgacatacagatccacgtcttacaaacattataaaagtcttacagaaatgcagcggaaaacaaaagaaactggagctaagccttgacttgaacggcagcgggaacaccactccacaggcatcctcgacggcacggacgaagcctactcctcggagaacccgccatcggacacatactcgagctctgaggttggggggaaaagtagagcaagactgagtactacccactgtactcagcaagtcataccggaataggggtatgatgcagggaattaacaaagaagagctagagtggttcatttgcataaatactggcatttataaacaggaatttaatgcgaaaacagttgtaaaaattaaacagtattaaacatccgctgtccaacgctaacccacgttgcgacaggcccaaccatccacctaaactatccaaattcaacagattacactagggtgagactaatcacggtgaatctggttgaccgcccataaccgcgggcacggctattcgaatagttttactctgatcagaggtgtacaactgtacccacaagacatagccccacgacacgtttccgtgcgccgacatgccaccacgacataccggaaagaggccgtgacaggacccttcgcataaccccctctaaccaagcacaccacacctcaggtttcacccccactcctcgcaaggcagcgggcagtcccctctcgtgcctaggtgaatccggaagccgcatagaccgtcgcagggcccatccaaactccatcacgcccacccttgcctggatgcgtcggctagaggaaagctacactacaagcccagccgttgcccacgctggcttgtggtaagtacgataaattcttccagggcatcccgcgaaccggtccttaactgccatgggtgcgaccagcaaaaccatgcacccacagcccaccatgtggttcattttatttaaccaacaccagagcggtggtattaaaccaacattatcatataaacctatagtctaggttttaaatgagatccccaatgtgtgctagttgaactaagcatggctaagcaattcctagtccaacgtctaatcatgttataacccaagctaacaaaggagcatgatatccaaaagcatggctgtaacaataggtatccatcccatagtgatattataaaacaatgcaatatttgaaagaaaacaatagagcatttgcaatataggatcaacatgttcaagtgacaagcatgacttgccttgctctgctgctggaggtacctcggcgactatttcgaagtacaccggagcgtcggagggatcggaatctagcgacatacaaagcaaacattgcaaacaggctataagactactgaaacagagaacaaaaccatttttaatggattctacacatttttcttgatttactgagatttgaatgggattaaacggagctcggatgaattagatatgaattttagaaaattcactgtgtttattactataaaagaaatccttaaataatttattgcgcaatattaaccagggctgacgtcagcgagggggcgcggcgccgacaggcggggcccaccggtcagcgaccgggagagagagaaagagggtggcggcttgcgggcccaccggtcagcggcacgggaaaagaatggggcggcggcgccacgtggcgaccggaccggcggccccgatctacccaagggtagatcggacggcggcgcgggacctcgcggccggggcgcgcgggcgcggcgcgagacggcggcgaccatggcgccggcggcgcggcgctcacacggcggcggcgcacatgcggcagcggcgcaaagcgacgaccgacggcggcggagagcggcggctagaggagaggaaggggaaaagaagggaggggatgcctcaccgagggtggccggcgcggaggaaggcgatggcggacggcgacggcaagccacgggaggacggcgtcggctagcggacgagcttcggcgtgccctaaggaaggagaagatagggattagagagagagatggaccatggcgatcgggatccatggccgaaggcggcggtagaggtggcgctcacccgtgcgcgtggagatgagggctccggcgacgaacctcgacggaggaggggtggacgaggtggacctcggccgcgcgaagctaacggcggcgacggcgtgagacggcggcgagcctagcggcggctagcggcggccggagtagcaaaagcggcggcggcgggtggttgcacggcgcggaggcgttggggagctcgggagaggtcggcgcaatggggaaaaagcgagagggggtgccggtgatgcttaaaaaggggatgggggaaccgaacgtggccgggagcggcgggattcgacggccgacgtgggggagtggggaggagagagaggcgggattcggttttcgaatcccggccatctcgggcgcgggcgcgagcgggagagggaggggaacgggcgcggggaatgcggcgcacgcgcgggcgtggtcgacgtggcccgggagagacggaggcgtgggcgcggcgtcggttgcggcggtggcggcgcgagcgggatcggcgggaggagggagacgggtccgacaggtgggccccacctgtcggcgaccccgagaggagggaggcgggcggccggctgtcgggctgggcctcggcctgggccggcccagtaagggaggggaaggaagggagaagtgggccgacggcccacttgacaaaaaggagggaaaagagaggaaaaaggaaaagaaaaggaaaaaggattttccctggaattaacaattgcactttagtgatttttaattggttaaaaattatttctagagctctgaaaattccactaaaaatcctgttaatgaattttgacatgtagaactcaagaaaaattccacatgtcaaatccgattattatttgcattactttcttagggttttctcctgatttcaccagcattttcttagggtcaattataaattacaattttgacttgggaggaaaacttcggggtgtgacatccctcatgataaagatgaagccgagcggatttcaaggcggagcaaactttatgttatgcatgaatctgagttatacaagaaaagcccttcaggaattctgcaacgctgcgtatctttagaggaagggagacaattgctgaaagacatacattctgggatatgcggaaaccatgctgctgcacgcaccattgtcggcaaagcttaccggcagggttttttctggcctactgcagtgtccgacgccgacaaaattgtgcgcacatgtgaaggttgccaatttttcgccagacaaattcatctaccagctcaagagttgcagactatcccgctgtcttggccgtttgcggtttgggggctcgacatggttggcccgtttaaaaaggcagttggcggttacacgcatctctttgtggccattgacaaattctccaagtggattgaagctaaaccggttgtcacaatcacagcagataatgctcgagacttcttcatcaacattgtgcatagatttggagtgcccaatcggatcattaccgataatggcacacaattcaccggtggagtttttaaagacttttgtgaagactttggaattaagatttgctatgcctcagtggcacaccccatgagcaatggacaggtggagcgagccaatggcatgatacttcaagggattaaagcgcgtgtttttgaccggctaagaccctatgccggcaaatgggtgcaacagctgccatcagtactttggtctttgcgaactacacccagtcgggccacaggccagtcaccttttttccttgtctatggggcagaagcaatgttgccgagtgaagttgaattcgagtctttgcgctttcgaaatttccgtgaagaacgctacgaagaggaccgagtggatgatttgcaccgattggaagaagcccgcgaagcagctttgattcggtcggctcgatatttacaaggattgcggcgctatcataatcgcaatgttcgatctcgtgcctttttagtcggtgacctggttttgcggaaaattcaaactacacgagatcggcacaagttatctcctctatgggaagggccatttattatctctgaagtcacccggccaggttcttatcgactcaagcgcgaagacggtactcttgtcgacaactcttggaacattgaacatcttcgtcgtttctacgcttaagtttatcattgtacttccctatcttgactgtcaacatcaagttttcttcttgaagttgtcagtcgggggctatcatcataataatggagtgtgattttttatcaatttaatttgcttacttggtctatcattgccttgtttgattttttctacttagtctgcgaggactgaaagtttttaatagcttctttgggttttaggctcaacaaagcttgataaaagcttttaagaaatcaaagacttggctagaactatcaagcacagcataaatacaccggtattgtacaaattgagcctccatttgttacattcatactcagtcagagtcagtcctttcatcatcagagttattattactcggctgaagatcgttgttgcggaattgctctacaacatcacttgcaatcttgtcagccgcactttgagcattactgataagatcaagagcagcttcttcacttgtcccgtctgcaaagccatcaatggtatcaatttcaatcctcgggtacaaggatttggtcatcgccaatgccatactagctcccatacttccagctttcttgatattcttgaagtatacatccggtgcaactctcagcttgtcaaagatttcggttgcgtcaagtgcactcggaccactgttattaaggaacatagcttggacaagtggtgtagcgacattggcgacttcgtctcttgctccttcaagtttcttgatcttaccaaccaggacgtcaaactgagcttgagatttgattttacggtctacaaaacacatttataataagaatttgctgcattaaaaagaggaaagttcagattgtcagctggcagtaccttcaacctccttcaaggctgagtccctttctgcagccagttctgctttgtcttttttcaaggcttctatttgcttctccatttgagccatcctggtggcttgcgctgtttgaaatccaaatgtttgaggatccagttatgacagcacaaatgggacagatctagagattaccttttgatgaaccatcagctcgaagttggagtcctgaagctgtgcaattcgatcccttaattccttctccgttttcttggcatgctccttggcctcgtgtagctgttccctaacggcttcaagagttcccaaatgtggaaccagcttttctaaggttgtggtcttggcctcattgcgaagatggatcctctgcacggtggttcatggattagttttgctaacgagacaataaagtcatcaaaggcagtcacctagaagacttacattcacaatgcgag

SEQ ID NO: 17757 - DNA, 703 bp, Oryza sativa
tagaagacttacattcacaatgcgagtagcttctccaagtactttcttcagctggcacacttcctcatcttctttttggcgatttatgacaatgccagaaacttgagagttctcgtcccaccatttgagtaagataggaggacgagagtcatcagctgcctttatgcggagaatttcttcttcgtcgccgcctaatggacctgatgcattcccaagacattagacgaacaagctggagttattcagaacggcatcacttgagaatatgagttacctgaggatgtgcctagttgagcgtgaggtgatctttgctctttatccagagacccaatcaccgagtcattgccagcttttggtccttgggaagttgtcgcttgtgctccagcttcaggaatctcttgatttagacccacatccgactggtttccagtcaggggttcttgggttgttgcagtttcagttgcttccgactggtttccagtcggtggctggtcactcggatcggccttgtcatccgaagcatgggcgccagtcggctggtttttggcagtcggctggttttcggcagtcggctcagtgtctttggataaatttggctctgtcacagccggatcaggatcttttccagttggatcaatgtcggatggtttcctgcaaagtgtcctttcaacattcagcgtaatttctatggggctgcaggaat

SEQ ID NO: 17758 - DNA, 664 bp, Oryza sativa
tacaccgctttcagacaaaaggcaagttggcaccacgcttcgtgggaccgtacaaaattttggaacgaaggggagaagttgcctatcagctagaacttccatccactatgatcggcatccatgacgtgttccatgtgtcccaattaaagaagtgtttaagggtacctgaagaacaggctgattcggaacacattgatatccaagaggacctaacatatgtggagaagccggttcacatacttgacactagcgaaaggagaaccagaaacaaggtcacccggttttgccgagttcagtggagtcatcattcggaagaggaagcgacctgggaaagggaagatgagttgaaagccgcccatccgtacctcttcaccagctccaccgaatctcggggccgagattccgtttaaggggggtaggtttgtcacaccccgaagttttcctcccaagtcaaaattgtaatttataattgaccctaagaaaatgctggtgaaatcaggagaaaaccctaagaaagtaatgcaaataataatcggatttgacatgtggaatttttcttgagttctacatgtcaaaattcattaacaggatttttagtggaattttcagagctctagaaataatttttaaccaattaaaaatcactaaagtgcaattgttaatt

SEQ ID NO: 17759 - DNA, 664 bp, Oryza sativa
agcaatccaaatcttatgggcagtttgaagatgagaaacacggtcataatccgaacgagaaatcccactcaaaagaatattgcgagctttgtaattttgttcaaattcagtttttaaaggagcagtattaatttgttcaggaatcacataaggatttgacttttctccgaatatcataatcctcagtcataatgtaagattgcatcctactacaccatgagaaaaatcagttccatcgaaaacatgaggcttagttgaaaacctagcagccatggcaaaaactctagaccggttaaaatccaaagaagaaaacaaagctctgataccacttataggatcgaatcacaataactaagccaaccagaggggggtgaatggttggtatacccaaaaaccgaaaacttttagcggaaataaatgttaccctcaaattcgatggattgcggtctgaccgaagtagatgcgctggtctgaccgcctaaatacctccggtctgaccgaggtagtaactcctgtctgaccgcctggatcagctcccgtcgcctgctgccaccgccggtctgaccgttgcttgccgccgatctgaccgccagtgtgatgccggttagaccgccgaaacccgatgaaacacaaatcgaagaactcttaaaatagatgacgactt

SEQ ID NO: 17760 - DNA, 658 bp, Oryza sativa
ctgaggcttcgacttctgctggtgtgtatcctttggtggcaaggaaggagaacgtgtggatcgtgaattctggttgttcgcggcacatgattggtgataaaaattggttctcctccgtcaaaaaggcatccaagactgaatcgattatctttggtgatgcttctactagtgccgttctcgctacaggtttggtaaaggtaaatgagaaatttgaattgaagaacgtagctttagttgaggacttaaagtataatttactttcagtttcataaattgttgatgaagattttgaggttcactttaggaaaactggaagcaaagtttttgattcttgtggtgattctgtgttgaatatttctcgctatggaagagtgtttaaagctgattttgataatcctatttcacctgtgataacatgtttggttgctaagtttgataaagatgtgatgttttggcattgtagacttggacatgttggttttgatcatctcactaggttaagtggtttggatcttgttcgtggtttgcctaaacttaagaaagatcttgatttggtttgtacactgtgtcgtcatgctaagatggttgcttcttcacatgctcctgttgttttttgtgatgacggatgcacagggacagctattacatatggacactg

SEQ ID NO: 17761 - DNA, 3553 bp, Oryza sativa
aaaaatataaatctatttagaaattaaatttaatcagcaaaaattatggaattgagtaaaaacaatgaactcaaagcattacgaaattatgagaagtaatttaatcaaatctaaaagtagtttttatataagataaaagtaacttacctatataataaaagtaatttacaatataaatgttttttcatcataatattatcatgtaagatcttgttataaagatttaattgcaacggacacaatggtgtaatcggattatatatcggataagtaatttaagagaaaattttataagaagaaaaaaaatatgcacaacctaatagcaaaaactacttgcatgcatgtctgtaacgctactagtacttctcacgtaattgtccgcgtcgctcgttaagtctaaatcgagatgcctctcgaaatagattttgcgtaaattattccctcctccgttctaaaatattttaatacagaagtagtatttagcgtgttaggtaagctgcttaaaaaaattatgtagttataatttattttggtatgagttgttttatcacttaaggtatttaaaatttttgaataagacgaatgatcaaacataaacatgtgttcaaaagtcaatggtgtcatcgattaaaaaccagagagagtagatttcaggacagagggagtattaaattagacacgtgtttgttatcattttttttgaaacagttgacggtaagatttctaccggatatattagaagaaaagagtttttacctaaagggggagagagttcacaaggcaacacctccaaggaggaaacagcacccgcatacatcgatgtcaccgatcctgtaagaccagacaaggatttcacccaagactgtcgccgatcctgtaagaccaggcaagaatttcacctaagactaccttaaaacgtgtagaaccttcaagaaacaagagcaaaagtgttgagtgttatcgttgcccaactcatcggctgacccgatgcagcagctccgactccgccttaacacgaaagctcaagcaccgtagagaaaagcacaccgctccaaactcggcactaagacagatccacacagtcacagggctcttatgcctcgccagtgctttgttatcattttgtaccatgtcttttgggcctacggtgtacattactacatgtggagcgattagcagcagccatttcgtagttagaatagaagaacacactcttgaggctatcagcaaccagctccactgctagctccaggccggtcatggcggcggctggtcacgatgtgcagctcccccacgtcgccatcttcccgttcatggccaggggccacaccgtcccgatgacccacctcgcctgccttctccgccgccgcggcctcgccaccgtcaccttcttcagcaccccgggcaacgcgccgttcgtccggggacagctcgacgacgacgtggccgtcgtggagcttcccttcccggaccatgtcgtcgcccgcggcgccgcggagtgcgtcgaggccctcgactccctgttcccccttccggcgttcgtcgaggcggtgtcggcgctccggccggggctggaggtgtcgctcgccgccgctcggccccgcgtcggcctcctcgtcgccgacgcgttcctgcactgggcgcacgcctccgccgccgcgctcggcgtcccgacggtggcgttcctcggcgggaacatgttcgcgacgatcatgcgcgacgtgatcctccgcgacaacccggccgccgcgctgctgtctggcggcggcggcgccgaggcggcgacgttcgccgtgccggagttcccgcacgtccacctcacgctcgccgacatcccggtccccttcaaccgcccgtccccggagggtccgatcatggagctgaacgccaagctatggaaggccatcgccggcagcaacggcctcatcgtcaacaccttcgacgccatggaaggccgctacgtcgagcactggaaccgtgaccaccgcgccggccccagggcgtggcccataggcccgctctgcctcgcccatggcggcaccggcaccggcaccggcgccgtcgagccctcatggatgaagtggctggacgagaaggcggccgccgggagagccgtgctgtacgtggcgctcggcaccgccatggccatcccggacgcgcagctcagggaggtcgccggcgggctggaagccgccgcggccgcgggcgtctacttcctgtgggccgtgcgccccagcgacgccgacctcggcgccggcttcgaggagcgcgtggaggggcgaggcatggtggtgcgggagtgggtggaccaatggcggatcctgcagcacggctgcgtgaggggcttcctcagccactgcgggtggaactcggcggtggagggcgtcgccgccggcgtgccgctggcggcgtggccgatgggcgccgagcagccgctcaacgcgatgctcgtcgtcgacgagctgcgcgtcggggtcagggtgccggtgccgacggcgatggcgacgggcgggcacggggtggtcgggagcgaggtgatcgcgcgcgtggcgagggagctgatgatgatggccggggaggggaagggcggcggcggcggcgaggaggcgaggaacgtcgccgcgctggcgtccaaggcgcgagaagcggtcgccgagggcgggtcgtcgtggaaggcgctggaggagatggttgccacgctctgccgccctgttgaaggagatacaccgaaacccacaaaataagtttatttgtttctacgtttgaccggcatcttataatctatctatctatctatctatctatctatctatctatctatctattattattattattattattattattattattattattatgattattatatactaaaagtccattaaactttctacaaacactctcaagccaccacgtggcgctcctacaaacgctcctagatcggcacgtggcgctttaacatccaaccatcggttttcatttaatctggtgaacccattatttttaaccattggatctttattttaagaaaaaacaaatcaatctatctaaaaaatcccacgttactcggccgtgtcccctgaacctgtacgtctgtacgtccgatgtacgtacatatcctctctatgtccttttctttttccttgttatatatttagattagatgaaaaactttagttcatgttaaccatatgttttaagttgtaaaaatatatgttattttaagttttattctaaatagtgcatctcatcgaaatatccataaaaaaatattaataattaacattatagactatatgattgtatatcacaattaaattggacttataattaaaaaaacaatttaaattttgagtagcattttaaaaatttactcactccctatcgtgtaatactgatatatccaaatgacattattaaatttatcaagaatgtatttttcatatattatatgttgctgtattcatatatttttttttggaaaattaacaaccatatatattttttacaccatgtggatgtccttttatctcttagggctgcagga

SEQ ID NO: 17762 - DNA, 5389 bp, Oryza sativa
aaactataagatgcgatttagcaaaattagtttggcctagaaaaaataggtaaagtgtggcttacagaaatcctaagctgaaactgaaattgaatggcctagcaatgaggcctgcatgtcacatgctcgctggagcagaaatggatgtggccgggcctatggccagatcaggcccataagccaggatgccccatttaattgcctgttgggtgacaattatggaataagttcatccgaggtcccttaactttacaccgaatccgattcgtccttatacctcaaagccagatacaatacgtccctaaactgtcaaaaccagtacaaattaggtccctcggcggtttggaaggcggttttgactgatgtggcgcttacgtggctggtttgactagatcttcgtctcacgtggcattgacgtggcgcttacgtgtcaattctactccggaaaaataataaaaaccgtgggcccacctgtcagttacacaaaaaaataatgtaaaaggtggagcccacgtgggccccatatgtcagcctcactcctcccttttctcttcttcctcatcctcactcctctcttcttccatctcctctctctctctctccttgctagggagcagacgggcaggtggggggcggagcgcacgggcggctccttcgatggccgctgtgtcacgggcgactgcgccagcgcgctgtcctgctccgcctccggcgagctgcccaccacgctgcccgagtacacggctacacgctcggctcccgacccggcaccggcgacgacttcctcgacctgtcgctcatcgacgggttcaacgtgccggtgagcttcgagacgaccaacggcggcggcgccgggtgcagcaaagggcgcgggccgagctgcgccgtggacatcacggcgaggtacgtgcccacccgagctctgtgtcccaggcggctgcgccagtgcgtgcgacaagttcggcggcgacacctactgctgccggggccagttcaaggtctgccctgttggcgttggcagacacggtagctagctggatgaacaaaagaagacttgctacatgcacaaagctaactaaccgatatacttgctccactagcatgcaggacatgcaagtacttgctcatgcaggacttgctacatgcccgccgacaagctactccatgttcttcaaggggctatgcgcctcgacgcctacagctacgccaaggacgaccagaccagcaccttcacctgccccgccggcaccaactaccgcgtcgacttctgcccgccgacgagtggcgtgacggccggcgacgacgatggtgtgcgtggccacggcctcccgcggctgacctgccggatttgtgcaaccgcggcggtggtcctcgtcccgccgcaggccacggcctcccgcggctgagctgccggatttgtgcatccgcggcgatggtcatggtcctcctcctgccgccggccacggcctcccacggtggagaccgccgtgagctgccgaattttcgtggcttcggggtcggtcttcctttcctcccaccgccggccacggtgaagaccgctattgagctgtcggattgtgcagccgcggtgactgtcctcctcccgccgctgttcacggcctcaagaggagcatcctggtggaggcgtacgccgcggcgcacgctgagcagccgccgacagcccgcctcgctcgcctgctccggcgcccacctgcccgtccgctcccgggaagaagagagagaggagagggaaacaaagaggagtgaggatgaggaagaagagcgaagggagagggtaggaagtgaggctgacatgtggggcccacgtgggccctattatttttaaattattttttatgtacctgacatgtgggtctacggtttttattattttttcgaggtagaattgccatgtaagcgccacgtcaatgccacgtggaacgaagacctagtcaagccagccacgtaagcgccacgtcagccaaaaccactttccaaaccgccgagggacctcatttgtaccggttttgatagtttagggaccagttatatctggttttggggtttaagaacgaaaatcggattcggtgtaaagttaaggatcctcagatgaacttattctgacaattattgcaaaatgctacaattgtcacaatgatgaaacaaaagcctactccctatgtgccaaaaaaaattcaaatcctatgaaaccaaacactctccatcgaatttgttcttcttaaaatatagtgctgaaaatctttacccttttcctgttctgaaataaacttatgtggataaacttggaaggtagcccgcgcattcgcgcggaaatgtatcttaggctacgctgacaaatttttaatagtagaatatcaaccgtatggcgccttccacgcattaaaaataatatttcttaacaattttttttcatcgatattgcttagataaattttccatgctatttgttagctttatacaatataatctttaattcatccatatgtgcaattatttgtttcgaaaacatttataacaaattatgtgtaaattgtgattttcctttttttagttgaatgtttagggtctcttttttaacaaaacctaaaaggatattattgccaatgcatatgtttatatgttttatttgtaccaacaagctaattggttcacattgactcattttgttacctgcaatcacgctagagggatgcatgacatagatccaacaacaaaatataactaagcgtagatgatgcatatagtatgtcgctagattgttcaattgtggcaaaaaataattagcaaagtaaaaggaaaaagtataaattacccctggaactatcgcggtcgaccgaattattcctctgaacttgaaatacagatatcgctcaccctgaattttcaataccagacgaattacccccctcaacccattccagagcggttttgtcctatgtagcgtacgcgtggcagctccaataagtattttcttttttaaatggtggggcccacctgtcatcctcatctttctcctcttcccctcttcacctcttcccctctttctctctcactctctctcaggcatgggcacagatcgcgcagcggcaagcgttcggcgcgcacgacgacgggcggtcagcgcaggcgcagtacgaggaggtaggagccctctttttcctcttcccctcttcccccccctctctctctctctcgatcgagtgtcgtcgggtgcgggcacaggttgagcagcgcgagtggtctacgcgcacggcggtgagcaggggcgggcggtggatgacggcacggtacgtggagacgggagcggagaactccgggagggagccggagtggtgggcccctgcctccatcaactcccatcctcctcctccttcatggcgctcgctgtcgtggcgctggcggccaccccggtggtcaccgtcctgaagggcacccccggctgggtgtcctatgtcggggacgggtagcttcaccagtgcgccaagtgggatgctgagggccggcggctgcttgtgtcaaatttcttcgatgtcggcgtgtccaagctctacgccgccgggacagcggggaaggagaaggaggaggagcgggttgtgtctggcatgtatgagctccaacgccaccgggagggtcgcgctggggttcaccatcgacacactgaaggggcgctgctcattgtctatgctgaccggatgccgcggttcgggtactccgcccacaactccggctccctcccggagttcgccgctcccgcctccgtttcctgcgccggcaccgagcgcacgcgccgaacgcttgccgccgcgtgacctgtgcccacgcctgtgagagagggagagagaatgagggggagaggggaagaggagaaagaggaggatgataggtgggccccaccatttaaaaaagaaaatgttgattggacctgccacgtgtacgccatgtaggacaaaactgctctggatcaggctatgtgggggtaattcgtccaatattgaaagttcagggtgaatgatatttggttttatggttcatagggtaattcagtctaccacgacagttcggggagggagggtaatacgtactttttcccaaagtaaaatggccaaaagtcttgctaatgattaatgggtgtttttaaccagcaaagtaaaagcctaaatgctgtcagatgagattttgatacatttttttatatggaatgaaatgatttagacgcacacattaagagaacaaggtcaattaagcgcttattatctgaagtaaaatgggagaatacggttggcacatatatcaataattatttttaggtgtgtatattctgagagctttctttaagtgcggtcagcataaagttgcataaaggtaggcgcgaccaataagggagtgccacctgtcagctgagtaaataatggggttaatttgttcgagggatatgacggtcatttggacactagcgtaaactctatttgttagtttactctagtcgtgattccacaccggaggaacgtacgcagtgttagaatttgccggagaggacaaaggaatccccgaaaagctaagaggcgagtggaaagtttaattacgtgctagtttttatggtttacgcactatatcggccactattgtagatcgcgtttagagaaagaaatagtggtacaaatgatctgatgtagaagatcctagctaaaaccaagcgattatggttacatccgttttacgttggtcttcaaatagaaaatacaaagtacatagccacataagattgatagcactcctctgtatacgctgtgaaaacgaaaaaaaatttatggtgggcccggcccacctaaatttatttagcagttaatcctctcaaccgtgtactgaataacgataggagtaaatcccaatgtcagtccattatgaagcccattttagctgtaactgttttatatagtagtcctttatatttccactattatgagccaaacacagcatcgatatccaaaatagagataaaattgctctcgatgtgctaaaaaatatgtcgaatgttttcttattgctgcaacatttgtcttttggactgtctgatttggctccaagatttttataaagagagggcttatctttgatgatccttctatttgaatttctctctccccttcaataccacgtttttttcacatgcacgagagagaaagggatgccgttctgcttcatagtgtcttcaaagtcagtcactatggcatcctcatctccctcttcctctaattcttcatcctaattgtcgaaacatgaattcggcaataataaaggggtagcgcacgagacctaaaagtggatggatgcggagacaaaggatttagacaggttcaggccctctcga

SEQ ID NO: 17763 - DNA, 1391 bp, Oryza sativa
ttagatcaaccagcagtaaagatgaaggcacccagcaatagcgacagagttttgtagccatggtgacaaaataatcagtcggagacagacgagacagctggtgaagaagatgaaaacgcccattagcggcgacataataagccagccgtgaaggcgagaatatcagtcggtggcgatgaaaacaagccaacgatgacgacgtagaagcgcatcaacgacgatggcaaaatcctccaatcatgaaaatgcaagaaatagtcgacgatgacaaatgcaaccgatggtaatgacgattggcagcaatagagatgatcaaatatgatgacgaagttgcccatcaatagaagtagagtgggctatgttgaagaggcttgacaggatgttgatgaagatgacgatgtcagtgatccagtcaatagtggtgtagcagccgatgataacaatgaaatcctctatcggtagttgcgtagtaggccaaccgtgaaaacgaaataacaagtcggcgatgaaagtcggtgatgacaaaaagcaaccgacggcgaggacgtggtcaccccttagcaacgacggagacatcaaggccgatgaagtagatgtgctggtgatgatgtcagtaacaacaatccatcaaactgttgagaagaaatccatgctcaagtattttcttaatgttggcatttgtgtgacgaagattgatgcaacgcctcttgatttatgaagatggcagtagaacttggtgctatatctgttgcagatgcttcacttagaggaaagtatatgctgttgttcaactcattgaatctgatctgagttgattggttgatgactccaaactcccagacatgtaaacttaatcttgaccggctctgaagcgcagacgaagataataactcccagagttgacttgttgattgattgattgatgcatcttgacaaaaaacttgtcgaattttgagagtcttgtatttgtgtagcccccgaccctttggttagttgggaaacaacttaacatagagtcgagaattgtagcttcttgtcgtcgagtagtcattgcttgagtgaagatgcatgtcgaagatgtccgagtagaaatattgaagattggaacaccacttgttgtaataaaataacacggtgtcatatttggtgacgcatgccgagatgttgaagctcttgtagacgtcatggttggtgaagtagcaaaacttgcgaagtagcggcaatagagtttgccggtgccgaagataataaaaatgaagtcgctccaccatgatgacaaagttgcatagtcatgatgaagtgaacacgagtcgaaggcaacataagcaaaccggtggcgaagacgcatagtcgtgaagatagaaacaccagtcggcgatggctgcaggaat

SEQ ID NO: 17764 - DNA, 721 bp, Oryza sativa
agctatggaattcactataccgggtatccaaaagtactagaagggtatagtgactcaaactggatatctgatgctgatgagataaaagccacaagtggatatgtgttcacacttggaggtggcgctgtttcctagaagtcttgcaagcagaccattttaacgaggtcaacagtggaagcagaacttacagcactagatactgcgacagttgaggccgagtggcttcgtgaactcctgatggatttgccggtggttgaaaaaccagtgccagctatcctaatgaactgtgataatcaaacagtgattattaaagtgaacagttcaaaggacaacataagtcatctaggcatatcaagagaagactgaaatctgtcagaaagcagaaaaactccggagtgatagcattggactatgtccaaacggctagaaatctggcagatcagtttatcaaggggctaccacgtaatgtgatagacagtgcatcgagggaaatgggcttgatacccacctaaggttgcacaatagtggaaacctgtccattgtgatcggagatcccatgaatttggatggcaaaacaaactattgtgtgactgagagaagagacccttgaaaagggcttattttcatgatgtacttcttttctttcctacatggtaggatgactcatgccttaatgtgatccgagtggcttttccaaacagagattttgacctgcagaaca

SEQ ID NO: 17765 - DNA, 4606 bp, Oryza sativa
taattcctgcagcccttcagttgtggtctgatgtagctcatttcctaggtggaagttcaacttaacagtctccaccaaaaccctggtatatcaaataggcacaaccttgagaacatttcttatgagccttgaaatttggtggggattgttagaataattgggctaggcccaatttatcctattaaatctcaaaggcccataataagtgttaaggataataataccacctcaggatttaagcgaggaatatcttaacctaaatagggagttattggaggccccctgttgactggttgaggtgggggtcggaaagccacacgcgcgcgcgcgccgggccgaggccgagggctaggcgtggcgtggcgctacacttttgcaaccatgaacccacgttcccacaactgcctccgcaacggcacgtccacgatcccacgttcccacgactgccgactgcctctctcctgatagataaggaggccgcgagtccgatcagaacgattcgcttgcttctttcccgggtgttagttcctcctcctccgtgcctgtgctgctctcgcttcctcgcttctaatcgcttgcacgcacgagagatcggaaggagcagggcctccggaatcacaccttcgcctgagatctgcaccgggtaggcgggtgatcaggtttttggggagtgcttcccgcacgactgctcgtcctcgcccaccatgtctgcgcctagagccggcgccgctgctgctggaggagatggcggaggtggtgcgccaggagctggagcctgtgccgcgaacaacaacaccaacggaggcaattctgcctcacaatccagtggagggccattctcggggtatatccttctcctgttcctgttcccgttgttagtgctttactgctatgttcctgttcctgatattcatgatgcctctagcatgctactgcgttactgctatgttcttgttcctgatattcataatgcgcatgatgcctttagtatgctactggttatgttacatgttgtcactagatcaccctacactgtttatgccatgattattgtcttaacattttggattaaaatatgccgatttatgaccatatttccaacagccattggggatgatgtgtctggcctcaaaggcgacagatctagcttccaacaaacggagcagcaaggggtttaggccctattggcaatgactacatggggatcttctcggggtgacaataccggtgacgaccatgcatgttgggaagagcccctttggggcatggtagactagcctgtggttgcagtgtagatcgggtgaagaggagcttggcggtccatcttgggttgtgacaagggcctcatggtatgcccctcccagtcgcctacccctactctgttgccgcctctgtcctctttgaccaaatcaccaaacaaatcacatgagggaaatataactaataaatcgtttcaggggaataccacctacaaatcgtgcgaagagaatgtcaccaacaaatcatgcaaagggaggaggatcatggcctctcccacaacacggtcgcgaccatgccttcgacgatgagtagcctcagtcccgccgagacacctgtgccctctgtagggcacttggatcttggctagggcactcacttgaccgacatagcgtgaaatcatcaccaacatggagagtcaagggcactctgcacgtctccatgttgtgtatagccttagtcaccaggaacaataatttgaataaagcactggtggagaaaccatctttggtcggtcggccgaaatccacaatagtcccgattccactaaaaaccgggactaaagatgatctttagtcccagttctagacctgtcagaccttgtcaggcccccgggatctttactcccggttggtgttaccaaccgggactaaagatcctaactttactcccggttggtgttatcaaccgggactaaagatcttgaagatttttagtcccggactaaaattcaacgcttaatatataatccttcttccctatcctctccttcacaaccgcctcgcacttatcctctcagatctcaatcaccctctcctccctctcagatcgatctccctctcctcctccgcctccgccttctccccttcctcctcccatccccggccctctcctccccgtactcccttcccatcggctcagatcgatctccctctcctcctcccctcctcctctcagatcgatctctctcctcctccccctccgcctcctccccttccccacccatcccctgccctctcctccccctcctcccttcccacgcagcaggcggccggctgggccgcgcacgggcccagtggcgagcggcggcaggcggcagccgctgccggcatctttttttttttttcaatttgtgattcactaagatgtataattttatgatttgttgcatgacctgtcacgaccggaattaacccaacgggcgtttcttacgtgcgtgtattattccttgtcccaggaggcaaggtacaccaaaagttgatacatttcagagtttatcaagcggaagcgtaaatagttaatttattacatgggcggcgaaggcccagcacacacaaagacaaacgggaaacagcagaagactagggcgacgaccataggcgcttgacggcaggcacgagccagacaccaaagccttcatcttccaggggctcctcttctgggtttgggaaaaattgagcaagactgagtacaaccaccgtactcaacaagacacacccacaagtgcagaataaatgcaagggagtacaagggggttataatataaagggttagggtttgcagtaaacagcattaaaagacacttaattgctcaaagctattttgtaaacacgattctagagctatacaatattattaatcaaggccgtgaacccacacgaacctgccttaacccaaggcctacgatgattcagaccgaactagcaacccgaccctgggtcccagctcgtcccaagctaacccaggccaaccattccacattttagttgttaagcatgttttaagaattaaaacactaacttgggtacattgctcggcttgcccataaccgagggcgcggctattcgaatagattatactctgatcagaggtgtacatctttacccacaagacacctcttcctcacgtgtaaccacgtgccacataccaccacggtatatggacggaagacgtgacatagcttccaacccatcctagccatagacaagagtaccgacccaaccccacctacagccgggacccccgggacaggtaggcaggactgagccccgagcagcaggacaccggccctgtgccatgacatctcgactaccgggccgcagctcgtgtagccttcatttgtcctagagatgtccatcgacccccgacttcgtccatctccatccgtatcatcatgttcattaactgagtctgttgagccagaacttgagcaagagttgggttcccttcattgttattatttccacttttattggcgcgagtgttcaccatccgttgcagattagagaagatagaaggagaggggttacgctaaagttaagaccttaaccatgttaccactgatctggtgtgtgtagaccattatattgttcaagttgattaagcaagcaacctagtatagttacacactcatcattgaaccacaccaatgacgggaatgcaaccatacctacacacaagcaagcaacaaacgttctaccctactaactattcttcaaggatagtttggcggcataggttctaaggtaggatccaaacttcattccatcttgaccacttggcacttcggttctttctcgatccacttgactgacctccataagtagacctcattaacatcttctagtttcaacaactagttttagaactactcaagttgaaagcaggaggggagaggatgataaaatgatttatagagaattctagagaaggaagaaaggaaaattttcacaaatcatgttttcggaaaatttgtccttaaggtttgaccatttggcttatcctacagtcgagatggctctgataccaacttgtcacgcccggaaattcacaagtaatttccaaacttatttgtgcataaaatcctcgtccaggaatcagccgaggtacacaaactgacaatttaatatacagattcatcaaattaactaaaacgataagtacttacttaagaggcacttagtcctcatcaagaagaaaactgcagcggaaaaataaaatctagcgaagctccggctccactcccacaggcagctcaactgggatataagccaaacgtcttctccttctggatcctttttcttcaactgaggttgattgattattgcaaggtgagcatatgacatactcagcaagccacacagcaaatatgcaagtgcacaaggataccaaaggatggcataatattggctcatttgcaaaagcagcatttagcaaaacatttaagagaagtaaaacagtggagtaattaatcaggaattttaatcaacactgaacagcacacccatgctgcacaggcccaaccatcctgaacaaccatacccggctgtacagatcgggctgcaggaat

SEQ ID NO: 17766 - DNA, 1640 bp, Oryza sativa
cagatctaatctccaaaccaggagctaagcaaattattaccaggtataacatccataattattgtgagaggtgtgagactaatcacgaaaaacattgctcaactcgcccataaccgcgggcacggctattcgaatagttttactctggccagaggtgtaccactgtacccacaagacacagcctcaacatcatgtctaccatgcgtcccgatactggaaagtacccgaatagaggctgtgacaataccctctgcataacacaactcaccacagtgcaccattcctggatcataatcacccccttataaaacaaggcatggactccccagcgacccccgtgggcttatttccgccacttctcagtctggtgctccgcaatgaaccatgttatacaaaaggtaaagccgttgcccacgctggcttgtggttggcacggttaatgtttcacaacagtagctcgcgaaccggtccttaattgccatgagcacgactctcaaaaccatgtgctcacaacccaccattatcaagttttagttggcaagtaattaattaaccaatcacgattgaccatcgtgagctaccattaaaccatcattaaataataatgaatcataagttatcccaacagtgtgctaatgtttctaagcatggctaagcaatcacatctaatatctagctgaaccaatatataaagctcaactagtcaaattataataacccaaggtatcaaggattaaagtaatcaatgcaaacaggccataacaaaggaataggttcacaccacccagtgacattcgaaaataaatgcacagttgaaataaatagagaatttaaatataggatcaacatgctcaaaggattgtgtttaggatctgtgtgacttgccttgcaataatcggtcttcaattaatcttcttgaacactcccgacgcactcgcgaaccttcgcaacgacggaaacgacaagctatcacgcaaaacgaggaaaaagactaataaaaaccaaataaacaatacataaaaagtaaacaaacatgtagatcatatttttagatgaattatgagacttgaacggcctcattctgatttcatatgaatttattatgaattttacaagatttaattccaattaaacctattaaacggagactattccaaattaattaaatcatttacaaatgatttatagctgagacagaagattaaagcaacctccggaaaagattggatcatatttggtagatgacatatattaaaaagaaataatatgccactgaaaagaggagaggatttatattgaccgagtcgactaagatcggatggcttggattgatctggcaagcgggcctcacgagataccgactcaacgagtcaattctacgtgacacgggatcacctaaatgatcaaccgaaaccggcgaacggaaccggcggctctgaactaaaggacgactcaacacggacgaacgaacgaagcacggggaacacctcattcgaacgaacgagcgaacgactcaacaacggctgcggctaatccggtggactagaaacgattcacagaaaagccccggtacgacaaacgatagaccggtaggaatttagggatgcacctacggctagacaacttgactaccgagcaac

SEQ ID NO: 17767 - DNA, 988 bp, Oryza sativa
atcagcttacatcatttgaatccgaactccatagtccatattgcaaatttcgtccatgtctgcgaagcttttttgggcattagacctcattttgctctgttccgccgaatatttttccttaagcctcaaccgaacaaaaacaaaccatgcgtagttggaggggctggatttcaactgagaggcactctgagccaaaagtatttctccatgcctttcaagacttcaaacaaaggatggcacgccaactggttttatattcaaaatcccgagcccgctcttcctgagtactcctgtcttcccccagtataccaagatacatggaactctcttcccatgggagatgaagctgcccaagccttagaactgatggaacgcatgctgaaactcaaagagcaaggcttacagggagagcaaatcactcggcatttcattaagtgccgattagctccaatcaaagaaagatcccgcacagcatttgaatttgacggcaagcacgatccaaaccgtgaagacccagattctctggattttaagatcatgaaggagaggatgtacaagatattctcgaacgctattgtcgtcagctactcacatcaactgccagttgtaccatacaacgcattcaatccgcctccgcaggtatgtatctgaaaatcttcaacccaaggtcaaaacataatttcatcttcatgttgagttagctaactgtggaagcatctcattcaggaatactattgatgaaatctgatcccccaattgctcagcgccgatctcctcgccagcacaccattcagggaagtggagggccgacaatcaggtcagacccacaacctcaaacctccaaaccggctgggcagacaggtcctcgcaagagaaagctggtgcttaatgacgacgagggcgatgacagcaacaaatctggggacaagggaacgcccaacaaactcccaaagcataccatgcccaggaaaaaactggctggccgtca

SEQ ID NO: 17768 - DNA, 511 bp, Oryza sativa
aacgctttgagaactgcgggcgcttgcgtgccttcttaagaccagccttcttcctttcaactatacgggtgtctcttgtcagcaaaccttctcccctcacagtaactttgtttgcggtgctgatcttcaccagtgcacgggcgacgccgaggcaaatggcctgggcttggcccgagagaccacccccgtgaactttgacgaagacgtcgtagctgttctcgaaccctagggtcaccaggggtaccttgcagtactccatccacattggatttccttgcaaatactcctgcggatttttaatgtttgagcagagagattcacaaaagatattgtatgcttgtgcacaccattacaccaattccaggccattagtgtaaacttgaaagctagtgttttggtctatgtgaccacaatttatagatagttcacaataatttaaaacttatgcccaaaaccgtaatttgatcaatatcaatgttaggtgtagtttaggagactaattattttaata

SEQ ID NO: 17769 - DNA, 669 bp, Oryza sativa
atcaacggcagcagagtaggctatgttgatgaggcttgacaagatgttgatgaagatgacgatgtcggtgatccagtcaatagcgatgtagcagccgatgataacgatgagatcctctatcggcagttgcgtagtaggccaaccgtgaagacaaataattggaggagagttgatgttgttgcccaactcgtctaaaccgaaatatttgaagttgttgaagtagaatgtctgttccgaagcaaagatgaagataatgactcctggagttgactcattggctgattaattgatttcttcagcttgacataaaatttgtcaaattttgagccttatatttgtgtagcccccgactctttggttagttgggaaacaactgaacatagagtcgagaattatagcttcttgtcgtcgagtagtcattgcttgattgaagatatgtgttgaaggtgtccaagtagaaatcctgaatattggagagtcacttgttgtagtaaaatatcatggcattgcatgccgagatgtcgaggttcacaaagacgtcgtggttggtgaagtagtaaaacttgcgaagtagcagcaatagagtttgccagtgccgaagataataaagatgaagtcgctccactatgatgacaaagttgcatcgccgtgatgaagtgaacatgagtc

SEQ ID NO: 17770 - DNA, 666 bp, Oryza sativa
acttttgcaattattaagagcagaaaataaattatattatctctaggcttgtgatttcttccgagtaatacttagcaccttgcgttactcggtccatccaacgagcccccgggtgttaggaatcggcccaaaggcaaccatccattggcaaaccaaacggaaagcataggaagatagaactccataactcgataggtacttttgtactcagattatgtcgcaagcaatcaagataaatattataaaaaatatgatataacatctgtagcccccgactcactactcaatggaagaccaattggtgtagtgaggcagaggaaaaggaaaaatatcatataaagaataaaataaatgatgacttagctttgtaatattccccttggtgatggcagaagtggccaatgtgggaacaaagtcgtccatcaataataatgaagacaccagtcggcggcgacgaaggcggtcgacggtgaaagcgaagatgcccactaatggcggtataataggtcagccgtgtaagcggaaacaccagtcgacggcaacgaaggtgagccaacggtgaggatgtagacatccaacaacggcggcataataggccagccgtgtaggcggaggcaccaatcggcggcgacggaggcaggccggcggtgaagacggggctgcagg

SEQ ID NO: 17771 - DNA, 674 bp, Oryza sativa
atgaactgtgaagagacagtaaattaccgtcgatttgaactgcatagacagttaaattatggttaaactctgttgtgttgatgccgcacttggtaacttggtggcctctgtacaccaccttttgttccatattttgtgggggcatgtatttgatattattgctgcaaatcgtctgtaatccatctgcacccatcctttgtaggctagcgtcagttttaactggaactctagcaattagttgtgacctgtcagatgcagtcatgtacaatgtgccggtttaggatcaccttgcattttcgctctacttcatttcttccttggctgtagctttgctgtgtgcgttgatctatggctggcttgtttggatggatgggatcaccttgcattttcgctctacttcatttcttccttggctatagctttgctgtgtgcgttgatctatggctggcttgtttggatggatggattttagattcattctctggtagaggtagattatggattcaaatctattctggtaaagcgatgagtatttactttgcgtcaggaatacagcaactagaatttaaaatatgttggattttgcagtgaagaaacaaggcaaatcgttctacgtattacacttttatccttgatatgaaaacaagcctttaaaccgctaataatataaacga

SEQ ID NO: 17772 - DNA, 1155 bp, Oryza sativa
ggacataacgtgagcatagcatgtataatattacagattagaatataaccgtttgtggactgtccatatgctgaaaacatactccagtatccacttaaaacatttccttcttgctgccttgtatagatagagagtccattgcaaaaacatggaggaagactcagcaaaggtgaagaatactgtggcacgtgttatggtgctgaggaggtatgcacaatcttttctaatgggaatgtattttgtttatacctcttattatttcagctttctgaacttaccttgttctttgttacattctaactccggatggctttctggacttcagtcggatgaacaatgctgtaattcttgtgaagaagttagggaagcatataagaagaaaggatgggcccttacaaatcctgatctgattgaccaggtatattagttattttggcatggtttacctagatatatccattgtttagatttccgttgagttctcttgggcttagtttaagtttggaaaatatatgtatggcaaataatgttgaagattgcaagataattaatatagtctatatagaggtagtatctcttaagaagccactattactggaagtccctgagaaatgattttattcctcagtcccatatctgccttgtttctctccactaaccaattagaacaacaaaaatggcctactcctgacgtagtggcataccgtatagttagatgcctgttgcgcgtatactctagcctttcatactagtatacttgtgtctagtgacaagctagtgtggcacacctctctttcatgcttttgctttgcaaggcagggctcatttatgagtgaaaagagtgaggcgacgtcatttctcctactatttactggaacttccgccctactgatttgttttccttgggcatgacagtgcaccagagaagattttgtggaaagagttaaaactcaacaaggtgaaggttgtaatgtacatggctttttagatgtcagcaaagttgcagggaacttacactttgctccaggcaaaggattttatgagtcaaatataaatgtgcctgagctgtcggcacttgagcatggtttcaacgtaagtaggtccaataaatgttccttttccttaaaagtgtttttattcagtggttctgatatg

SEQ ID NO: 17773 - DNA, 632 bp, Oryza sativa
caccttttgagaatccactctttttgacaggtatgtctctaatcataagtcttcaccacaaaagctttagctctactgtcttctgaagtataaagattccatgggcaaccttcttcacaatgagctcttatcctcctcctatcatatctaggcatcttgatctcaaccctattccttacactgtactcagtaattgcttgtctcaacttcttaacagatgggaaaacaagaccaaccttgaaattaggattgttcaagtcctcttctgcaaatgacttgaacttgagcctgacaccctcatcatcagaatctgctgcattaagctcttcctcatcagtatcttcactttcatctcctctaggcacaattgcaagatttcccttcaacctgcttcctctggctttctttcccttcaatattttctttcctttggccaccccctcatctatcacattttcatcaacataatcaacaaacaagtcatcatcaccatcatctaattcatagtcactatcatagaattcctcatcactgtcatcactctttgtcccactgtcttcttcatcacaatcatctcctgttgctccctgacgttatgctcttttagattgctctgttgctgcctgcttcct

SEQ ID NO: 17774 - DNA, 3032 bp, Oryza sativa
tatctatttcttaaagtacttgtcacctgtgctgtgtcctaaatactaagtataatcataggattttcgtttctcatgatccaaccatctaagaattatagttcactttcattcatcgtaatttaaccactaaaatataaattggttatcaaagatgagacggtaatgatcaacgctcacagattatttgagaacgggggcagtatataactatctatatcaagtataaaggttgagcaaacagcaaggagtgtggttcgtcataaatcaggagcaaacaatatgtgacagcgatcgagctgcatagtacaacattcttttcttgaggtggttctacgttgaaatgaaactgacgagctgcctcaagtctgttacacaatgtagtgatatggttatagatgatcgatcggtctagcatcgagtaatggagatatgattctagagcatcatgatcggcggtttctagtctgcgtccatctcctcgagcgctgcctgggcggctgccttcgcctgctccacgaggtcgtctggaacctgtattgacagcccggtaacagagttcatatttcacatgataagggaggttctatttatcaagggagaaggcatgtttatcccttgtatataccttctcatgctggcgctttgattcatcgcatacccagctcagctccagttcaaagtctttgtctttagcttcgtcatgcactccatagattctgcattggtacaaagaaaggtcacaggcgagaaaaagaatgcagatcttcattagcttggtcaacatttccttgtagaagttatttacgtttttctgatttgttcacatggtagatggtctattatgagtcatgcatgactcatgagtcatgagtaccaacagtcccactgacaagacaaatctatagcacaacaatttatgctcagaaaaaaatctcaaagctacatattattgtcaatctgtagtgcaatgcaaccaaaactggtgctcatagatcatggtacagtgattattcatgtgaacaaagtaccttctgtacttaaatcatccaatagatttttatttgttctagaggggaaaattgcattagctgctggtagtcgacaaataagtgcatagcaaattttaaggcatccatgacagtatgaaacaaactttcacttgtgagctctaagagggaatttgcagattatagtaaaaggttcaggacatacatctttgcaacctcaacaatgccttctctgcatgtaagctcagaaagattcagtttctctatctccctgtacaacatttaatagatgtatcagaattacaaaccattgttcatgagtcatgacaaatagacagccaacatattcaaaagctgaatcatcttttcttgaaccatcataaacacatctgatgattgccaacccattccttgataagcattaaaactacgaaaaagctaatatatggttcatcaaattataatctagagtttgggtcagttttcccttggcagtcattcaacaaccaacaccaattctagaatatctgtgatatattaatgaggctattgtctagttaatatatcaaaaaggtgacagaagtgcaagaagtgccaatgccaaaataagcatataagaaacaaagattagatcaacatcttccaccattgaagatggaatactacttaaggactactatatatgcaagatgtgaagagataacttgatgtatatagtaaaaatacaaaagaatatgctaagttctaaagataattatggatcatcaaatttaacaagtgatgaataagccaccactatttgcgtcctagtaatatgcaacaaaaaagaagttgggcactaatgcagaaatcatacaataaatagtactccctccgtttcacaatgtaagtcattctagcatttcccacattcatattgatgctaatgaatctagacatatatatctatctagattcattagcattaatatgaatgtgggaaatgcaagaatgatttacattgtgaaacagaggaagtatcaaaaccctaatagcttacgtttttgcagcctgtcttcctttccccagggcagcaccgaagtatttctgtcaaattcgattcagaaagtcattcttccacattaaagagtgcttcccaaagaaataatgcacatgatactaagcaagaaatacggtatctatcataaaagtgcaaatatgttcattacatgagtggatgagcccagccactaccataagatggtcaagttggtctttcagttgtaacaaataaaggtatgatagaagtgctacagtgtattagggtaaaaaatttacataggagagccccgaaggttcgatcatgtagagttgtggcccatccctatcataacctccaagaataactccacagccaaaaggcctgacacaagaggagtataaattgcatcaaacatcttaaccagggattgtattgaagaaaaatgttgaccgtcttacctgagccaccagtagagggtacataaatgtacatagctagctacacgatcagccaattcctttacaggcatgggttctccatacaccctggtgcagtacagcgttaggcaaaacacctaaaagaatgtagctatggggaaaaattcaagaattctcacttttcataactggctgcctctgactttgccctagagactatctgcctaccatccgcagctaaaccagcaacagcctgaaaatgagaacgtaagaagccaaaacaatttgaacaacaatgacaaaacagaacaaaagaaaagaaaaggaacactttacaaaatccaagctttatcacatatatccattattacaaagtgacaatgtcaaaaagaaagtgacaataccaaaaagaaaaaaaaaagtactgccagaaaaatgaaattacgctggaagctgctgggaaatttcagagctaaataatttgttgtgattggttgctcatctgaagaaacaaagaggtggaaaacaaattaccaagccagagtgtcggtgcacagagtggag

SEQ ID NO: 17775 - DNA, 3335 bp, Oryza sativa
tgttacggaagggcctctggatcacacgataagtggtgtactaaacctcataacataagtacataacatcctaagtgaagatttgagttattgatttacaactgaagctgactgcccaaaccttttaacaaatccctttgtccggtactttgtaacgaggattaactgttaatggcagtaaaacaaggacgaatcctacaaattgacaagaaggggcttttttgctgccaattcagatatcgatttgcgccttagtcctgtcatccccgaatcgtaagatttaaactaaaacaaggccgctaagagccgagacacgcgggaagcaatgcaagcaatccacccaatatgagtacggaacagctgcgcagcaatccacaaaccagaaggcggcggcggcggcggcggcggcggagcgcctcgatcccacccgcaacgccatgaaccctcgcgcctcggctaactaactaggaacgaagataccggcaagtattcgggctccccaatctacgcaacgccgtgccggtgccgcccgcgcgcgaggcgacaatgcgcccgccgcctagatcccccggccgcgccctcgacgtacggaagaggaaacgcggggggacctgcaagcctaacacgggggagaggaagcgggcggcgcttaccgatgcctgcggggggtgagggggggcgtcgccggcggcggcggcggcggcggggcgtctcgtcgaggattccggcggcttcggcttgtggcgcaagaaggtggggggagtgtgtcgtcttggcttgggggagaagagagaggaggagacgagtcgtggtgcggtttaagttgggaggagggaggcggcccgcgtctgactcgaaccgggactcgactcgacgcgatcacgcgacggaggcaggaaggtgggccgggccgtgggctggcgttcagttgggccggagaggtgaggctgggctttttgttcctgggctggatttggaatagagtgttgcctgtacaaacattttttttttgaaccagttgccttgtatactacctccgttgcaaaataagtgtattcgtgggtatccgtagccaatgtttggccgtctgtcttatttgaaaaatttatgaacaagttaaaaagaattagccacacataaagtattattcatattttattatctaataacaataaaaatactaatcacaaaaaaaattaaataagacgaacggtcgaacgttatacatgagcagtgcaaaactgcatttattttgagacggtgggagtataaattacaaacttagtactaacagatacttccttcatttcgcaatataagttattctagcatttttcacgttcatattgatgttaatgaatctagatagatgtatatgtctagattcattaacatcaatacgaatgtgggaaatgctagaatgacttacattgtgaaatagagaaagtagattagaatagcgggtctaagaaaacagtttctctcagatgcatatggaccaaataatccgtggcgataattcagtgttcagataattcgctgtaattatactcgctcgaaacactcaatatttctcaactacaaggcagagtttacactttcacttcaacagctagctcccttcggtgatgtacaattgaacatcgccatttcttccttgctaattcatctcctcattgcgtcaatacgcagatccgtctcccctcttcagcgtcaccaacttaattaacaccacgaatcacaagcagtaattcacaaactttaattactctgcaaatgcgtatgttcatatgctgaatcagtcacgagaagccgtcccggcgatcctgctcctccgcctccttgttcgccgtctgcacggccttgaaccacaagaatccctgcaaaaaaattttaaaacaagcaatcaaaatccatggaaaatttggattcatgtcctcgcaatggagattggcaatgagaggatgcgtacggaggtgggtatcccggtgaagacgaagaaccctaggagcggcgcgtacagggcgctgtcggggctcaccacgccgaacaccggccgctggttcgcgtactcgaagatggacccgatctgcgcgccatggttagggtttgggattcgagaggaggaggaggaggagaggagttgaaggggtggagaggcgtacggcggcgatggcggtgatggcggaggcgagaaggtaggcgaagaaggggagctcgacggcgccgggctcctgctggcccccgccgccgccgccctcgcgtgcccacggcggcggctcgtcggagcccgggcgcgcccacgaggggacctgctcgtccgcctcccccgacgacttcgccgacccctccgtcgccgccacggccaccagtccgcccctcctcctcttctcgacgacctccacaaccgacgcgaggcgggctcgaggagggcgccccaggatcaggcggaggcaccgcgagctgcacgcggacacggccgccgccatggctggctgggttggcgagctcgccgtggcgcgcgcggtggaaacgaaccgtggaatggataggacgcgggtggcgtgcgcgcggcgcggggttcctcacttcccatcacctcacctttttgggctgggccgaattcaacagtgtcagtgtgtcacataacatatggccatatgtttttgtttctttattttcttttttttttggacaaaaacaccctagaacattttatatctgacttgtattatgtaaaacaagaggtagtacagaacatactatgtctaaaaagaatattaaaaccaaattaaaaccacatccaatatatttccacatccctatcgatcttgtcgccggtggaagagaagaataggcagagatctgaacaaaatatgaagaatcattgcaccgtggctttttaagatcacagtaatcatccgacctgaaggatgagtccgtggaaccgttgaaaagacatcggtaagttcatgcctcgatctcgaactagatttgctcccacgtaaccacaagtccacaactcttacaagccctttactaatgctagatagaccagcagtgaagtagagagagggagagagagcgtgcgtgccaaagaactgttattctaaagaatgttgtcttcatctccatatgtgtaacaatgacacacaagacacatagccaatcactatttatatatggaagatacagtcgagacaagatatgaacgatgaacaaaactaaaaaaaacataaccacataaattctcatttgccttgaacaatgaacactttgcgaattgcaatttgcaacccagaaggttcactatttcatccggatatcgtgtgatt

SEQ ID NO: 17776 - DNA, 1528 bp, Oryza sativa
ccgttagagatgaatcaaatattattatacttcctccgttgcaaaatgttacaatctaaaatgagtcaagacaatgaatcttaggatggatcaaattccatactttagctccctttgaattgaagggaaattggagggataacaaaggaattgaaaccctacactattcatgcattttattcgtagaaactagaaaaggaaaaacgtagggaactttcctatttctacgattgtagaggaaaaacataggaaagttaacatccactctaacctcttggaaaactttccttgagtctatctctcttatctgattcatgcgtttttcctgtggtccaatcaaatggttattcttgtgttttgcaatcatctgttttacacttgtattcctatcagaatcctgtgtttttcttattcccccgttttttcaatcatggattcaaggggcctaaaattgcaacattttggtacggaggcagtacattacaaacttaataaatataaggaatatagaacaactatataaaacattaaacaatggtaatgtagaagtacttttaggaaagtcacacttttgtgccacgcgcgcatgattcataagttgaaagtgcatcactagtttatgtcaaatttcaaacagagtccaccaaaattcgcaaagtttcataaaactgtcactcttctggactcatttcaaacccaaaacaagattcgcttgaatcatatcgcatatacttcttcacatccattaccaaggttgattaaccacatggatatctttcgcaaacaaattaagcatagaaaaacaaaacaaaacaaaacagctagtagtattactgctacttgttgttcatcaacaccttgacgaactccttgtactcgacgcggccctcgccggcgggatccgccttgcgcaccatctcgtcggcctcctcctccgtcagccggtcgccgtgggacaccatcgcctgccggagctgctccgccgggatcaccccgctccgcgcgtcgtcgaacacgtccaagcacgccgcgagctccttctccgtcgccccgcgcctcatcttgcgcgccgccaccgacaggaacgccgcgaagtcgatgtctccgccgcctccgccgccgccgccgctggcggtggcgtccgccaggaaccgccgcgcctcggcctcgtcgacgttctggcccagcgaccgcagcgccgtcacgagctcgccggcggcgatgcgacctgcggatgacgaggacgatcagtggcaggttggatgacggggaaactaatcttggtggcggcttaccgtcctcgtcgctgtcgaacaggtcgaagatttctcggcactcgtccacctgttcttgggtcagcttggccgccatggatgagagagagagatcaagaatttcgcctaattgctgtgtcaaagcgtcagctggtagcaaattggaatggaagatttctggaggaattgaaaagaagcaaaggcgtttctttttgacaggtcaaaagagaattaaaaacaaattcatttgatta

SEQ ID NO: 17777 - DNA, 2353 bp, Oryza sativa
gcccagataggactcggtacctaaaagataaaaaataatactctcttcgtcccataatataagagattttgagttttttgtttgcactgtttgaacactcgtcttattaaaaaaaattagaattattatttttttttgacttactttattattcaaagtactttaaacataacttttcgttttttatatttgcataaattttttatataagatgagtggtcaaacactataagcaaaaactcaaaatcccttatattatgggacggatgagtatctatgaaatagaatctaaataagaagagtcaatttaaaggtgtgacaaatcattgaaacaatgttgaacacagactagagctaccacctctgttcaaaaagacataaaaatttcactaattttatgcttatcacctgaagtgggaagtggtagctagtgacggatctaggcatattttgtagggtaggccgactccacggctttttttaaagcatcctacaaaccttgattttcatgtataaattaacaaaatatagtgaaataatcacacttaaatacaaactaactaataattgatcttacaggattggattaaatttctgtttccgtcactggtggtagtaaaagccaagagccaacaaaccaaaccggtagtcctgaatcctgatccagcttagctcaacagcctggacccgtaccagtacaccacttgtatccatgagtgattgtgctcgagcatgtactgagattccagcaatgaaaagcattcgctgtcagggtctacttttcgttgcttcgtttggttccagcctactacctccctcaaaaaaaacaaaaaaaaaaactctaaacagattacgtgtagattcataatactataatgttgtcacatagcattccagatttgcttttatgggacaaaagaagcagacatgaaggcttgacagtggctatcagtacttgactagtcctgatcaaaggaaagctaacactacacattcagttcgtatgcatcatatatgcaccttggcatactaatttgtgaatgcctcgaaacataggagcacaaaatatagttgcgataattttgcagacatcagctaaaattcaaccaggatcaccgatcatcaaaacatggtcacatgggtagcctcaggatgcgggggatggctgcaaccattcaattcagcacgcaacagggaagtaaagatgatgatagaaaggaaccaggcaatgcatatctgcacaacgatccaagaaaaatgatgaaaccccaacaaatcctatgctccggcaggcgcaagataagcatcacaatcaaaagaaaccaggcatctgatgttgtttcgcatgactagaccacctaacccgatcgctactcaacattaccaccagcaaagataggtacttaaaaggaacatcacaaagtacagctttgttgtaggccctgacagttttagttcacttcagacagaacttatttaatgggaaccctcctcacttggccatcatgaccttaacgaactcctcgtagttgatctggccatcgccatcgacgtcagcctcacggatcatctcgtcgacttcctcgtcggtcagcttctcaccaaggttggtcatgacgtggcggagctcagcagccgagatgaaaccgttctggtccttgtcaaacacacggaaggcctccttgagctcctcctcagagtcggtatccttcatcttcttcgccatcaggttcaggaactctgggaagtcaatggtcccattgccatcagcatcaacctcgttgatcatgtcctgcagctccgcctcagttgggttctgaccaagggaccgcatcacggttccaagctccttagtagtgatgcaacctgcacaatgtattcagagatcagcacaagagagtactaaatggaacatgcgattatctcgttcaacgcttataaaattaacacaacatggtcctttagtgctgcaatattgtaatattgttttatgtccacaaagtacaattttaagaccaagaaatcaaagttgtcctgagtcctgacaacagagtacatacacatcacaaaaccaccatcagtatcgttatcactttcagccaatttatgaacctatttcacagaatgatagtgctagatagaatcattgaacatataatacaaatcacagaccactatatgctacagtccagatgagaatcatgaaacgataagaatgtgatgcctaggtttaacagccacttaggtagcttcccgccaccgcactagcatacgatcaactcataaacctacatcaataattattgtgtacactagatgtggcacaaatcacaaaccagcccagcttgcatct

SEQ ID NO: 17778 - DNA, 1737 bp, Oryza sativa
atccctctcttgactcattttctcatagagttcaggcttctaaaacatcatgctacaacaacagcttattaaagaaacaaagagagaaattaaaaaaaaagttgattgctttgatcagcatcaaacaacaagacctcctgcatttcacttatgtacattgtcagttaccatgagtttaaccaccattctttgttcgcttcgccgtggatgaccttcgcagcggcttgtacagcacgaagcttacatacttggattgaaaccggtgagtgactccaagagcaagcagcgactgcgatccccatcctttctcgatatacaggtggttgaggacaacatgctttggcttcagagtttgttcttcagagttatcagtatcaccaagaacagacattacaagctgaggtggcagtataggtggctccttggcaaactcctcatcacctgggagctggagatcatagctgtgttcaggcgacggaggagagtcgaatcctgccacgctgcccaggctttctgggatataatcctattcaaaacaaagatgtcttcagataaaaccaagagggaaatgcacatttttttttgcctttgcggttttaggttctctcaattttgattgctaaaatcaataattagcatattcttactgacatggacatcgaggaggttggcaacctgccctccctcatcagccacatgaggtagttcagggacatatttcggttccccatcgacgatgatcctgtaatggtatacccctgatggcagaactagcaatatggtatggtctttcccagacttctctaacaccctcctgacaataaaatgccggatttgtattttagcatcttatttctgaaatgtggaaacaatctgaacatgaaatttcattgttaaatagcatgtaccttgatgtccagttatcccatgatccttccacaaacacctcatttcctccttgactccatgagatcaaagttggaattcccttctcctggggatggttattggtggattcatccgattcatttatccatgaattgttgaaaacaggagaaaattcagtaggtatatgcagtggggctactggaacctgcaatgtgcacttgcctgtcagttcaagcaggactagcaataatactcaaacatgtgagttattctcactcccaaataaatacagattagcaacattcttaatatgaaagatggcaaaaggtaatagttgccaacttgttatggcacagttatagcaaactgaagcatgagctcatgacatatctcttccaatattacaggaactgaaacagttaatgatgtattgatgtgtaacattccataggtcaaaatgaaattgatgagaaagtgtgtgaagactggacgctgacttcattctacagggaaaagggagagcagttttaactgggactaaagactctaagagtaatatataataactgaagttgtacaaacatttgtaattagacagatcaaaatactagaatatattcctcatatgtaactgaagtattccctgttaaattacttgcaactcatcatctcactaacatgttggtccagggctcacgtgagatatcagtggcaaataagggaacatggagtctttcaaactttcaacgctaaaaataaagaaattgcccaaatgcagaacaacacagttttcaggattatgaactagtattactccaagaaccagccatttgacctttgtgaattgta

SEQ ID NO: 17779 - DNA, 2440 bp, Oryza sativa
tattgcggtgaagtttttttatatagcaacaaggagtcaagaacacactctttgagaatatcggaaagagatacaagttgcggattagttatagatctgtaagctttagccctcagcttcagcttctgctacccactaaccctacagttgaaggcttgaagcaaagtgagctgccatttcaagtttatcaacactggatggatcttgctgaattctgatgagtgaaagaagtgaagaggattcatagaaaattcacccccttttgtgtgtgtgcgcacaaccaagctcgcaaatcgcaaccagtgctaatgctaaattgccaagctaatcaaacaatctcgacaaaaaacaagaactcgacatcatcgagcgagactaatttagcaaggcacaatcgaggaggaaacactcttttacggttttaccacgcaaaagccaccaagaacatcaaatcaaaaggaagtaaaaattaataaaaattaatcaccacatctcacctgcggcgtgaagacgtagggcaccgggggaggcagctcccgcatcacggcgtccggcggcataagcggcggcggagcccgggccgctgcccccgccgagccagccactccggcggcggcccccgccgccacgtgacagttctcctccccttccttgccgctcgcgttccccataccccgccgccaggatccctcgccgaccccaacccacagctactcgcctactccagtactcctcccacctccaccaatcaaaccaagcaagcaagcagcccaactcccaccggcagcagcagcagcagcagctcaaaccagacacgacgagaatgcggacggcggagggaggagggcccccactctcgcgctcctcgccgacgtggtcgccgcgaatctcgcctcagccgccggccgcttcgccggaggcaggggaggaggaggaggaggcgatataagaggcagtttggcacgtgggtcacgtgactcgcacgccgcgccacgcccgcacgctcgcggcgccggctttaatttccggcggatttcccccgccgttggatcggccaagtttatttttcacacatatcccacccgttgcaataagcgacaaaagaactagaatactttcacgttattaaattgtagttgtaattattttctactttaaacactccccagatatttatattcctaccaaaatgcttgtattttaggatggggagtagaaataaagttatttcgagattaacatgagaggtgaaaaatggagctatcctttaattcgttgtcctaggattagcatcttcttctagattgagtgtttttacggatgaagtaattagtagtctggattaggatgatgcttttagttggtgtgtttgcggggatagctattcaatttagtcaaaatttttggctttgcgatgagaatattatttttcaaagatttggatagagacagcgagaaaacaatactagtactaccttatagatgtgggaatttcgcatttcagcagtactacttctggatagggcctgcttttctctgatttgttgcagtccttccgagagaggtcatgtactactactatttaccctatttatcagctcactcatataataattaacttttccctataaatatatggtacacatgtctgtctcacagattttcttggttcctatatctaaaccggctgtaaacttacagcccgcttctcatctctcttctctcctctctcatccacctcagcattcaggcttcttatagccctctattatacttgctctaagcacagtgaatgatgacattcatgatttttctttttctcttttaaaaaaaagaacagcttttaatcaacttaagtcttagttcgttctgattgtattttaagtcttaagatgtagattgtattttggtttttgttagcatgttttaaattattaaacgatatgtttcgtacaaaagttttctatatagaagtttctctaaaatatcaaataaaggtatcttttgagtttgtaataattgaaacttaattaattatatgttattggttttcttattttatatgctcttaattttgtccaactataggttacaagtggacattaagccatcaccgttaatacttggaggtgtaaactttagtagagttgaactagtatgcttaataaatgacacgaccgaaaataatatggatgctctaaatatgaagccgggaaagaatatcgtaataaatatcatggagagattttgtgaaggacctactcggaaggcttataattggtccaatttcggtgtaaattattcatgtaattttctttactaaactcaaaagtctgcttgattgaccgtgcatgcctagatcagtccaggattatacacttcagtcattgtttcgtttatttatactcttatccgaatcacatgttatcaaataaaaagc

SEQ ID NO: 17780 - DNA, 703 bp, Oryza sativa
ctttaaattaaataactttaccaatggatgaactacaaatattaatatccccgtacctcccctccatgtaaaggtcaccaaacatacttgtgatgcaaaaactattaaagaacaacacttttataaatggtttcaagagatatatattttgagagcaaaagaaaaaaaaatgaactacaaggtaaacttacatcagcagccatccgagaccacttattccccattttgcgatgaagattaataattttattctcttcttccttgctgaaagcccccttctttaggttaggcctcagatggttcatccaccgaagacggcaactcttgccacacctcaagaggccagtgttcttctgcacaagcttccagttcctttcaccatgcttcttgatgtacttctctaagatggagtcctcccaagatgtccatggacctttcttcaacagcagggctacggtgctccttctgcaatctttatctttatcaacaaatgactcgtcatcgctattgctcatataccagtgtgtcctgtcagaatcaggatcgctgtcgctctcgtgcatcctgtcacaaacacgagttgaactatcaaaaataaaacagaaatatgtgtacatgaaaatgttaggtcagtggccacggctagcagagattaacaaatttatacccatataaaacttttacaaaaatgggctgcaggaat

SEQ ID NO: 17781 - DNA, 2155 bp, Oryza sativa
cttaaatcttgagggacgtctcccctggctgccaatgctgaagctttcatgccttgtgaagaacatgtcctggtggggtattgcgacatgttcatgtagatcactttcatctgattgctcaaaaggatgatcaaacggattcctccatgtatgcagaacggatggagctgagccaggaaattctgtctcatcagaacaagaaagaatatcagatgggtttctcttgcaaaccttatcattatcgatgtctaagttactgtcaggatcaaatactatgttcttccttgatcttctcttaaccatcaagatctctaacctacgatgcctttccacctcagagtacccaagatccatgacattcttatcatcatctacggttccaagaaatgcaggatcagtgctgacattcttgtcatcgtttttgttggccttgctcttgtcagattcataattattatctctcacagttctagaatcctgaagggacatgtggttgtccgagtcatcattttggatgggatcaggatggggggaatcagcactggaaagagggtcaatctcgtccaggacagaagcaatgcgtgttctaggagtaccaggagtggtaccctctgtctgatcatgatcaaaacctggtgaaccatcatggcagccaactctaccaaatggtgaatccaaagatgagtctaatggactgtccacagcagcattgataggctctaccttaatatcagaaagcttcttcctgcgacgaacagaaaaggcacggccccatttacaggtaccagccggtttatcttctgaatctactttcatctcatcactctgtgaatctgttgatcctctatcatgacttatcttgcccaccatctcaacaacttcgatagcatgttctctggaagaattcaagccatctttgatttcaccgtcatttaagctcgccgtgttctcttttgccgaaaatcccttgtttgcttccaaatggatattcctggacaaatctgcatacttgggatccgaaacctcggcgacagatttccgttcttccttgatctcagcaacgtttgtgctgccatggcttatcagcacaccaaggataagagcggcacatatgattacaggagagtgggacagaaggaaagcgaagaaacccggcgaagatctgaatagcaggtagagcagcaggaccgggaagaggagaacccagttttcagaagcatatctgtagctcatcctgattgaacacctcaagatcgtccttatacatggcgtaccatgatctgcctcgacacccatggccttgtcctctatcaacttgacagcacaaatctagcaaagaaacaaacgaaaaaggcaatagttcagccaaaataaggatctactagcaatgaatgaagcaaagagagaaaatgttccgtccataattctgaaactctcatgctaaataattccatgctatatatactacagaattacaagagatcaattcaggtagtgcagtagtggtaagcaatagctgaaatcgaaaacttgaagaacaaagatgcaatccgtataatcttaaatctcctagaaccaaaaagcgagttcagcagcagcatcctgatcatcaccatctctgctacgacattacaactgcgactgatcgatggcgcacgaaagaaagattgtttaccttcaggcggcagccggcgatccgacggcgagatcttggtccctgaggcttctttccttcagcgcgccgggaagcaatcggcaatggcggccgtcgtcgtcgtcggatcgaaggcaaaggtcgcagcaaggagagagagagagcacgaggagacgagctcaagaaagcgagacaagaaagaggcaggcaagcagcacggtggtgggggcaggtggtgggtgggcccggctggtcagcgtcggctggcactgtaccaacaccgtgacgtcgtcgtcgccctcgtcgtcgtcggtccggctggacgccggtggcggtggcacgtgtgcgcacgccggcggtgggcccgccgccggttcacgcgaggccaggtttggcgcggcgcgggagcgttttcccgcgtgttttggtctctcgtcgtgtgggtggggtggggtgggtgagatctggattccgtttgcttttttctgaattctgatctct

SEQ ID NO: 17782 - DNA, 3556 bp, Oryza sativa
attcctgcagccccgctttttttggtttctttggaataatgggcatgtggtgaaccagtcatgagtaaatgtgcttgggacaaagtctcaaaggggataattcaatccatttgtcccagacagcacatttggttggggaaagacgaatctttatataatatggagtactccagatctgattagctaagggtgctaccatgaagaaacttaaaaagtgtgtgcttctagaggctcataccacatatgtaaatatcatttcattcattttcatctagcaaaaaaacacccaatgcacctctttcctgtgcatacaaaaactcggcacaccgaaagaaggcaagaatcacaataaaagaacacaaagaaaccctatttttacatgtgtatgaacaccatctctacatcgcaaagactccaagaatacagttaccgcagaatagatcaactgtatacatactcatccgattgtatgatcctaataagctcttgcagattatcaaatacgcgccttccagagctctcagctccaatgtagttcaaaagctgctctgtatcctaaccacccagcaaggaaatgatcataataacgatcttagtttatggggaaaatagattaaacaaacattacaacaaataagcagccagaataaaacattaagggggaaaacataccttgtgcaacaagtagattgcataggatgccttagtggggtcatcttcttgacattccacgaaaagggggtaaactgtcagttttgggtcggtcatgttgatacatgtacgctctgctgaagcaatggatgctgtttcagctgaaggcaaacaatcactcacataagatcgcgatcctccaaagtgcaaagggtatcggaggggaacatgaagataggaggctatgagcaaaattgcctacaaaaaaatataaaaaaattggcaactggtaactctataacccttgagaaaaaaacaagcagtgatccagtatgtgcatgcaggaagatgaatttgaacatctgccatcattccttccttacaaatgttcaacactgtaatgaccacaaattttgaaaagcatgcattggcttattaattttgtgtttcaaaaagaatagaaggatgtatcttaaggccatctacaatgttaattgtgttaattgcctaatttgagcatgaaaatgagcatagctaggttggagcatccatgctatcaagtaatctttttaagggcaatgctacatcaagtaactgacattgatgttttatagtacaggacaggagtgctgtgaagacttacatgcgctgcatatcccagaacagctgcggaccgctgaagatccttctcacatatatcattttgttttcttctttgcttaccaatttgccaacccaaaaatgtcaaagcatgtatttgtggtagtttgataacattgagtagatgtgttccattctcttctggaagtgttccattttcttccgaaagagacctatgtgctcctgaaagtgttttgtagtttaacagaacgaattaggaaagaaattttctgccactgttcatcaatcctcggtagaaaaatgtgcactatctgacaggttaaccggtgtaattcttatgtcactgatatgctgtatgcaataatgcaatgtagtatgcctatgtttaaacatttttaagcagtacactccaaactctccttgtttgcagacaacaatatctccaaacagaatagcatgtggaacaccttcgccaacttagacatagacgatgcacgccataacgatgagggcagagcaataagtacagagatgggtagattcaacattaactcaaggagtgattcagtgaacacacatgtatataaacacacctggaaaataacaatagatacaacatccagaagatatcttggtctcttgtagtctttaccaatctaccggaaaagaagccattgaataaaagggcatggcaaaccaacctatgatatattcctagagcataaacctaaggcatcactctgctggttagcaatgtttaaagctccatacttctcatcagaataaacatacatatgtattagaaccatgcatatccttggagtgtcattgttcaagacatgagattattggattctcaccattagtattggaattgaggtttcgcccatgcggcagatcatggaataccttcacagggtacaatgcagcaacctggccaatcatactctgctgcctcatccttaacagcctctgcaaatccccaagccgcgccttctctccagacaacgcttctttcgcatcctgcaatcaacatcgaaaaatctccctgtaaacgcaggaacaggaacacacataggtactctcaattctcaatgcacgcggcatttgtgtcgattacctgcagccgccggctcgcggcggcgacggcgccggagaggcgcagcacgcggtcgatctgcgcctggagctgctccctgcggcggtcgacgccccgggccgcgtccctcctggcgaccagcaactcccccacccgcgcccgccggagctccacccgcgcccgcatctcgtccagcgccgcgccctgccgccgcgactcctccctcacctgcacacacaccgaatcaaatggccgaccgatcagccccccactcacgccaatccacacgccgccctagcaaagcaatcgggcgcgggcacgcaacgcgcgcacggcgcacctggagcgcggcgtggaggcggcgggcgaggcacgcgcgggcctcgtcggcggccacgagcctccccccgaggctgccgacgcgggcgagctccgacgacggtgggcccgccccggccgcgtcggggctcatcgcggccgcgggccacccgcggcggcggcggcggcggccatggaatggtatcgaaatggaatcgaatcgaatctgcgtgaagcgggatgcgttgcgggggagcggaagcaaagaggagagcggggtgggtggggtgatgacgtggcgcggcgcttacgcaaggggagggtgcgggttttggttttggagttggttcgtctggtcgattcgctttcacagagtttcagcgagtccgcgacgacgtcaaggctagtgacgttttcaaagccacgatgactccggcgagacagtgatgccactacctcctcaaaataaatctatttagcatctattttatagataccaatacaaaggaaaaagatctataagtctataacaatcttcctttatcaaatcccaatataattatttctcattttatctactcgtaatataattattctctaattttacaaattctgatgcaatgattgctttaaaaatgaacttattttgagacaaatggaaagagctactggtgaacttaatgtggaacggaggaagtaggtttcatcagttaattatgtttctcaaacagttaaacgatataattttttaatgataattttctatatataaaagttactttaaatataaatttatgtttcaattttaaaataattaaaacttaattaaacatctgacaatatgtcacacgagggggctgcaggaat

SEQ ID NO: 17783 - DNA, 4343 bp, Oryza sativa
tcaatggcacaacattgcaacatgtgccagcaaaatcttttgaattcgacagtttaacacacacaatagcagatgaaattcaacatagcacgcatggtaatttcgacatgaagaaaagtaaaggagtacggcaatatccaaactggaaatcctaataagagagatagcaacgactggctcgttcacgagcttcatggaataaaattcttggtttcatgatgagtttatccaagagagcagcaactcatgacaatctggcgtcagttacctggaattgcaagaacaaatatttttagaaaaaggatgatttcaaccataagcaagttctatgaaacataacatgccatcacaagttcacctttagtatccaacttgttttccaaaaacaattcatttgtgtcttcgaatatggatagattagtatcattcaaatagaaatatgatgtgaaatcatcttgaagaggtggagcatctccttcatattgtggcactaccagctcattagaggcagccatggagttatgtgcttcaaaaagatatcaacaaatcaacagctaaattactatataagtaaaagatgaaataagtaaactatacgaaccgaaagaaagttcaaagttatgaagctcttccgacgatactggactattgtgtgtgtaaaaatcaagatcttgttcccgatatcccttgcataaagggagttctgaagaatctgccataccttcacatggcatattaatagtaggactcaaactccctccagaaagctcttctttcatcaccacatagttcaatacatcagtatcatttagtaattcttctgattgatcatttaataaagcaaagtttgttaggtgcatcgcataagcccttgagtaaacgaactggttgtttggatcaaattggattaaagggagctccatctgcaaagcatcagttgtggacaaagcagagagattgccatttgaaataccatggttggcaaagatagaggctgcaaaagatggcatggtcttatcattagagttagtcacaaagtgatacgaagtcaataccaaaagcttatgtgtagagtggtttaggggatagctcacctgatggaaatatgtcattgttcgttgttttcaacacaggaagtggaatctcatattttgctacaacttctatttggtttctttgatcttctatggagtcataatcttttgatgcaagtctcctatcaagtatattactgatggaagcatctgaaaactggggtgcagaatacatactagtagtatcttctagatgattattggtcagcttctccctaacgttggggtcagcagactcatgttgatcttcattcaaagcatcgttgcatacattagcaggatacaaaggcgaacgattgttcttgcatttctttattcgagtgttccagtagttctttatttcattatcagtacgccctggcaactgagaacatgtggtcaagttaataacaatgataatagatagaacaatgcatataacagtaacaatgttctaaaacaacaactaagatagttatatgcataaagctagaccccaagtttcactttaacttttagcttgtcccacggctccttattttcagtagaactaaaccaggccgatgattgcaagtgcaatgaaaagatactagcagtttactttaaatagcaacccctaagccatacaagcaaaaataggctacatttctaagataatttcaaggatgggactttgacaatatttatatctgctgattagggttgatctgatttgtgatgataatcatattttaggataaacttgtaatgcaaaaactaccaaatattaattgaaataaatgaaatggataacatttgtttagttgaagaaaataacttcaccaacatttgaactacaaatattaataatacccatacctccatgtaaaggttgcaaaacatatttgtaatgcaactggaaaaaaaaactacccaactttaaattaaataactttaccaatggatgaactacaaatattaatatccccgtacctcccctccatgtaaaggtcaccaaacatacttgtgatgcaaaaactattaaagaacaacacttttataaatggtttcaagagatatatattttgagagcaaaagaaaaaaaaatgaactacaaggtaaacttacatcagcagccatccgagaccacttattccccattttgcgatgaagattaataattttattctcttcttccttgctgaaagcccccttctttaggttaggcctcagatggttcatccaccgaagacggcaactcttgccacacctcaagaggccagtgttcttctgcacaagcttccagttcctttcaccatgcttcttgatgtacttctctaagatggagtcctcccaagatgtccatggacctttcttcaacagcagggctacggtgctccttctgcaatctttatctttatcaacaaatgactcgtcatcgctattgctcatataccagtgtgtcctgtcagaatcaggatcgctgtcgctctcgtgcatcctgtcacaaacacgagttgaactatcaaaaataaaacagaaatatgtgtacatgaaaatgttaggtcagtggccacggctagcagagattaacaaatttatacccatataaaacttttacaaaaatcgccaaggtataaaaaaaaacggatacaacacttaatttctaaaatcaagaaatggagtgacgcctacttataaaaaagagtaaaatgcatggagggtcatataacttgttcagatgtgtcgtgtaggtcactctactttcaaaatgcacattaagtcactaatacttcctccgtttcacaatgtaagtcattctagcatttctcacattcatattgatgttaatgaatctaaacatatatatctatctagattcatcaacatcaatataaatgtggaaaatgctagaatgatttacattgtgaaacggaggaagtatcagttaagtgagtcattagctcatttaactatccaaatgatcacacttttttacacatgacatgccatctaggattgaaaatttgcttctagatatgtgcaaaaaaaaaaaccctgttttatttcccttctcctaacactaccccttgccaatacgcggaattcacaatatatatcaactcacatcgatcaattcgtggaagctatatgtactatttatacaggtatcgtagccatgaagattgcttgttgctaacacgttgtgcgctaattccgggattggctaatgatgtacggtaggacttaaacaaaatcacaatatagagggtttttctgcattatggagactattcgtcaaaacagccataagtgaaatgattcgattaaattaattaagtatggggttatttatgtgcagaagcaaattttcaatcatatgtggctatgctcatatttatagttaattgtgtcaataactcacttaactcacattagtgacctacatgtgcattttgaaagaaaagtgacctatatgatacacctaaacaagttagatgatcctccatgcattttactctataaaaaaataatgagatgcactcacagttccaatctcaactgagattggtaatttcagtgaagtagattgaaacgagcacagattagtagattacacaacatatcgtgcaagaaacagatccactaaaatctcttaggactattcccaacaattcaccgatcaaaccactaaatatgaccccccaagaaaagaataagcaacgccaccggtccattttttacctgaccaaaaatgcagggtgacggagcggtgggctgtcggagtgtggagtgtcgccggagccgggacaaaacctccgccctcccaccggaaatggtcaccggccgccactctctgcgacggaagagacgcgatgtgaaggggagttcgctgaggcgagatgggagatggagatgggagatcgcctcccccggcaatggcggagcggggagtttcgggggcggcggcgtgagcgcgagcacgagtatatgtgcggcaacgtcgcgtcggctgagcggtggttccattccaagtctatctcagtccaaatgatttttctttttttttaagtaaagaaaggaacgaattttatttttaatccaggccgtccgtttctctcctcttgacctagcgaatcagacggcttcggagcctcggatgcccacctgaaccggaagccgtactctctgttcgtataatcgtaccaaccgagatttgactggggagtactcctaatacaacaaatcattatgcccagattcattgagatacgtcacatcttgactctt

SEQ ID NO: 17784 - DNA, 1487 bp, Oryza sativa
agtcaaaagtcagttctgtcatgggaggaatgtgcttcagtgcaaagaacatgatatgtgggtggctgtcatctccatggtcatgctgaactggctgccagaaaacattcggggaacaactatggttcatgaaacgtgagacatttcccatcttttttgcactaatcttgatgggcagtggctcaaattcatcagctgatacatatgtactctcctcaccaatcaattcaggaccaaagttgaattttaatgtcttctcaccaggacatacagtctgaaaaatgtaatcatcttcactgtcatccagattaactttgagctcatcaatgacctcaccagtatactcacagataaatgcaccagcacgaatgggatcccagcagcgaagaccccagcctcgatttgcagtccggaagacctcaaagtgaaatctgacccctttttgggtcactctgttccggcaattcgtagtacaatggcaagcatcaccgcattcataaattattggcttgcggcacgccaaaagtcctgatgagctgtaaggtaagtcacctccgttatgttgtccacaagcacagttgggatcaccaggcaggcaaacactctggcatccgcaaccctgtaagggtttcatagaactgaggggcctcaagtatttgacttgactggcataggtgaaatgcccaggtcctttctcatggtctacctcattgacaaggcaaactgggagagcttcagccgcagatgatagatcaggtaatataaccctgcctctgcttgctggattgtctatccatccttgagtcatcttccacaatgcagctccatcaggctgtccaggctcacgcagcagtttgtacttgaagcaattgataccagactttgttctctccttccaggactcctgaatcttatagaggccatcatatatgtagatttttccagtcaggcaaaatggatccctgaagccccgcacaaccctgatctcgttcttcctatgcaggctcctctccagagcaaggttacctctctcaagcttttgatcatgcctctcctcactgttcctactattgccacctgaaccactgtacaccagtgtatctgtgtcatcatccacattctcatagccacctgctgcaacaatacatattgccacagaatcctcatcgcttccaaatttagcactcatataatcaatgccacccatactaggagcatgcaacccgatgatacatagctccatccggaaatagaaaatatcccctatttcaactccaggaacaagtcctaccctttttcccacattagccctgatattgcttgccatcatgatggcgccagccttcaggtcagcccgtttgctagtctcttgtatttcatccagttgcagatgtctacgcctaagtgcttcaaaggtcatgtggactgcttccacaacctccctgggatcactggatgaaggtggtctaaagggggctgcaggaatt

SEQ ID NO: 17785 - DNA, 2877 bp, Oryza sativa
attctgcagaggaactgtacatcaccacatctttatttggcttcaacaattagccttatctgttacctgatttgtttcttatcactgaacaaaatcagctagtagtagaaaatatgttgtcctttctttcctcaactactgttttgacaatgttatgcgagggaatgatgtgttaacatgagacagcatgatgaacttgatgcccctgttttaatccaagtagaagtagctactgtggtccaagagacaagcaacaaccgctgaaaaaccattgtctaccgagtctgatgactaaactactttcttgtggagtcaggaacagggtttcaaaaaccgccgggggcccggttaccgccacccggcggtacggcggttaccggcggtaaccgcggtaaccgcgcaaaaccgcgacaaatttacaaatcgaaatttgaattcaaaaattcgggcaaaccacgcggtttgacgcggtaaccacgcggtttggcgcggttaccgcgcgatgtgtaatgggttgcacagtaacgggccggcccatttttttttctttttccaattttcaaatttattctccgttttgctctcaaatttgaataaatattactcttttttgagaaatttcttcaccataaaacactataaatcaagcactaccttcactattttttttgatttttttctttttttttaaatttttgaatttggacgaattttattaaaccgtaccgcgcggtacgggtaaccgtacccccgcggtacgggcggtaaccgcggtaaccgcgcggttaccggcggtttttcacaccctggtcaggaagccactagcttggaacagactccccatttgttttgtttttttctttttcatttgcaagacagaatgtaaaaggtagtgcttcatccatttcaaaatataaatatttatagcacttatataccatagtctaaataacttatggaacactgattccaataaataaaaatccatacatttctggctaatcatattttatggtacaattataaataatctaaaatttgactattagtatgataaaagagaacttttttaatcttaatattttgtaaataactttaaaacaaatatggcttaaaattgaggagtaattgaggctccatttttatatgacttttatacgactggttagatttctcgtggtggaaccagtccacccaaattcaaatcctagatttgacacgggtgcttgtatttatggctaattattatttcagtggtagccgatatacgcctagtcttttaaaggtgttcgtatgtgtagggtgtaagtgtacgcgcgctgaggacgcatatgtttaatactgtgtttctcacttctcagtaaaaaaaacgtccgttatatgaaaaaacacagtaattttgaagcaaaacatcgtgatttccaaggtatgtgcgttggcgttgctcacctcacctacccgttcgttactagtagttcgctgcttgcacgatttcccggtgcgccctggccgtccgatctcctcggcgcgggatttcgacggctcagatctcctccctcctcatcactgactcggtccctctccgccgcgaagcgtggcggccaccgtcgcggcgaccacttccacctccagctcgccgccgcagccgcctcctcctccatctccacctccacctcctcctcgcctccgttgggcgagagggagacggagaattctccgctgccatggctccggtgcggctcggggctcccacttccggcgccctgctgcttcttgtcctcctcctcatctgcggcggcggcggaggcggtggcgttgctgccgggggtggaggcggaggtggaggcgggaaggggagctcggtgtacccggcgcccgtggtgtacccgcaccactcccgccagatctcctggaagcccaggttcactttctctcgctcgcgcgggcgccgccatcggttggttcttggtttcgtctcgatctcgacattggatggactgactgatgcgtgatccatggcagggtgttcctctaccagcatttcctcagcgacgacgaggccaaccacctcgtctccctcgtcagtgcccaccacctccccaatccaacaaattttcatttcttttctctgcatgaatcgggagttcttgtggatgcttgaactctgtatgcccaggattcattgagtttttagaggatttatgtttttttttaggcgagaacggagctcaagaggtcagcggtggctgataacctgtccggcaagagcgagctcagcgacgcccgcaccagctccggcaccttcatccgcaagagccaggttaggtcttgattaacgtttttttttctttgaattatttgttcatccggagtgtgagttcatcttttttattgaaaagtatctttgaataaagggggtcttttagtgtatgaagatagatgtgcaatataacttaaagtagttcttggctaaatgagaggattcttcctcccaattttgagaattttcctttaaatttacataattcttatgtaatgaacaatcatgtccaaatttgtaggatccaattgttgctggtatagaggaaaaaattgctgcgtggacatttcttcctaaaggtatttgactccattaagacaataacaatgcactttactattcatgcaattcttagatgttctatataattcataacttacacatgtgagatattgtcattttacacctaataatcaacctccctctgggcctttgttttcgttcctgtacctatgggcagtcttgaagtgaaagcctctaaaatagttatgctccacttggcatttcatttctaaaataaacaaagtaaagcctttaatgttgagcctccttacctg

SEQ ID NO: 17786 - DNA, 3559 bp, Oryza sativa
aattcctgcagccctttttttcctttttctttttgggtggggattgatagtagggattcttttttatgtgtcctcatgttgtcttccttcatacataatccaaatttatgttaactttatgtgtttttattttttttcttgtacatattatgtgataataatcagagaatggtgaggatatccaagtgttaaggtataagcacggcgagaagtatgaacggcactatgattacttcagcgacaatgttaacactctccgtggtggtcatcgcatagctactgttcttatgtacttaacagatgttgcagaaggtggagaaacagttttccctctagctgaggtaatttctttactccattgtctccacggtgtttttttaaaagaaaaggagagaaatctgagccaacaggccacaaccaagcatgggctcctttactttctcagcggttttgtgaatttgttttgggatctcttattgcatcattttctctacacacatttgtcaaacaggagtttacagaaagtggcacaaacaatgaagattcaaccttgtcagaatgtgctaaaaaaggtgttgcaggtataaatttctaccgatgttccttttttttgtttgtaattatgattcccatgatttttgtaatatatcttatgcatttctcaattgatatactactgctacctcagtgaaaccacgaaaaggggatgcacttctgttcttcaaccttagcccagatgcttcaaaagattcattgagcctccacgctggatgcccagtcataaagggtgagaaatggtctgctacaaagtggattcgtgtagcctcattcgacaaggtttatcacacacaaggcaattgcactgacgacaatgagagttgtgaaaaatgggctgccttgggagagtgcataaagaacccagaatacatgattggaacagcagcattaccaggttactgcaggaagagttgcaacatatgttagcgatcccattgtaaataatcaacggtaactgctttgtcggcagtctgatttatacaggaatgggttaaaataagtaggttcatgaggtttttggcacaaattctaccagttttggttacttcctgatgacaacttggtttttgttaccattcttcaatggtaactggcaggaattagaaagcaactcattgttagtatccataatttatgctagatggagatgcactttatcagtgcaatttctttggagagcaggtttttgtttttatttcatagagttgtcgacttgagcctactaggttatggttggattctgccagaatttacaaacatctggtctggttttcatctgtaatccttgagttgtcgacttgaacctactaggtcatggttagatcctgccagaatttacaaacatctggcctggttttcatacctgtaatccttctcatttgtggtatatagcttcagtgatttttgaattcattaatcaaatctctttatcactctaattctgcattctgtactggaatatgttcaattgcctgctatctgtgtgcaactcaagagctttttactgaccaatgatgatgaacaaagcttcaggagagccagaactacggccatgtttgggaagccgaagattctgagaaatagccgataagtagccagctagtgataatctgtgttttctagcttttggaaaccactatttcattttatggattctatagcttctgatcctcagaatattgataagaattgaagctgtttggaagaaccggagattctgggagaaactgtaaccgccaaacctccccaaaaactggtcctgaaccttttgagtctgaactctgaaccatctcagggcaagtactataatgtctcatatgttgcctctaaaagtgccatattggattgagtgataaggtgaaagagaaaagtgagaagattgatgatgagtcacccctaaattaagaggcaacctccacacaaatttcaaaaagagtgcgagaagggtgtcttttatttcataagtgaataaaatagacaaatttagaggtggtagtcatatttgccctcattagtcatgacatctcctgttcctttctcacgacatgacgccgtccaactgcgagaagccctgcacaagcacacaagatccttttgggtgcttgcccataatgtggcagcagttgtagcagaagtgagaaccctgatgagcttgcagttttgcagcccagctcacatgggaacagaaaaaactcacaaatggatggacagttgggaattgaatttgatgatgctgttgcttgccatcttcattcattgctgctatcttggagtactgtacaagatgtgcagtcggtcggtgcgttgtgtccacattcacaaccgccttcattcattcattcattcacttctatgtgcatcatgctggcaaaggcatttgtcattctgttttaactactttgctgtgagattttcttttttgccgtgaattgtgtcacctgtaactttgcaaccatgaacagataatctgcagctataaacagtactcactctagtaaaaagaagttgatgttggaaaaactaaactctgttcttctaacgtcaaacaaatttgaatgggtattcagttctctcaacgtacagtttttaattcaaggaatgtcattgacaagtgtccaaatctaagaaatgtcatcgaaaaatgtgagttctaaaaaaaaacatcgtacaaaacagttttatcccaaatgcggaatggacgaaaacctaacggtgatggtaattttggaacaaaatccccaaaaatatcatcgccgttagggttccgtccattccgcgccattgaatatattgttcatcctatagcacttaacggtgcggaatagacgaaaccctaatgatgatggtaattttagaacaaagtcgtttgtaagatgatatttcttagattttatacttgtcgatggtatttagaatttatacttgtcgatggtatttcttagatttggacgtttgttaatggtattttttggattatcttaaaatgtaactaaaggaagtatagtagatatgctgcaccaaggaagaactttcttatcatcatgctgttctctttttttttttgaactttgctcatgctgttcttgtgacaacataaaaccagaaaaagtactagtatttctcacataccacactaggtggttacatgacgacttgtgagtcatcacatcaaacatatgaacaagataagtatatacgtccttgcaaggacaaatgtcatggaatccagcaagttttacatcaaaaggaattttatagttacttaatacgtctttaaataaaaaggaatttgattatgatcagcaaggaccatacaaacaaacagccacatcacccccagaaaatgatagctagttgagcggatcaatcaaacgattctaaacatcccggcgacgacgacggcggcggcggcaatggcgacgccgacggcgacgaggtggtcgccggagcggccggcggcggcggcgttggtggacggcgtcgccgtcgacggcggcgaggc

SEQ ID NO: 17787 - DNA, 1560 bp, Oryza sativa
cttttatatgttggaatttcaaaaaaaaaaaaggtgggcaatttcagatatttcaaacgctaaaagggactgatttactgaactagaacaatatctttgccaaactaaatcaaactaaaatatctatagccggaggctcctcatacattaaattcctaatacttcatttcaaaattgtgaacctcctgccttagccatcactgacaaacaatcaaaattaaactacggatatttcatatttctacaattctactcaacaaaagctatggcgaatgatcaagctaattaataactccagttttcttaaaagtacaaaacgaacaacataattagtgagagcaagtacatgcttaccagggaactgtgggccctcaccggagggcgagacggctgccggcgaaggcgacggcgttgggcccattggaacattgaatccaaaggctgcaaaattaattatttcccaaacttaattagcccataatatgcttactaatcaaaagcaaataccctcaccaaaagtatagagctattacttttatcattaagacctatatatcctgcatataacaaaaaccaaaccaattctagcaatcatttgctcgattctgtcaaatcaatttcactcgtatgctcaatatgcatatgccaaaagatgagtagcatcgaaatcaaataataaatctgaaaccattttacctaatatagtagtatattagtatgcatataacaaaaacaaagaaacatatctctatatgcaaccaataataagtaattaagatataaatctagtttaactttttttttatggagagagtgctgctgctactgctactagaagtgattaaagtgataattgggggagattaataagattaaagattagggaggtgattgattgcctgcgcaggtggagacgggaggggtggagacgcggcagatggcggggagggcgagggcgcgggagtagtcgacggcgatgccgtaggagtcgccggcgccggagaggagctcgcagaggcacaccgggttggactccaccagcccggccagctccgggcagcacggcttgtccggccgccgcgccctgctcccgttctgcacgtacgtcaggcagtccgacatgttcagcagcgccgtcaggcacgcctggtccagcaccggccccgctggccccggcgccgccgccggcgccgactgcgcctccgccgtcgtcgccgccgacgccgccagtagtactactacggcgactgccaccgccgccagcgtcgacgtcggccaccgccgctgcgccgccatggcgcgctctctgggggctttgatggcgagtggttcgttaggcggtggaaggagaggagaggagaggaatcgaaaatgaattcggaggcgtcgtgtgacactggcttgtcctgcagggtacacacgtatatatagagtgatgcgtctttttttctaaaaaaaaattcaggttacacaccaccgcgtccaccttgccagatataaatgtgttcacttagggtgtgtcttagttgaggaaataaaaatttttgggtgccatattgg

SEQ ID NO: 17788 - DNA, 2383 bp, Oryza sativa
tgatgatgcactgcaagtattgtggagaagaaaatcacaactcagggggttgtaaactaaagaagcagggcatcagttctgaggaggcaaagaggatggttgccacagcaaaagaatcacttgcaatggagattcaacaaaatatcactgaacaagaaccaaatgttatcaaccaggtaaaatatcactgaacataactcctctgttgcacatgttttttttgcatgtcttatgaactacatgacctatggtatatataggatgtcatagatgaacatattgctgcttctcagacttcatctcaactactatcacagctaggaagcactgtttttagtcagatggctgatcaggtaatgttgttttcaatcatttcaatctcacattgcaaactacttgtcattgcaaactatttatcatgtatatatgttctgaattttgcagccaaatcaaagttctgtgctatctcaacaactaggcccattgccagatcctgcctttatcatgtctaacattccatcagcaaggccagctcctcttacaaccaacaccaaattagggaagtcagtggcactgaagaaaagaaagaccacaactggaaacaagaagtctgcaagtgccgcatcaaaaaagaagcctgcacctgggattggaacaaattaatgcctattagttagctgggaatatattttgtttagtgacaatctgacaaaaaatggtgttttggttgtcaacacactgtgatgtatataatggattaaaaatatgctatatcagctgcatgctgtagtgcaagtgcatggctacttgctgattgccagaattatagttgcattttgtgatactaagtgctgaaagtatctgaaatggatgttctgcctttttactgaatgtgtgcctcattttgcctttgcaatattgtgcctcaaatattctatgaattgaacaagcattccttcaaaatttgtatagacccaacattcacaaagatgcagattaaagaaactggctattttattcatcacacaccatgcatttttagtgcatttcacacattacacatttcaaccactcctaaagaaagcatacatatttgtcaccgcaacaaccacacaggcagctactacacatctcaataaggcaacaatatccctaccaatgtctatcaacaagttcatcctcctaacaagcactttaatctgctcagcaatttgctctgcatcattttcaacatatggttgtgcaccctgttgaaccattgcatttgtctgaacacgcacagcagaacatggactctgaatatgcacagcacgagatgcaagatgcccagtattaatcaagtactcctcatattgttcctcccagtaccaaaagcgacatccaattccatctcgctgcgcaaaaaatgtacaaaattaacctcagcaaaccgatgcgaattgaaaattttccaccacaacacagattatagaagagaagaactaacctgatggcaagggcaagtgtaaaatatgcgccctttattctcaggcgtattagccgcacgcctaatgattgtctcacaatcgcaacaagggcacttaatcagagggaaacgcccctttcccttccgccgattcgtcgacgatgaactcgagcccccttccatggcgccaatcaaattgaagggcttcactctagatacgccaaatggaaccaattggatgccccgcatccgagcttgaagaagagggcgacgaactgaagatggaggcgacgaatcgagcctccctagggtttcacggcttagctcgatggggaaaaaaaagcgaaagagtgggggatttatcgtctgagggctggcgaaaaaataaggggcttaatgcataatgcaccaccccggctgtctcctcccctccacgttggcaagccacgtcagcgagcagaccgagtcaaatggggtttggacaggcaatgtacggctaagcaagtttagggacctgtaaatacgatttgagagtttggggacctagatgacacacccttacaagtttgaggaccgctggtgcactttactcttcaaaatatttcttcaaacttctaattttttcgtcacattaaaactttcctacacacataaactttcaacttttccgtcacatcgttccaatttcaaccaaacttccaattttggcgtgaactaaacacaaccatatatgtgaggaaggcacttgacaagctttgcttggttattcgtattttcttcgattccaaaataaacaaatttaatatagagataatccattgtatgccactgagtttgtcatgggtctataatttgccactgactttgtcacgttctataatataccatcgatttttgcttaacttctacgatttacca

SEQ ID NO: 17789 - DNA, 3325 bp, Oryza sativa
cagtttttatagtactacctccatcccatattacttgtcggtttgagttgttgtttgtactccctccgtttcaaaatataagcatttttagctatgaatctagacaactgtgtatccagattcatagctaaaagtggctatattttaggacggaggtagtaatatttaatcattcgtcttattcaaattttttttgaaattattatttattttgtctatgacttgttttattatcaaatttattttaagtatgtcttgtttttttatatttgcactaattttttaaataaaacgaatgatcaaacgttggaagaaaaagtcaaagcgacaagtaatatgggacggagatagtagaatttatttttaaaaaaacatacctttaatttgggaaatgtgcgcgaaagtattcgtccaaatgtttgtgctgccaatcacagccttacgcctcctttgaaatttgatatgaccaaacggatttcattgagatcaaaacccattcctgtaaaattcttatgttccaagaaacccttacagcccacaggaaatgatcggtttgcaattttcaggctgacgttacaacgcgcttacttcaatataaacatacggaaagctactgaaaaggaatgaagtgccatccaagaagaaaggcagcagaatgctggccaggaaggcaacgggggataaactggtaaggatattgggggtggctgcacagaacaggattacgtaacaatacgctatgcccaagacaagtcaatactacaacatctgtggcgagtacagaggtacaaaagtcaggcaccgtaagcctttcgattaaaaaccaaactgaaacacgcacgattttttaacaccccacgaaaaacaatctgatagctagctcctttggtggtggaacctaaagagctttatcttcccaaaacatccacatcattatctgtcatgactatatagtttcgatacgtaaaaaggcagcgttcactcagggatatccgccatgtcttcctttcatttaagcccggccaagatgcttcaagcctgtttttaggatataaaaggcaggtggttagttgcctacaaacattttaggtaagatatgataacgcgcggttaaagcgctactgtggatgttctatagcagcaaatatgccattgtcgtaccttgttggcaatgttgttggaaagccagtcaagcccctcatacaacccctcaccagaggtagcacatgtgctctggatgtacctatgagaacataagacgaataattcagattgcatagaaagtttaactttaaaacactaatattgggtattgtcaacacagttggataatgcacactgaatgctattacttggttcacaatttgctaatgcatgaatggttttacttggtttaggacaaggatttagtacttaagtagaatacaggagcaccattatgcgagcagcacatagtatgctgaaagcatataaatacacactattgctgatcaatctaaaaagccctgtgtgagcaggccataaacttttaagaggaaaggaaaccataccagtgccgctggcgcaaggagtgcagaccaagcttgtcggtgatctcagcagcgttcatggcattaggaagatcttgtttgtttgcaaacaccagcagcacagcatcacgtagctcatcctgtagccacaacatgccaacattaaaactatagcttctagaacatcacatgataagcatgatagcatgtataagttgtttcatccatgttgggctctttagaaatttcaaatagctttggaaccacatcttatgcgtatattaccaatggcagatcttcctgatggctagaggaaaaaagggaaagagggaatcatgggcaaagaatcttacaaatcacacgtatttatgaattatgattctcaacaacagaatatagcaaaccacatgcaatttatgaattgtttcccaacaagagtctaaaggtagactaatactttgaactctgatattgatagtacctcattcagcatacggtggagctcatccctggcctcaacaacacgctctctgtcattgctgtccacaacaaaaatgaggccctgggtgttctggaaatagtgcctccacaggggcctgatctgtattaataaaacacacagaaaatatcagatcacaagaacatgccaagacaaaatagatgagagaatgaagctataaacaattgaaatgataaattgatatgtttgacaaaggaagttaaccaaatctaaattcttttttttttcataaaattcaataaaacagatccatcagagcttagtgtaaggtaatatatactgcagtttgcatgcgtggtttctgattatgcaagcatgttaataacaggtaattgacaatgttaaactatataatatgcaccaaaaaaataattcagaaataatagctgatcgaaggcaatttcttaccttgtcctgaccaccaacatcccaaacggtgaagctaatgttcttgtactcaacagtttcgacattaaaacctgcagttatagacagcaagtttggatcaatgtaaatgctagcagattgtttttccagtgttttaacttcctaaaaccatataattctaccatcctacaacattggctgaactctgaaagagagtattcaggttttaaatccagtaagatgaaacacattgaaggagacatctcagtaatttatttaagtccacctagcatataggagtaaacattatacgtgaagtggagtgtaaacacacttgagccaaataatcaatttgagatcagctaaaactaatcccattgctaaacagttcttatcattaagccagcccaaaaaattattgtctgactaaaaaggacctaattctgacctttgatctattgctgagcaacgcaagctggaatgttaattatgcgcacacagcctaacttaatgcgatgggacaaatggagaccgtgcatctaccataccactataagctgaattactgaacacatcgtaacaatacgtgcacagcataggatgtggattggaaacgcaccgatggtggggatagtggtgacgatctcgccgagcttgagcttgtagaggatggtggttttaccggccgcatcgagaccgaccatgaggatcctcatctccttcttggcgaagaggcggctgaacagcttcgtgaacgtgagccccatctccgctcccgctctgaaaacgaaatgaagacaaaaaaagtcagtcccgtagatccacagggtctcgatagaaaaacgagcggaatcaaagcaaccgcagctagatccgcgagatctgaagc

SEQ ID NO: 17790 - DNA, 7152 bp, Oryza sativa
cccatccagctgctgccgaaccgatcggatcggaagcagacgcagaattccactcaaaaccagcgagatcgaacacgaccagcgggggaatttcgcgggggcggtggttaccgagatcggcgacggcgacggcgacggcgacggcgatctcctcctctccttctctcccctgctctccccgcggcggcgtccggctccctcctcctcgcgggcgcggatggatcgcaggtggagaggagaaatgggcggagagggagaggagatagatggggagagagaggtcgttgaaatcgcgcaagggaggaggttatataggagggggagggggaggggctgggtcaccggcaggtggggcccacgtgggtttgtggtgagggcgtggaggggcaggttggagggccctgctggtaggtgggccccggaaatgtgcggtacgcgtcggtggtcactaggaattttgcgattatatataccctcccggagtgcagggttcgacctgtgggtttactgatttgtatggggtcaccgaaattctaaaatttcagaaattttagaaatattgtggaaattttggacgaatttttttgaaaaaatttgaatacaaatttgaaaattgcgggcgaaatttctgaaaaatgaaaaaaaaacagatagcaacaaaatccgttcggcaagcatacaagttgcaactactgcatcacaaattcacaaaatacagccaaacaaaacccactcacagatgataaaatgtaggttcaaagtctgaacagcagcacatcaacacatcaggcgaacaatatagtgagaacaaacaaatgtgaaaagagggataataacgaaccttggtcatgcctgagtccgtgcctaccttagtttgccattcttctttgcactctaagcctgaccttaaaaatggacctttgagctccacctcttctcttgttccttgcctttctgggattacctcgagggcaacctcaataagggattcaaatgggatgagactgtcaattttgttgctctatgcgagctccagagccgcccatattgctgccacctcccgcttctatcaccgtagcagctcagcctcctcctcctttcgtgctacaacgataaggtagagatgacgcataactaggatgatgacaactaggtaacgtggcataaagatgatgatggtgaagcttcgaggacagctgatgaggttaccggtagtgcaccgagacatggcgaaggggacataaaagagtggctcttcatgtagctcggtgagactgagatagaggcatgaaagaaaactgcagtatataactctattttataatgcatgctaagctatggtatttttgttcccaacaataatttacataaggtaagattcgggatcatgcactattttaccacataaaatttatatatagtattaaatggatttcaattatcaacttatactacgggtagttatgaaaacaattcaaataacataattgcccttcatttacgatgcattgaaacatacaaaccatttatccatgagaacagtagtagcatttatttagtttctttatatatctatttagtttttttttgacgcgtagcattcgttcattaagggaaatagaaaaacaaacagttgcaagaagttctaacaggaactacatttataataagtgagagactattcaaataagagatttaatatttcaaaaatgtactccatccattcctaaatataaggcacaactactctcaacccaaagaccaagaaataattattatcaccttatagattgggttatcctaataaatagaatgcatgcacccaataaaattagattgggctatcctaataaatagaatgcacgcgcccaataaaattagagatcttgatggtgtaggatttaaataatacttccttcgtttcacaatgtaagtcattctagcatttttcacgttcatattgatattaatgaatctagatacatcaatatgaatgtgggaaatgctagaatgacttacattgtaaaacggaggaagtaatattccagtgaaaagagtgctagttaataacatgcatgcatgtctgccttatattatgaaataactttaaataaaagaacgttgtgccttgtattattgaatggagtattgaagttctacggtgacatggaattaaggaagagactattcaattattgtttttcatatcccaaacagtttttttctctatcatgattttgaacagtgccaagattttttttaatttcaaacaaaaacaagctggagtactagtaaaataaataaaatggcccaatgaccaagtgacatgccccatttccacccctcctatttcctctctttcacgcatctcgactccatctcactctcccccctccctcctctctcgctcgctgcgatctgcactgctactccggtaggtctcctcccccccccccttcctcgcgcggccgcggccaccgccggcgagaagcccgccgcggcggcgctgaccccctccgcctcttcccgcgcgcggccccgccagccggccaccgtctcgggtcaaatcgaatcgaatcgaatccaaaggtattctcttcgctcttctcctccgcgggccgcttggattgatggctcggggtcgcgtaggtaggggaatctgttcgcgggttggattgggttgggttggattttcttctccttcccaattagccccccgtccagtttgttctagatttctgtgatgcgtctggtactgatggatgttagtttttgcagaggaaaatctggggttcagttgaaccctaatgcccccaggttaggtcagcctcgctgggtatcgcggctgctgaggttacttggagaggggtagggtggaatcctcgggggctgatttggtgtaattgagagcgccgattcatgattcaggcaatggcttcgcatgctggaggtagtggcggcggcggcggtggaagtggccgggatgctggctcggcgcagcgcgggccgatgcaggggttggcgaggcaagggtcgctgtatgggcttacactcaatgaggttcagagccagttgggggagccgttgcttagtatgaaccttgatgagctgcttaaaagcgtgtttcctgatggcgcggaccttgacggtggcggtggcggtggcggcatcgcgggccagtctcagccggccctggggctgcagcgccaggggagcatcacgatgcctccggagctgagcaagaagacggtggatgaggtgtggaagggcatccaggatgtgccgaagaggggtgctgaggagggtggccggtggaggcgggagaggcagccgaccctgggggagatgacgcttgaggatttcctggtcaaagctggggttgtcacggatccgaacgatttgccaggaaacatggatgtggtagggggcgctgctgcggctgcagctggtacgtctgatttgaatgccggagcacagtggctacagcagtatcaccagcaggctttggagccccagcatccaagcataggtgctccttacatggcaactcacctggcacctcagccattagctgttgctacaggtgctgttttggatccaatttactccgatggccagatcacttcgccaatgctcggggctctttctgatcctcagacacctgggcgcaaacgctgtgccacaggggagattgcagataagctagtagaaagaaggcagaagaggatgataaaaaacagggaatcagctgccaggtcaagagcgaggaagcaggtatgattaatccttcctacttagaattttctatatattgtatgctcttactttgcttattataatttactgctttcaaacataaaggcctcatggattctttttttttaatctctggatgtattaagttggcatttctcttactcatacagtatttagtctaatatatcaatatatatgttatatctttccaaagctgtaagaacataccagttgcagtagcattggaatgccattttccccttcttttatggatcatgtatatttatttcaccgctgtgtgcattctaactggcaggcttacactaatgagcttgaaaacaaagttcttcgtctagaagaggagaatgagaggctaaagaagcagaaggtactttctctgctgttaccattgtactgtttctattttgtcattcctttagacaaatgatattccactaaggactactccctgtgttattatgttgatatggctttgaaatactgttgttgcacagtcgacaattcctgttttattttagctagttatttttttctctcgctatccacttgccacagttgttacaccaacaggtccaaagtggtaacagataactagataagtgctatatacttttgtaattgtgttagtaatttctatttgatctgtttacttaaggattatgctatgttctccttataaatggcaaatgtaccagatgtagttactactatatttgaactatgaaacaatcaaatgaggctttgattttgacttgctatatatgcaagtgcctttgactttctaaggagacctatatgaagttcttgaggattttaatcaacttatcatgctacattatactcctatatatcagcattaaatatgtgaaacactagtattgtcatcaccaattttgcgcatcattgcaatcttttaaagtgtaaattttaaatgttgcaatgttgcatacattaaatcactgaacacttaggtgggcctcctttttttggttgccttttatttatcaatcatggtaatgatttatcaaccaaacatgccttttctaagatttttgcatatgaaactactctgtatatctgtagagctttacgggttatacatgtgctgcaattccatagtaattcaccaagatgcttgattcccatgcccttaactttgggccttttccccttgaacagagacttgatgctgaacaaagtcacaaacatctctctgtactattagcataatagaattgatggcccgttgatatttgacaaacggttttatgacattccattatagtatttcttacagtttagaaacgaagtgaatcatgctgcccttgttcttgagattgggtaagcaagaccggcaatgccatttagcttatagcatcttgttactgttcattcatgttgatgtcccttatgagatgattttgtcccccgctgtttccaggagttggatgagatactgaactccgcgcctcccccggaacccaagtatcaactcaggcgaacaagctcggccgccttctgatggtgacgatgtccatagtaaattttgtagattatatggggtctgcccacatatttcgcatcctttggcggtaggaacaatcgatatagcttgagattccatcttccccctccagccggtggtggtttagagcttgtaaacaccagcaccagcagagccctagccatgtcgccccagctgctgatctcttcggaggctttgtcacttgtcagtatgtaaattctccaaggcacgtgtcgctgttaagttctcagagctccttggttatacatgattgggccctttgcctgtttcttgtggttggttgatacttagtacttggttgtgatcagtgtacgtgtggagacttttgttatggcctgatcaacatcagttcccctgtttcggctaagataacgatgggtgataagttgacggctcacccatgcaacacatatcgtatgcctgtctgggggagcagagttttagattgtgagaagtagctgatgggaatctagagctttttgggtttaatttattttctgaattttgtaactacagtttcttagaatggaagttggattgatcgagaaagctggagactttatgaatagctgtagttgttagaagctcctccaaacaaactctcgcgtggtagtctgtttctcgtaatctggatggaaagttagaatgtttgagagtgttggagattccagaaatagctgcagcagacagaagctcctccgatcattggagctccaaatctcgtggtttgtgtcgaatttcgaatgaatttcacgagataattccgtgtttctggggctcgcatctcatcatttccccgtgctttcctgcacgtgcaatcattcggacagtttggcccggaatcatgcatccatccatgcgtcatgactcatgagtcctatagactactcgtgctagtacaaggaggaaggagagccgaaagcagcagcaggctaggctgggttaggctgctctgcttcgcgtcgcatgtgccgtgcatggctcagggcacgctctgaatctgatctgacgaacggaatgcaattagccatggcatggcaagcgcatgcaggctggctgtcaaatggactaatccaactcgcagcctctcaccacatgcccatcatcacgcccatccactcctaatcacctccacttcattactcacatggaagccgtgtgagcttaattaagctcatataagctgaacacttcactgcaacagcctacattcatactgtccagcaaagtgagccgcaagcaggtcaccaaagccatgagatctgccaccatttgtgtcctctgcatttgcattctcatgatcctgcaatgctttgccagcatcagtgcagtggatcttggcgatgctgcagcttcagcgtcagggggagaaggcctgatccggccgaggaagctgctgcagaatgcgccggcggcgaggtcaccgccgtcgcgctccgccgccgccgtggaggtcgaggtcaatgcgagcctggggaagcagaagccgtcgagcaagtcgaatcccaggcagaattagaagctaagctactatcagtagacgacacacgctcacatggagctcttccgagatgtggctgtagaaatgtacataggaattttgatgtggaattttagtttcttcctcgttttccctttgcaagtagagtgttcaccatcaacatcatcaacagttcatcaccagtgatagtgtagttgcttacaaaatcagaggatctgaataggcgagttcccttcttttatgttgctgtcttgattgcttctgcctcctttggacacccttgaattttgatgatagcttctagttcctgatgattagtttggttttg

SEQ ID NO: 17791 - DNA, 4354 bp, Oryza sativa
aaaacagctgttcaaatatctgatggaagaagcaggtgagaggaacccattattgcaatcaacacaacaattcctggttcacatttcacaatcgactgtttgatgaaatcctgaattcgaccaatccaaatggagcaaaaggtaaatactaacatcaactgaattagaatgggaacgaagggtaagttgatccctatgtgaagatacatctacactactttctaaaatgttaatcaacgacacatgttgctccttgtccatcatgctgcatggctcgcaaacaaattttcaccatggcctccgcccaccgatacgcctggcaagttgcatgtccttttgcactgcagaacaaacgtttatttgttaaaccacacaatgacaacgctgataagctttacagggaatagcaagcagcatatttcacacctcaaaactcacaaaccaactaattctccctatgtttaatcaataatcatgataaatttaagagtatgaaaactagatatgacattaaatataaacacatgtattaagaatcatcctgcaattagaatgttattcctataaaaaaatagaatgcttttgaagtggatgcgtatatgatatcatgtaggctgtggcatatatgatatccatttagcataataatataaagggagaaaaagaaagagaaaagttcattcagaatgacaacttactgatggtaacacgcttagcatggatggcgcagagatttgacacttcaaatatgtccactaagtggtattctgctgcctgcaggagagggaaaaccactggaaatttgcaggacagcaagtaaataacataatttattttgtgagaattaagtcagctctttgttccttttcctggttatgcagaaacagacatggctggaaagaaggaactgaaattggtatactctatgatagcaatcttgaacagacacaacaaaatagggaggttgcatatttgtagtatataggtgttctactgaaaaaggataataatttagcaatctgactcataaatcaacacacagagatattcattttattgatcatggaagatttgtacatttttcagttacactcttgagccgtgacttgagtcttgaagcagaatggaatttaaacagtataattcagtctgacccttccctaactaagccatcagttgtaaacttataataaacaggtttgaccactgacctcttgcaatgcaaggagagcttcaagggtccaccgtgacacatcctttaatagaaatcagtgatctccctgacctgcaaattttatcggcacaaaaagcttccatcacacaagtttgcactacgaaatatttgatatagagagaaggcaggttcaggatgtacccaccagccgagaaaatggtgcaaacgggatcagcagttcggtggttttctgaaatttcctgatctcccgcagtgccactgtgcctggacggaagcggtgtggcttcctctgcttcgtttgctgcctaggcgtccctgcttcacacacatgttaaagttatttaatcacaggagaacaaaaggagagcaattccaaagccaagacttccatatggatacctatcatctaggtagaacagacgctatttgaaccatgacactaaagaaagtttactaaatcagttcccacgatgcaaagactaataatggatgagcataaaaatcacctatcaacatcgtgtctaaaaaccacacatttcttggctagcaatgcttaataccatgttttatggtcataatgtttcagataacccctccatggaccaaactggatttgctattatttcagaatgaaaacaagaaaagctttgactgatgagcaattgaagatctttctgcaactactgttcttataatatattcagaaaacaacgatgaggaaagtacagcacacggtaaaacagagcaagaaaagggacacattgagcccctcaggtcccccggaatccaagagacagaaaggaaaagctccaacgagcccatgaataaccctagaaacccccccaagagaacgcacctgaagccgatgttccagccgcgctcctctgcattccatcaaacaggtggtgagcaagccatccatccagccaagatacaaaacaaaaacatatccccccacaaaatcaaaaaatcaccaaacgaaagacccgctcccgcacgcaccgtggtcgccgaggtacccgtgccgcctgcaaaggggacaagcaagaggcgggaaggggggggggggggcataagcttcaccatccaccgccattgaaagaaaaaggaaaaaaaaaaagaaacgcagagggggagagagcgcgcgctcaccaccagcgcgctgcgccttcgacggccgaggggagcgttcgaactggagcttcttcttgggctccgccttcgacttcctcaccgccgggtgcttcgtgcgagccatctcggcgtcggcggcggcggcggcggcggcggcgacgtggcggtgggttttcaaactgaagcggcgtggaggcaaacgggagagggtttcttttggttttgggttggggatccctttttgcggttaggcccttggttttgttgttatttatgggtcagtctgtgtcagttgcgtttttcacatcccacaaggccacaacgccacgcgcgcgtatgtgtccaacggtcgagtgatcgagttatgtttcttgtttttttttccttttttgcgaaatggagttacgtttcttgaattctatcccagaatagtcatttcttgacattatttgacactgacaggactgaaactaacactatgcaaaatttaccaaaaagaaaaggatgtcaatgcaacggtcgaatgaaagattgaagaggaatgtttttttttccttcaaaacaggcactttcccctttgttttgcaggaataattaaacatgaatgcatggcaagctcggtgtagggatggacatggcctgacccacatttaatacctggaccactcaagttcaattaaatgaacaaaaattcacacgacatggtggatcaaggattatccactggttagttcatgccatcgaaataatactcgaccgacggaggaaagaccgcccacatgactttttattaagaagcaacctcaaccagatcggccaacgcgaaccttgacctccacatacggaactcacccctatggatcactaaaggtgagtttgacgataaggtgattgaggagattaggaagatacgcaaaaacgaggtgagccattggctcatgattaattgagcattaactattttaaagttcaaaaatgaattaatatgattttttaaagttcaccgtttagtagtttgggaagcatgcatgtgaaaaacgagatgtttttctctctcaatctcccagatctcccaggaacgaacaaagcctaactccttaaccgtgcttcgagatccctacccctacacaattatccaaaatccatgcaacatatttggcagtagctatccattttttctctttttttggaaatcaggtaaatatgttacccggcttgctattcaatttcacccagaatatagtgaaaatgtgaaatccgcaccgctcataattttttcggacgaggtgacaacagaacagctacagttttgctaccatttcagcagccgacacagatgaaaatttcagataaggcagccagccattcgctgcagaagtattagcagtacagatactagtatttttcctgaagaaatcgatcaatctgagaagcttctgctgctgctgctgctgctactgtgggcggagggaggagaggaggacgtcctggagggcgctgtccttgttcatggcggccttgaactcgtcgaaggtgaccttgccgtcgctgtcggcgtccatctggtcgaacacctcgtccagcttccccggctccgttatgtcgcctggcaggcactcctccggcaacgccttgtgaggatcaccaaagttcagatgaacagcagctcgtcagattttcaactcaaaacttgaaaagagacatgaacaagccatctcaagaagagcaaagatttggttttccttttttaggagttcttactcggagcattgatgccagctcttccttgctgatgcagcctgaccgatcagcgtcgtacatctgaaaagaaaaatgcagtttttttttgtgtgctcatgatcagatgctgaaatacctctcttgttatgaattttaattgaatttgaagttatgtatgatatgatatcatgcaatgtttctgatattcctgtacataaattggaagggctgccacttcagtttgagtcgagtgcatttggaaatttttacctggaagcacagggc

SEQ ID NO: 17792 - DNA, 1448 bp, Oryza sativa
atatgtgcaaatatactcctgcaaaattgggacttcttcagtgttggaaaaaaaaacatttgttttcagagaagacaaggatatatgactcccccttaaagcaactgtagtgttcctcaaattactaactgagaaatgctagtcccaaaattctagtaattacacaagaggttttaggctgatcaagtcatgatactcacattcgtccaaaatgaagccgcagattatccagctcctctgaggtaaggtcatgggttcctaaaagatttctcagccttttagtcctcaatgccactttgcagctcaaaacgctggctatcgcagctgcccgcaatttccttctagcattgaacttttgcagttttgagacgacctctgcatccatgagatcttgcttggcgcagtctccaatcacccaaggatgcctcagaagctggtttcaaatgacacatgatattcaaattaagaacagttatagtatcttagctaacatggtaatatgctgaaaagggagcatatgagacagacatcacttgctgttggccttttgtaaggttgaacagaaagaaggcgcgaaatcaaatctttcgcggatgaagatattgttttccatgtgtggtcctgaaaactgaattcaccctgaagaagcacacaaattatatgccattagagcaagttcctgattaatacaggcattttcgaataattggtgcctaacacaaggactacaaatcctcctcttatagtcatgttattcaaaggcactattgataatggaacccataattcttcagaaacaaacggcacagtttatttattttttcagtggtttactgaacaacatttgactagcccagtagccccatatccatactgactcagttcgtgtttttcattggaaaatgtacaatccaatccatgtgtcttttgtggaagagaacattcttttacaccttttcagtaaaatgtaaggtctagttagctactggccaactgctattgatttgacatctcagggcaactttttctactagaactggacaaaatataggacaatgcaggtataaactgaagtgctaacaactaccaaaagacgacatttcagcaatgattggcaggcagatctccaaactatgcaatgtcatttgctgcaaacccactgataaaaggctaacaacttcacactcatgctgaaattttagagtgaatcaaatgcccaacacataatttgggactggaaaaccgtatggccgactcacactcgaggtcagctacatgtaactctcaccaaaattccattttttgcaagaaaaacaccctcacattcacgggccagaattataataattctgcttcattagaaaatgcaaagatacttataaatcatcttgatcagaatacttataatgattctgcttccactaaaattgcccgaagtgtttaatagg

SEQ ID NO: 17793 - DNA, 3796 bp, Oryza sativa
attcctgcagccctattttcctctatggcaccctcagaagtactgaatatatttgcctctttccctgtttcaggtgactcggacatcatcaacacaacccctgcctcccagtgaagaagtttttacctatttagttgagatgtagggttcagacgtgcttacatggccaatggctgtttcttggttatctttagttgtgtaattttgctatgctgagttgggatctgccatacagataatactccatattgttgttaaggcatttctatggttttgtttgatgagatctctatttatatattgagcaagtttattctcctgctgttctgtgagcatcagcaaagagagcatcatccaagatgtttgcttccttgcttatgtggttcaaaagctagactatggttgttaactatctcgaagcttcgaatcacttgctttgttttttatccatggtgtgattcgctgattgccgttttggtttctgctcctggagaatctggaaacgtagtgtggcttccacgtttgcttgtcgatttgattatcgccgtttagcagctgctgttttgtttatgcttttctatattccgtgacgtaataatgcctatctcccagattgtaaggttcatccgtttgtgatacgagcgtacttaatgctaggagtacgtgtgtatttattaggttaatttaagtgagtttctatatattgttgtagtgttagaagtgcatctaacaaaactaattttgtgaaacattttttgtttgaacaaggcacgtgtttactgataagttgatgtgagcaggtcaacaccatctaattgggcacacagattagctatcacgggattagtaattttgtactactagtgtgccgtagttggtagtatcatgggctcatagtggtcttccctattaactaagggtctattcactttgctaccattttcaaccttaccaaattatagtattgtcaaattttagcaaggttgccaaaattttggcaaggttgtcaaattttgacaagattttatatgtgcttagtaaaatttaggaacaaactaaatgtagcaactttttttttaactttgccaaaacttgataagattgaaaatggtagcaaactgaacaagccataatcgtggaccaaagaaaggaaacaaatgttgaccatcacggaaggttctaggggccagcagaatccacacctggcacagtattatgccatttcattaacatggtttggttacctacaaaattcacattcccaaaaccaaaacataaatatagcacaaaaaattgacaaattttatggaatatatgaagtagagcaaccattatacgagtttaattgccataataatacgcaatacccaaatatagcggctccctaatctcctctcataattgccggtgcgtgatgcgggagttggttcgaccagcccaaccgcttcccacccgaacccgacctgccacgtcggaccaagtccaacgcatttccgccccctccacccaatcccgcgccgccacgtgtccccgagtgcgcgagaaatttgtcctaaatcccaccattaccgcggccgctttcacatctcctcctcctcgtaatcatcttctcttctctcttccccggcggcgacgcggcggcgccggtcaaaccactcctcgccggcgaggggagcgcggatcgggctcgggaggaggctaggggtttggctcgctcgctcgctttcggcgtgcagctgaggcggtggacttggcggctgtggcggaggtggggaggtggaggtggaggggagatggaggggttcctgcagaagctgaaggggctggacgcgtaccccaaggtgaacgaggacttctacaagcggacgctctccggcggcgtcgtcacggtcgtcgcctccgtcgtcatgctgctgctgttcgtctccgagacccgtaagtgtgtgtgcgcgaagcagccgccgccgcgcggatgttgtgtgctgttcgcgtactctcccatccgtggccgtaatggctcgatgtggtttggaattcgaggagttggttcttgccaacaagatcaaagtcggatttcgagttgtcgatggggatggggatttagagtaagatttgaattcaatgatgcggtgggcgtgttcctgctgctgctgcatgcttgaatgtttggaatatttccaggggcacctgaccgcgctcttggtaatttctagaagaaggtgcccttttaggtagacaggttttgcggtgtgtcagggtaacgaactaaagatgggcatgttgcgatgggcattgacgctaatggtgatgtatgctgcgcgcgatttttcttttctttttctttttccttttcgggtgtgagattcctgaaaagttcaagaatgcttttggctgagttcctgcgtctctgaggaagataaattagtttatttttttctgctattacttggatttatgtgctgctatcactgttggttcgtgaagggtaagtttttgtgttgttggctctgcatgttggatcatgcgtgcaaaattaggtcgtcacaaggattatgccgttttcaagttaccttttgagtaaagtctgttgttgcaaaggttctgttttatttggccagcatggccttacattactttggagtttggagaacaagaggttacaagttgtcgaatttttatgctctttttgtttggtgcaatttgttagtgtttatttttttaaaaaaattctggtagtgagaaggttctttcataaaatgtttttgcagggtcatatttttattcagcaacagagactaagctagtggttgacacatcaagaggggaaaggctacgagttaatgttagtatttatttgattgttaaactagattcatgtcatatgttgtacttctattgtttctagtataaaatgcatactcttttgtatgctattcacttacaatctgttgggaactaggtgtgaatatttcctgttaacttctaatgctaaaactgttttgcagtttgacgtaacttttccgagtgttccctgcacccttctcagtgttgataccatggatattagtggagagcagcatcatgacattgtacgcacttatgctatatcatcttctaattcttagtatgtgttgatttgtccatcttattattccattgtttgttgtagaggcatgatatagaaaagaggcgattagacgcacatggtaatgtcattgaggctagaaaagaaggcattggtggagcaaaggttggtgatcactgctttagttacactttgaggttgagctcattaataaactaagtgattccccgcgctttgctgcgggaattaccaaacaattctcaatatatatttttcgacaatcaagatagcagtaaaaaggaaaaaaataatgaaacatcagggtttatcggtacttatcatgaaacaaacaaatgatatccgcgctttaatgtgaaacatataacatattataaaaatgatagatagatttgttaaactattgtgcaaatgatgtgaggggtggtgattagatatgcttgcatgttgatttgtagaattaaataaattgcagatgatgttgtatgcttgcatgtcttaaatatgtaataattgctagtgggtgatgatgtgacattgttgcatgttgagctttagacttagtgagctataactttatagaaagtatagatttaaaatatcgaactagagtcgtctgtacaaattattcttggtgacctagtatatttccctacgatgtacagcattgtagttgttggaaaacaagtggaa

SEQ ID NO: 17794 - DNA, 1171 bp, Oryza sativa
tctttgtaccctcatgtcaaaacagatttcatgaacgtcagtgctcagtggacacaaccagcatcagatgggacataccaatacttcataaaagtgagctcttgttatccatgtttacgtgcttacatttgtatcagttgtttctgctacaaaccatcatttgaaaagaaacttactgggttttgcttaaccaggttgttcctacaatttacactgatctaagagggcgcaagattcattccaaccaagttagtgaagtttattgaatcatgtttatactttatattttttttccaagcctagtgatcttattgttacttgcattcacagttctcagtaacagagcattttagagatgggaatattcgccccaaaccccagcctggagtatttttcttctatgatttctcacccataaaggtagtaacaatggagagaaattcgtatgtagtcatgttcatttttctctttttatgattctatcttagcttgctctactcatcttctcaacctgtggatatgtgttgccaagctcatctgttgaatggctggctgtgttggtgtgaccattcttgctgcacatgcagaatgctccaaattcaccatctgttattattcagtactatttaattactttggacacaagagaagtctacaatacctttgtttcacctttatctattctgacactgcaggaccaaactggaatttgtaggctttaggtcatggagagtttctaaagttagttattatactagtcagtagctaaaagaatcagttcattgatgagatatatctgttaggagtatcctagcataaaatttggtattatccttttattatttttattatttgctgaatggctccaaaaatgtctgcatatgcatcgtaacactttgaatacaaaattgacagtgcatgtctatactcattcaaaagcctctagtggtggtggcagggaatttgccaccccactattgctttttgcagtttttacaaattgtcccctgatatttttctaatattgtggaatagttcaatatttggttcaaacaagtgaatagcagataatgaaataaacaaacaattgatactaagatatttgataaaatatatatttttcttacatattatgatattgtttttcttctgcccatagcaaagcttgggc

SEQ ID NO: 17795 - DNA, 1834 bp, Oryza sativa
cctaagttgacgtcttctgaagccttcttgtaagaactgccagttcctttttttttttttgtgtgtgtgtgtgtgtttctagtttacaagaacctatcatggcccaaatctcatggagataggactggatctatatcttgcccttaacatcaaggattaatcctgaactgtaatttttaacaaggcggtaagatagataaaaatattagagaatatctgcccatgtagccaaaagagataagattggcactaagtatagtgctaatccactggcaaagtcaacttcagaaaagaaacctcacaaatgtaacaggaatcagcatatattaaagtattaaacacaccaaaatgaacacgcaaatcaaaaatataatggcagctgatatcctgcagaaattgtcagcatcagattggtcgttttcatttcacaatcccaaaatgaatgtcatgtacatggaagaagaatctggccgtctctttttcaaggctaacagcaacctccgtgtatggaaacttcttccaaccattttcctggcagcgcaagaataagttgtaaatgaattagtttattttatccataaagtggtaagaacatatatgcggagcattttgagtgcaatgcaacatctctgtctcaacatgcagatccaagaggataaacacaagactcattggcaagaggacactgagaaaaaatggatatctcatatgtatagtatttattgatgttataatagttaagaattgccatttcaggcatcatccttcgcagaaataaaataaagactagtgagtcatagagggacaaaaagagcaaacaatcagcttgcatgatgttagttgcataaaatcatgacatggcattgggagagcaatgagaaagatacactaacttgatatgatttccatataaccaacagaatgtcaccactgtacagagagctaatacaacagagagcaaagcacaacctattacatagaccagaagttaaaagtaactagatgactgcctggaccaacaagctaggtacccagtaacagcacaagatatctagaagccattcatctccagaaggtaagttcgcctcttcatcagcgccttcacagcaaacttgaatggtccatcaaatgctccggagacaaatgcatccgtttccttgcggctagtatgaccgccattgcttccctcgggtgagggcttgatagcgaccaacgttgcaccttgcaacgcaatgccgccaggaagctcaagatatggagcgtatttgagcttcatgttgcatgctggaacctgagtcctgttagaacatgctgaggccgacaactggttctccctaaattccttaagctgctccgctcccatggacaatgtgccctggccatcagcatcggtcagtaccaagcttgtaaagtgggatgatccttgataattgaccgaagaagataatgtctcgttgatgccgcaatcagagagctgattgtccacacgacgcggagtttcaaccctccattggtatagaaggattccggcatgcttccattgtcctccgaatacagctcatgctctgcaccaacaggcttgcggtcgacctgagtacccccaagaatcacacaattctgaagcgtactcccatactccgctcgccatttcaggagaactccctcctcagtccccacatcccccgagggcagctccacccgcagattccggatgtgcgtgaagttccggagcacctgcgccggcgagtgctgcgcgagctgcgggaacagcggccgcccagcaccgttcgggccgcgcatgctgtggaacggcttgatgatcgtgaacagcatc

SEQ ID NO: 17796 - DNA, 4440 bp, Oryza sativa
gccattggaaaccacccgaaatggagaaatggatcaaacgccctccccccctcccccccgcgcgaggttgcagagaaatggagcactaatctttgcaacagaaatgccacgaacagaagctgctgctcctcctcgaccttgtcctctccgaatggctcacgcaaccatctgaaacagaacaagaataagcacaccggattaggcgaaaaagatgggagagaattgaatgccgcgcagcatgcataaaaaaaaagaaaagaaaaactcgaaagaaactcaaatcaagaaaccgagaagacgacgaatccaaagagagaacctacctcagacaccgcgccaccaccaaatcaaccgcgagggccaacctttcgccgcccacacgcgtccggatccgacgccgacgagcaaccgtacggtaccgaaatcgcgaaatcgggagaagggtcgcgccgttttctcaccggaatcgagagtccccccctccacgcgcagctcctctccgaccagccggagatgccgaaagagcttcgatcttggaggccggtgggggcgaatcggacgggattagggtttagggagaggggaattggggatgagatgttcttgttcttgcctctccttttctttcgttttcgcgaagaagaagaagagagtttccctgggcgaagtgcttctctttcttctctttttttttttttctcgtcacaccactcgacgcggctctcctttaatatcgtctcgccgccgttaaggtgacggcctccggcgccgtcagttccacgtcagcagtagatgcgaacaagcgttcagtaaatttttcacttaactgcacgttcaccaccatacatgcaacatcctactctcgggacccgaataaatcacagaaataaaaaaaccgaagaagcatgaaaaatatagaattatgttaggaatgcctctttaaaacatatgattgtaaaacaaaagaaaacacaaaaaatgaccgtataaaagacacatgaattttaaggagagacagagactcaaataaaacttttcatgaggttttccctcatgttaaatttcctctaaaagttacatggaatgagacatattctataagaattttatggggttcatttatttgtttcaaatggctatatgggaaaaaaatcctatagaaatacaattcctacatatttccattaggtctccgtctcatacgctcagcccacgaaaaagcacacccacatatgaataatgttcgttgatatcagaatttgaaatcgagtcatgtatccaggacatcaccgttacaccactgatgttttatcactaaatatttatatattgttagcctcatcgtttgtcatatgctaatcatttgtcatatgccggttataacctgtaattgcttattaaaaaatgtgggtaaattttttatatatactatttaaaagttaatgaaaaaaataaattatgataaaataatatccaaaatcaacttaaaactaaaaattaaatttaaagtttaaattttaatagcggtttataagctaaaagacgaactatggagttaggtatgttgttaacaacaaacgagcaactaagatttctattattttccttaaaaagtattattatttcaccctcttcagtaactactttttattatttaaccctgatttttccagtgtgtggctgtgagctttcaccgtttgagagcagcttcagtgctggtgtgtttggatcccagccattgaatgccatagctacagtattttcgccacgctatagtgttttacgaaacgtccgccacactcctgtggcgagccacgccgtggcgtggcattccaagccaccaaccaagcatctctcaacatgattactgcgtaatctgatttttgccaactaaccgccacgtcattgagattgagaacgaaatgtgtacagatgagttaatttggatgaagtggcaaaaggaaggtgacatggcaggcagcatcggcttgattaatcactataaaagggacatgatgttcttagttgttaaggcaattaatttattcacgttggataagatagaaccaccggtccatcaatattggtcacaaatagatacggtatccttgatcagtttatatctcaaatagtttttttttaacaactcacacgaaacggtgcgaagttctattcatagagtagaaaaaaatacaagattacaaccctagaaagtcgtaaccaaaaaaataaaaaaattataccaccacccacatactaactgcgccaaacacagacccaggagaagtctagcaccggaccggccaccactcagcgtgaccgaccgtcgctaggccaacaatggaacacatccgagatcgcccaaaaacatgacccttacaaccaacgcaaagcccgactctacccacatcttcaggatttagggagagggggtgagagagaagatggaacacctctccccctagacccttcgacatggccaacttgtagaaactaggccacctccacaagagaatgagaatctagagcgtgcttgcaccaaaagctcgggtggtttcggcaaggggatgcctagacgacgtctccaaggagaggagcgacggaacaccgccgccgccgtccgtcaaggactcaagagagccgatactaggctttcgctcagcaaccgcccttgaggggtaagatggcactacaacaccctcaagaggggaaatgacactcgagcgtcatcgttatcggtctggccaaggccgggctgggttttcactggccatccaccacctaccaatataccacagatgcaccattgctccactgccaactaaacctccgccgccgcgtgggcacaccgcaccagtgccccccgccggccagtctccacatgcagctacctcactgggctccacctccattggcttcgcctcccgttgcgcatccatcgtgcgccagccgtccttgacgccgccggccacactgcaaggctaccggccgcaacactctaccggcattggccagccacagcccccggccctcgtcgttgccctctgccgcaggcgcggcctcctgcccctccaccgccgtcacggcctccgcacctccatctccagcacctccgcgctgtcgcgcccgccgctgctagccgcaccctccgtcaccgacgccctgttaacagtgaaatttggtaagcccaaatttaccatcggcttagagtcagtatcggcttcaaagttttagaatcagccgatgggagtcaagtcgccgcgatgtcgtgttcttggtggagtcggatcaatcaaatgaatcttatccagaagagaccgagttcaaagagaatgcacatggcaagttatctattaattatgaatagtttgttagtttccttttatctttagaaaagtgtgtttagtgtcctataaggactttatcttttccttctatctttaagaaagttgctttcttgtctgacaaggacttgtatcaacccataggtataaatatgtacacccggggtctatgtaatctatcctcacgatcaatacaattcggtgcatcgccaccttttaccttttctactttattttatcgaccggcaggacttggcacctgacgtggggctacatcgttgttcgatctccggcgaagggataagtccaatgttccgtcggcccaggcaattgtctcatctacatcggcgtcgttcaaggctgcatcagtatattcgacctcttggattgctctggtttggatgatatatttgcctacctatttatcatatgtctatgttaatctagtcttagcatatcaatttagctctatcggctgcttctcgttttagggtttctgccggtatcggctaaatcgcgttgctatattagattagcttagacatctaccacactgaaaactcaatcaacggcttgattgtctagatattatttttcttttcatacttagtgttgcatcagttaagtttgatctactaagtcgtgtttagaactataatctatagcctgcttcttgattgccaataagggtttcatcggggtttcagccggtgagttatctggacgttgcatcggctcataaggattgcatatacatataagttggatttagccgatgacaacaaaggtttcactgtttaatctaatcttgtggatttcatgacatcggacctccagccgatgtgtgctttaaccttcagatcgatgcttatttatcatatcattgctagccgattggtttctactggattatatttctatattatatcatcataagccagttgcctttatatcattatctacattggacatatagccgattgcttaaaccttatcgctatcggatggtatcagcatcggctattatcggctatcggctggaactactccgttggcttgtcagccgatctgctgcttcgatctagctatttgcata

SEQ ID NO: 17797 - DNA, 1561 bp, Oryza sativa
ttgatgagatgcggacgtgccagtcagtttgatcctgcaactgacaagatatgcaaatagtagatcaaaacatccgatcggctgacatgccgatggagtagttccagccgatagctactaatagccgatgccgatactagccgatagcgatatggtttaagcaatcggctatatgtccaatgtagataatgatataaaggcaatcggctgatgatgatgtaataaaataataatataatccagtataaaccaatcggctagcattgatatgataaaaaagcactaatccgatagttaaagcatacatcggctggaggtctgatgtcatgaaatccacaagattagattaaacagtgaaacatttgttgtcatcggctaaatccaacttatatgtatatgcaatccttatgagccgatgcaacgtccagataactcaccagctgaaacccttattggcagtcaaagagcaggctagagattatggttctaagcacgacttggtatatcaaacttaactgatgcagcactaagtatgaaaagaaacataatatctagacaatcaagccattgactgagttttcagggtggtagatgtctaagctaatctaatctagcaacgtgatttagccgataccggcagaaaccctaaaacgagaagcagccgatagagctaaattgatatgctaagactagattaacagagacatatgataaataggtaggcaaatatatcatccaaatcagagcaatccaacaggttgaatgccctgatgcagccttgaacaacgccgacgtagacgatacaattgcctggaccgacggaacattggacttaccccttcgccggagatcgaacaccgatttagccccgcgtcaggtgccaagtcccgccggtcgataaaataaagtagaaaaggtaaaaggtggcgatgcgccgaattgtattgatcgtgaggatagattacatagaccccgggtgtacatatttatacccatgggttgatacaagtccttgtcggacaagaaagaaactttcttaaagatagaaggaaaagataaagtccttataggacactaaacacactttcctaaagataaaagaaaactaacaaactattcctcattaatagataacttgccatgctgcattctctttgaactcagtctcttctggataagattcctctgattgatccgactccaccaagaacacgacatcgcggcaacttgactcccatcggctgattctaaaactttgaagtcgatactgactctaagccgatagtaattttgggcttaccaaatttcactgttaatagagcgtcggtgacggagggtgcggctagcagtcgtcgtttggctccaccaccaccagatccggccgccatggcatcggtgccgccgttgccgtcgccgtcccacaacagacactgacatccttcccgccggcgccgagcgtcgccggatgcctccccgccagatccggcgcagatctggtggcctcgtcctccgcagcgcctctaaacttcgtcaccaccctcgccaaacgccactgctcgaa

SEQ ID NO: 17798 - DNA, 680 bp, Oryza sativa
gcggcattaggcaatggcgatggcgatggcggcgaggatgatgacgatttgttccaagtgaagccgaagggtggagatggtggtaacaaggaggatgatgacgaggagaagaaggagactgagcagatactgattgatattttcggcaaagacgaggagctggacgagaacagcaagttcctgaagaaattcttcctcgagaggccgtatctcgagacgggcagcgagaagaaatactctccggatgatatccaggaggtatcggacgaagaggagcatctcatagagcaggaggattatgagaccaggtataacttccggcatgaggaagcagccgcgactggtgcggatgtaatggacagggtgatggggcattcgcggtttgtcgaggggtctgtgaggaagaaggagagcagcaggaagcagcagcgcaagaacaaggaggagcggatagcacgggccaagcaggagcaggcagaggagttgaagcatttgaagaacttgaagaagaaagagatcgccgagaagcttgagaggatccggatgattgccggaattgatagcgatgcagcttgcaagctcggagccgatgacttggaggaggattttgatcctgaggagtatgacaggaaaatgaaggagacattcaatgacaattactatgaagcagatgatgttga

SEQ ID NO: 17799 - DNA, 7954 bp, Oryza sativa
attacctctataaaataagagattggtattaaaaatcaaattaccatgctaatctcgccatcagttccctcattcaaacttccaaccctcttccctcaggtttccaaacaagctaagagaggaatgtgcatatttaaaactcatatgagaacccccattaaatacttcatgtagggagttttttttcctctatagacgatttgacactcatatgtctaagacatgtatgacccacatgtaaacgagccattgggtagaacaacttgaaattgccacctgaaagagtgacaaatgctcgtgcttcagcctccccaatttccacaagagatcttgcttaatctgtgccccgtctgtgcatcaccataatccgtcgatgaactggccgcctcccaccatgcaccgataagtcctgcatcgtgattatttatgtcctttttgcattctctcttttctttttctctccctaggtttgatttaatacttggtcgatcgttttaattctctgatttctctttgttggatttgttctagttgtgttttgtcgttctgtcctgatctaacttcttggctctaagtagatttaggccgctgagtgaaaacaaattcccctatagatttaatgatctttttgtaattaatagtagccatatatctcctctagtcgatggtttcatggagaaagatttggtcttggtggtgcacgaaagaggcttgatctaggaagaaaggcgtcttctcagccatggattttctcctccttactcctgatagaaaagatattaacattccccttatagaacttagaaatatcaagatatcatttccttgatttttgattttgctaggtagataggttaaaccaggattttgaaaattcaacggtaactgttcgtttatcatggttattaaactaagtgttcaaagtcatgatgttgcttatgttgagggggtgctgccatttgagacataatcggtagcatgcagacctctaattaagtcaatggtaagtaggccagagcatgccaatcatgcctatggtagcataggggttagagtagattgcaatctaaaatataccttggtcacaagagaacattcatcactactaactactaacatgttaaatagagcattatccacaattgatctagattgcacacaaacacaacattgaacacaaaaaaaagcacaaagaaagaactcacaaacaaatagaacattgtcacacctcctttcttatcgccaccgtgtcaacttccctccgatcaccaggcgcggtcatatcgacctccctccctggccgacaccacgtcctcttttgaaatccgtcgccaccactttatgccttcttcctatacaattgctaatgttcttgaagaggttatatttaaaagagagcctcacatttatttaaaagcgctagttgatacgtcacacattgctgaagggcattgtggttattaaaaaaattgcaaaactttgtggttacaaacagatttggagaaattaaaacaccaaaaatagatgtgcaaaaataatcattgtgcttttcaagcccatcaaacgattagtggcctaatcatacgattagaaagttctcatgccaaatgtaatatgggtgtatagctcatcaaaagatcgagatggctcaaatcagataaaggatatcgatctaacgtgacccatatttatggattatgtggtctcatgtatcatcaactttcgataagtggttgcctcttattggttgtaattatatagataaatagatttgctatgctacttgctatagaaaatcagtcgaggagaaacttctcttttttgatagttgggtttacttgaagattcgtgtgtgggagtttcatttttacacacatttctttgtttgatagtagagaggagaattatatggagtatggatgggaattgaattctaagtgatgatgtacgactcagatttatctcctcatacttagaaggggattccctcccaattacctgcgcctacccagatattgaaaatgtgggagttcgctcttaaactctgcttcccaatctcttataaaactccaacgatttatcaacgaaacaatagacttaacagtccccacccctcaaactcacattccaatgtaactatttcccccaaccaaatgcgtcgtaagcgttgtgcgggaggctggactcgaatccgtgacacgtaatgtgcctttcacgtgccccaccattgagttataatctaatcacgtataatacttttgagttgtattgtaattacactattttcattatataacagtagttatatctaaaaacttttagagaagttctccaaaaaaaataatgtgtttttaacacaagagtctttgcagtttgtatgtgaggtttcaatagaagaatgaaaagaaaatgtctttcacacatatatgtgccagacggacggggtcatcttcctgagctagtcaaacccgtccacccgccgcccgccgcacgccggcgaaaaccagtcgcgcgcccgcatgggcggcagcgctgcggcggcgccgccggtgcccggaggtggctggaggaagccggcgtcgccttcgacggatccgaccgccgcgccttcaacgcgatgcccctcgccggcgcgcgcgtctccctcgcagaggccggccgcgccgtttgctcgctccgcgtgaccgtctagctcacggtacgcgccgcatcccatctccaccccacggcgccgcggtctgcttccgccgcgcgccgccgacgcgcgtccctccgctctcgccggcgttttcttgatttgatttgatttggttttgattttgacatcggcgcggcggcggcaggacgcggaggggaactggcacccgggggcgatcgcggcggcggcggacgacgtgtgcgcagcggcgatcatgtcggtggagggcatcatcaaggtctccgtccactacgacatctcctacttctcgccggccaagctccatgtccgtaaaccaacctactccccccattgccatttttttcctagcaatttcttgtcccaagacgccaatagaggagaaaaaaaaaataatagaacagaacagaacagcgaatagtttaggttagcacgacacaacacgatcacaatcaatcgatcaatggttgactcttcgtatttcttttttcaagcactacaaaaagtaacaagtaaattagattatcggcttggtcatgctggaacaagtatgattatattctgaataataagatttatagtttgcctttgtgttaaggaacctacattaacaggaaagctgattttttttagcgccaagaatttcgttttataactatctttatttaatgcacacacaaaaaaaactattttatttacatacaatgtgcaatactgcaatgtaaagcatagttgtgcttctctggagacttttatgaacaattacttcttggactagttaggcaagctctttcatgatcaagaattgaagattgcaaggttatcattcatttctgtcaattcaacttgggttgcttggttgtttctagtacaagcccctctaagccttttttagctaagatgcaccagaatcagaattcccagaagcaaccatgatacggtgatactgtagtagtcaaaacagcaaaatttgattcagtggcaccgaaagatcagcagttcaatttatagataaaactatattctgattatgtattctaagtttatagacctgaattcaagtcgtgtaaagataagttgttatctttcagtgtcaatgaaaccagatttttccaaaaagtttagtccggaacattttcggttgcagcacattgtgctttaagaacatattctagctagagcccaaaccaggcatctcctgtgtccagacgcttctctgttacgatccaatttgtactcgtcaaattaattccactgaagaaagtacttttcgaatcatgctcgctgctattctcattttcggaaacttcaacagagcaacatcattccattagcttctgaaaggttgaacaaaccttgaaaaagagactgaattgtgactgaggcctggtttagttcctaactttttcttcaaacttccaatttttccatcacatcaaaactttcctacacacacaaacttctaacttttccgtcacatcgttccaacttcaatcaaactttctattttagcatgaactaaacacagcctgatgcaaaacctccctgaactctgtactgcaggaggaagttgagctggacggcagggtggtggagcagaaagggaagatgacggcggtgacggtggagatccggaagaaggattccggcgagctggtggcgatcggccggcagtggatgtcgaccaccaggccaaagaaggatcaagctagcagcaagctgtgactctgaaccaggtatgcctacctagctcccaatggagttcttcagttcatctattgctcaccttagcaaccatcgaggtgattgtaacttttgtgtgttgcaagaaaaatctctctcattttttgtatcctgaaacatactgaattttaacttaattgaaagggtatagagaactagagagatccatgttgccaatgtgaattgtccaaaaaaaataagattctttctgtgattgtgaaaggggacagctggacaggttctatgttctaaaagcctcaaccactaactttaaaaacatctaaattactcctggactcctcgtcgtcgtgaaaggacgacggcaacgtgatcataaataaatttaaaattgcaatcgatattagcaaaatcctatcctatctgaaagggaagccatcgtgcaaaatacacgaagcttctcatcatggaggagatgaagaagagctttgctcggagagtgagccagtgaggcagtcaagctagcattagcaagggcggcgacatggacggcgagtcgccggcggcggcggcggcggcgctgcggctggccgccgtggcgaggaggtggctggagaacccccgggactcgctggcgaggagcagagaggaaggctgcggcgacgcgttcaacacggtggtgatgcccgggttccgcgtctccctcgccgagcccggccgcctcgtctgctccttctgcgtccccgccgccgtcgccgtacgtgcgtcctccttcctttcccggcggccatgtcggtcgccacgccgtgttcgttcgcactccgattcggtctcacctgcttgttcttggtttctgctgctgcggcggtggcggcggcggcgcaggacgcggacgggaggtggcacgccggggcgatggcggcggcggtggacaacctgtgcgcggcggtggtgtacacggcggacggcgtgcacaggttcaccatcagccaggccatgtccttcttctccccggccgcgcacggcgtacggttcctccatggatcatcatcttcatcttgctctcttctcctgtgaatcgggcagccgccattaacccgctcttctccggcgaatgatgattgcgcgcgcaggaggaggtggagatggatgggagggtggcgcaccggaaggggaagctgacgccgccgtggtggaggtgcggaggaaggcgtccggcgagctggtggcgatagggaggcagtggatgacctctactcgggcgaggccggagaagaatggcgagagcaggagcaaactctgaaacgaaaatttcctctaaaaatcgctttctcttcttttctgatttcatcatctcaacacctaaagaaaactgttgtaaattctcaagatagtgataatggcgtccattcgaaagtgccagtaacagtaagtaaactgttgtaaattctcaagatggtataaaagctcttttcttctattaatatcaagtaggagtatatgaatacaaagccagccacttcttttttctgtttttgctagggaagaaatgagtaattcagtatggacatgatcaatatgtacacattgcaggtcatgcaaaagcgtgccaacaaaattaaatcaaattacaagcatatcatctctatcttctcactttattcaccacaaggaatacccccaacttaattattccttaatctccctccaatgtccattaatctgaacaatccttttttgtccaaaataatctcaacaatccttttctccacaataatctcaacaatccgatcaagtcaatccccaagcctgcaaaaccaagacaagcccaatgtgagtaccacaaacaaatctcatcattctcaaccagctctgctctctacaattccttaaccaagaaacagaagaagaaaaaaaaatgcattttcttttccaaacctgaattctgccgtccgatgtcccgacgacgatgacatcgccgtcggcgtcgacggccatgcactggacccggccgctgccgccgccgccgccggcctggagagcgccgatcctggtcagcttctccctcgaccagatctccacgacgccattcctggagccgaggtacaccaggtccgagctcaccaccagcgacctcacctccaccgacgacggtatcgtcccgaccaggctgtagttcgagctgctccatatctgcacccagaaaaaagagaacaaaattcacatcctatttcatcatcaccacatgcctagaccagaaaccacactaatacatcgactgtgtgcatgaatttcacagggtacagttcagttctgattgaaatttcgtcaaactttgctgtgtttcaaacggagcctcgacatatttcatagttttggtcttctataggaatgacattttttttcggagagtttcaagtcgaaattgctatatttagcgcagttgtgttctcagcacgtactttcagataagaggaattttaaagttcttgaaaaagtaccttgaggtacctaaattttacactaaaaattttggtaccttgaaataattagtatctagatgtatcaaattttacagaagaaaacatagtacctctaggatggtaaaattactcttcacataaatgtttccagagttgaaagttgtatgatagagtcgactgttttgtatgaagtacacattttcagttgagagttatatgatttgagttcgaactttggcatgtttcaaactgtcaaaactttatcaagctttccgagtttttcatttttgcttttttattggtaccttgactgatgcgccgtcgagcgaggtgctgccggtgtagaggaggtcgccgtgaagatgcagagagtagatcgggctggccttgccgatgatcctcttgctcccttgctggatcacgccgatcgtcccgctcgccaggtcgatctcctgcacgccgccgtcgttgcagccgcagaagagcttcccgtgcaccagcgccatggatctcaccaccttgctcgcgttcaggaccttggcgccgccaccattgttccagcttagcacctgcaaaacacagaccaagttaggtggccatccatggaagcgcctcgccggatgatgtgatcggcgatcgatcaccttgacgccggagccctgcggcgcgaagcaggccatggcggcggcgacggcgaggctctgaaccgggtccttggcgtcgtggacctcgacgcaccggagggcgtctcggagctgccacacctggtgatcaggtgttcagcagagatgaacatgttaaatttctgaaattttgtgcgatcttttttgtttcatgattttgccaagaaaatttagacatactctgatagttctatccagtgatccactgaacagtttctcctctgagtgtagcactgctaagctggtgattgctttcgtgtgttcttgggattcatggactaggcgaaggatattctcacttccctcccagacctgaacatttaaattccacagatttctaaaactgaaactacaatgttatgatctcaggaaaaaaatttcggaattttgaaagagagaattaaaccttt

SEQ ID NO: 17800 - DNA, 4141 bp, Oryza sativa
gaatttcagattcgctgcaagaacagctgagaaaaatgcaattacaatgctggattcttgtccatctgacagcagcttgagcatctcgaacgcgaggccggacgatttcttcagctccctgagcgtcctgagcacgtccttgatgtacgtcgtgatctcgtgcatcccctctgaaatttcacaatgttaggataaaaatgttcagagattctttctttctgaaccaaaaaataacaaaaaattcagagttctctctctctctctctctctctctcttctgaaattcttgtggcaagattggtaatggacggtgtgaccaaccgcgatcgttcatgaagctcctgagggccaccatggcgagggccctgtcgctgccgtgcttgcctgaccggaggacgagcacgagctgccggagcaggcacaccctggcggcgccgagcacgccggtgtcggggaggagggggagcatgcggaccagccatgccgccgacacgaggctcgccgtgaacagctcgccgttcttggccgccgcgaggcaccccgacagcgcctcgaacaccagcccgaactcatggctgaccagcgcgtacgccgccttcctctcccactccgccgccgccttctcttcctcctacaaaaaaaaaaaaaaacatcgcaagtgaactcgatgtatgaaatccagcaggtttttttatagagaaaacttctgaaaattggcaatgtaaagtacggtgatatctatcagttcaccaaaaattaagttcaaattcgacctgctcatcgtgaaaaaaaagagacaaattcacatgtaaacaatatactattattcacactgaatttgtatttttttttatatctcgacgtgtgagttgagtttggacctaaaattttatagacatgttgcatgagtgttttcaaattttttaaagaatttttcataaccataagatggtttttaagcgaactgaggagacattcccctttagtgaccaaaatagtttcccaatactaccatttcgtcctcgccggcgccgcgagaaatgctgagatcgtgcgacggccggtgcctctctttcaccctggcaagcttaagcagcgatgagcgtgagagtggccggcccgacgaggagaacttgccggagagattcatgatagtctcggcggcgagcagctggcttctcgggtaatccgagttcttgaggcactggatgaggctgtccactgcttcctccctgtacatgctgatcttcctcggctccacctgacaaaccatttgcgcattgatctcgccatcaaacatgagattttttttgacaaatctgaagaaatgttgcgagaaaaagttgtttttactaggagatctagctgaagaagtagccctgcaacgacagggctctgctccggtgtcgtggattgcaggtacacgagaagcgtgtgcatcatgctgaaggagctcgcctccttgatcgtccgaagaagacgatcagcagctgatcgcctgaaaaataagttgagattttgttttagatgtggataattttgtcattcttaagaggatatctgaagataccatatatttttgaatgtaaagtttactacctctaggtggtgttcatcaaaccgttttgaatgtggttaccaccactccacagaaaaggcggttatcgaggtaactgtacggttaccgcgaggtttaccgtgatttaaaaactgagaatgttatcacacatgataattgtgtgatgatcgtacggttttgtaaaccctgcctctaagtagtagggtactcgagattttttttttaaggaccgtaaaatggaggagctttggggttaccgtttgagcttgagcagttcggagaggagccgcacgatgtcgaacttgtcggcgtcgccgacgacgtggaacgcgtcgaggacggcggcgagggccgagttctcgacgatgctgctccggcaatggccgtcctcggcgacgcaccgcagtaggatcctcacggcggcgaccctctcctccacctgctcggcttccaagctcgccgccacgctcctgatgaacctctcggagaccagggcggacttggccaccgccggcgacgagctgtcccggccgccttcgacgaggatctgactcaggaggatcaccgacgcggccttcggcttgacgcacatcttgaccaccgcgccgccgtcgtgtcgccgccgcctcgccggatggtggcgaccagcgcgtcggccatgtccatctcgacaagctgctccggcgagggggagaggaggtggatgagcgagacggcctcgacgaggcccttcttgaagagcgcgacgaggcagtccacgtcggagtccaccctcgtcagcgtctgcacgacggcgtcgtcgcgggaggcgagctcggcgaggaggaagacggccacctggagcacctgcgcgctcacggagttgaagaggatctccacgaagccgttgacgacggcgggcttggcgagcgcggcgaggacgacgtgctcggcaccggcggcctcgcgccatagccgctcgatccggagcaccgacctctccgagtcggcgagctcctccgacgtgcagaggcaggacaccgcggcgcggagctcgccgactgcgctgtcgagggacgcctgcgcgatgacgctggtcggcgacggcgcgctggcctggctcacggtggcgtccggcgacggcgagctgatcttgaacggggccgcggcggcggggctatccatcgtcgtcgtcgccggcggcggcggcgtgggcgcggaggaggaggcggcggggttctggtcgcgccaggcggcgatgaggcgcttgaggacgtagttggtgctggggaggtgggcgccgtggaggcggtggcgcgtgatggggcaggtggcgttgccgcggtcgagccactcctggatggcgcggcgctcgtacgtctgcccggtctcgagcgtgacggggtcgtcgaacacctggctcgtgatcgggcacacgaagtccttgggcgtcgccaccaccggccgccgcgccacgtcgccgccgccgtcgccgcccatcacagaactgcattaagaataatccgccgccgccgcggcgtcgccatcatcacatcgggaacggtgttgctttggaggcgagcgcgaggacgccagctagcttacctcgcgtgctccggagagagcatggcggcgacgtcgtcgtcgtcgtcttcctcgccgcgtggacgcgctctgcctgcaagccgtgacagctgcgaggccgtgtgcttttcctaagagacgagacagcaacattgaaacctcatctatgatctgttcaactctgtattttaaaacaacgctatttgtttatgaaaacatcgcctggatcttctctaattaacaaatggagtgagatatgatgctaatcttagctttcttagcgtcctagattacatattaaacgagttgcaccaagactaattcagagcactgacctctctgccggcgaggagctcggaggaggagggggagtcctccatgctgacgtcggaagaaggcgtcgccggcgagtgcccggcgcgcagcctcgccaccgggcttcctctgccggtcggcgacggcgacgactgctgctgctgcactatgaggtgcggcggcacgcgctgcgggtacaggctcggcggccgcatcagctccctccaccccttgccgctgccctgccgcgggtacaggtcggccgcctcgtcggcgtccgcccagatcggctgcaaaagatcaccggaacatgacgtcaccatggtgtcgacaccgtcgagccgagcacgctgatgggataggtttgtgttcgtagcattacgttgtaccgtacgtcgttctgcgagctgacggtctcgtcggtctccgccgtggtctcgtcgtcgacgtcgccgtcctggtcgtcgtctccgacgccgaatacaagctctggaggcggtggcggcggggagtacgtctccttcgccgcgtcgccggtttcaaggatcttctttaggtagagcgcgtacgctatgcagttcgcgtcgagcaccttctcgtactcgcgctccaggtccctcatctcctgcgcgtgggggcctctcatcaaggagagaaccctcatcgccgacatcgcggcggtct

SEQ ID NO: 17801 - DNA, 3716 bp, Oryza sativa
gcggcggagagcaggtgtcgccggaggagcgggtcggcgatgagctccgcgaggaacgccgctgtgtgcgccaccaccgacgagtacgtcggcgtcggccccgccatgtctgacgagcacttcacacacaaacccatgggaaggttttgtctcgagggtcgtggaggcgaggtgacgcgcaaagactgaactgccccctcgagctccgagtagtcatgcctactcgagcaggggtaggaccgggatttcgtctccttggggtttaaattatggcgggagaggagaccggggcggcagcggccggcagcgcggccgcctgacgcgtggagggagacggtcgccgccgcgtcggaaaggaacgtttcggagggtctcgccgtggctgtttcatggaagtcaatatatgactctatagctatcttacaagttggaagatttattaatccagaggattatgttatgttaatcacatggttttcgaaattaagaaatgaagttttaagttgtctactattattagagtcgatatgactatgtgtgatatttccatggggggtaggtttcaaattaacgctgtaattgtcacccgaaacattagggatggccggatgagaacatgccaaatggagacaagagagacatcacatcacaaaatcagcgctagcgagagttggttgggatataattgatgcggaaaccagttaattaattatcatcttgttatgcaatcttagttcaaagatctttgtaatccagcttaatttaattatactaacttcgctattttttttaaagatcatccatcttattaaaaaaatacgtaaatgtcatttactttgttgccttattttatcatattaaacgtttttaatcataacttatattttatatatttacactaatattttttaaataacacaaatatcaaatatcatgttcaaaaaatcatatatatagcaccatacatttaaaagcagatagagtaattgtcacacttgtacatcggtaatttttttttaattaggtgttatttgtttgtggactatctatatatctatcaatatttttttcttaaatataaatttattataatttagtgtaattacataactacaaacaatataatttgtacatatagcttttagagacacttcaagggaggccgtgggattgaatcccctcatttgtatgtctatgctatgaatttttttccttccttgcttggacgaatctcggaacaaatctaacattccaaaattatgtgaaagttatacatagttatacaaaatctttttagcaaatcctattttttatttggcaaattaaatcgtttgtttgatgtgaggatgcatgcatgggttcttgaaaccaaccagggtgggtgacagccaaaatttttctctggaaacataattcaataatgtgaaagacgtagtactgcattccaagctgaaaatttcaaagtacaaatgagcaaattaatcacggcgacgaggccacgtaaacgtgggcacggtcaattatttctctgcaactagagcacttaacaacggtacggttacaagttgggtttaatttgcaaatcggttgatcatgtcgtcgaagttgcatgcagcagtggctcgatcacatgtccgccgccacggcgtcgtgcgcggcgccgccgtcggcgaggagcgggacgaagttgagcatgacgtcgacggcgttctgggcggcgatggcgaggaactcgccggcctcgttgccgagcgaggagccgccgccagcgaggtcggagagggagcggatggtgaggaacgggacggcgtgctggtgcgccacgagcgccacggcggcgctctccatctccaccggcgtgcacccgaacttggcccgcaggaactgacggtaggcggcgttgtcgaggaacacgttggcgctgcaccccctcctcaccctcgtcaccctcggcgcccgcggcaggcacgtcgtcgcgttcacgcacgccggcagctccatcccctgcaccaccaccaccgcgcgtgtgtcagacaaccaaccgatttttttttgaacttttttaatttttaattttaaaaataatttttttcaaaataaacttattttcagattttgaaccttctgaccacaccagcctgtctggctgaccagggttcaatctttagttttcgaacatatttaatcaaatttgaagaaaatatttccaaatttaaaaaatgaaaaaaaaatcggttgaaataatatcatatcaaaaaccgacggaaccgaaatttcattacggaattttgaaccctgaacataacaaaacaacattaatgcatgacagttttgtctaacgctggtcacgctagccagaccgatgagctcgtcgagctcagtatatgtatgtgtgtaccaaaatttcgttacacaattttgaaccatgggcgttacaaaacaacattaatgcacaccacacacaatgagagcgtgacagttttgtcttgccacacgcgatcaaataacgctggtcacgccagccaggccggtgatctcgttgagctcagtatatgtgtgtacctctagcttctcagcgagggagaagtagcgggagctgacggggacccagaaggcgtgttggcgctgctccggcttgccggagacggggaagatctcctcgggctggaaccagatgctgttgagctcgttgggggaggggccggcggcggtgtagtcggagaagttgaggaagccgaggtcgcgggtgtagtcgccggcggcctcgagcggcagctcgttctccgggccgtcgccgtagcgctgccagttccagagggagaggtgcgcccagtgctccgggatggtgacgtcgccgatctggaggccctcgtcggcgttgcgggcgatgccccagtgcacgatgcccttcaccctgaacaggctcagcagcagctgggtcgtcagcccagcattcagctgcatgatgcataatttgcagattaattaattattcgattagggaaaccgatcgattaataattaatactttctaacgtaaatcattctagcattgtttatattcatctagattacatctacaacagttttagttgagctacttttgataggtagtagcataattgcagtcatgtgtgtatagtagtacgtaccatgctaagccctgtcatgaccatgacaacgttttggcccccaatggcaccgaagcgaaaccttcgtccttaattaattacaaggaaaaatgaatcattagtgtgtgtgtgttaattaacgttttggtcgtgttaatcagttttcttcttgggtaaacgttcgctcgtccatttcaatttctgatcacagtatcaaacattcactattcaggtagcacatctctttctcgccatatgtacgtgagcttaattaagtcacacatatatcttgatcattaattatccgctgatagtgtgatgccactttcaggttattatattatcgcatgcacgctgtaattagcttcacgcatgcatgcatcgtccttaactaactgtccaattaatttactgatgaagaggctatagctgcatgaaattagcatatgcagtaagggcacccacaatggtaaagtaaggtgctctctataaaacatgtacatcttagcaatagactagctagattaatagtaaaccacctcaatagtatgtctatatgggtatttatagctctctaatccattg

SEQ ID NO: 17802 - DNA, 957 bp, Oryza sativa
tacccggctgataatctcaacctccgcctgaaattcacgctctccctgcccactcccatctctcaattgcttcacagcaacctctgtcccattcggcagaactcctttgtgaacatacccaaaaccgccctgtccgagcagattagcatcggagaatccatcggtcgccgctgacaagtcctcataagtgaaagtacaccttgaaaaacccaatgcagcaccaggtgacactagaggttggctgttgtcgccaccggagtaatttgagccagaaccaccactgtgtacatttagtggagcaggaggtggtggaggggaaggatgcgaaggcaccttcttcagcacatgatcaggtggaggtggaggaccattttgctgccaattttggtacaccccaccatagtgatcccctgcagctcagcaagaattgtactgaaaagaccgccgatcatagttaatattccaaatagattttctcaatgcagaatgatatgagaaggatatgattgattgcacatttgtttttgtttctttttagatgattgctcacagattaaatatatgtaaagaaacatattcaactctgtgatggttaactcaaagaatgaaaaagtaagaaaatgacatgctttttgtttgccaaatgatttggcttaaaagtaaggtaacctcaggactacatgaccatgtcaggtcttgtcactttctttccagaattaaccttttgtgttatctcaacacaagtgatgaactgataatccacaacaccactactccatccatggtaaacttagcacaatccacaccaaaacctacatcctgtgtttttttgcctaacgatatgttcttccatcccataacaaacaagaataagtccttcaaaatttttcaataaatccaaaaaaaacatttaccatgacagcaatttagcaaaattttcagttgatagcaacgtct

SEQ ID NO: 17803 - DNA, 8203 bp, Oryza sativa
gacatcgccaccactcactcactcactcacgcactaccaccaccaccaccaccacaacaacaacaacaacaaaaagaacgagtcgaagactaccacgccacgagcaagatgagagcaagaacaaagcggagccaagaaaagagcaggcaagagctttttctccctcgcggcggtggtgatggtggtggtggggaattggagcggattgcgacctgaggggggcgagaactactactaccaccaccacccacaccgtccccagtggagtctactggcgacgcgacgtgggggagaagaagaagagagagagaggagggaataaaagcgcggggaatcgagcgggtcgaagggaggacgagccggggaggggaagaagaacacggcgagaatttctattatttttttgaaatttcttttattttaaaagcaagcatttctaaaaacttatttttaaaatgtggatcttttaatcatgtggttgaatggctaaataatactccctccggttttatagttcttgatgttttagataagattgtagtcaaatttttataactttcaatatcaatgactttaaaattatttaatttaaaagaatcaaaattatatatatatatatatatatatatattcgtctttcaaagttatataataaaaataagaatgcatttatttgttgtatatattatacagtaatagaaaacacaaagtcaaaatatatttcgaaaaccgtgtctttaatttggttgtactgcgttctgctacattaatttggttggcgtggcagaaacggatattgaaaagtattggaaaggtttatttttaaaattattaaaacgttcaaaagaaaaggaataagaaaaaaattcacacggcgacacctcctcctacccgcgcttttcggcgaagcaacccgttcctcctggggcccatctgtcagtgaagggggtgctgtcgagtgggaccgggttgtcaggctcacgcttgcttctctctcacggcgtgattatggcgggggcgttacgcgcgacggtgacttgggtgagggtggcgttactgcgaggtgggtcccacgcgtcagtgaaaggagggttactcctgctgctgtgtcctttttcgcggcgacacttgtcgtgtgagctaagggagaaggtgacgtgtcatgactcatactatgagagtactatatataattattattggatgagagagttgccatgtcaaatgtacgggtgaaaactgaagagtggcaattcttttccaaatgagttgacaaatttgatcgataaaagcaggcaaactaggggaaatatgcggtggtttcaaggaaaaattagcggtatatatatgcatttaagggcccgtttgatttgtagaaaaagtgtaggaacaatcctatagaaaaatttctatgaaagtttttgaaataaaggattgaatcatattatatcctttaaaattcttatggaatgggtaatcctatagagattttgaagagaaattagcaagaggtccaacctcttgaaaaaattcctttgagtctatctctctcatccgattcctgcgattttcctgtggtccaatcaaacggtcattcttatgtttttcctgtattttccaatcctctattttacacctgcattcctgttagaatcttgtgttttttctattcccccgtttttccatttctacaattcagaggagcactagatgatcacattaatatatatatgtaggaccacctagcgtagtgaaattaattgctactgatgggttgggtacgtaggataattcatcaattaccccgtctatactttttttctattataagatgaactttttttggctaataactattttactaaataaaaatatattagtagtacttttaagtacagatctaatggtattaaatttgtcccactgattatatcctaataggaaaatggttggtcatgttataacgaagcaaaatatgctttatttttcttaacagatgggataactaagcttgcaaatacctgggaaatggtgattcaagcaataggcacattattttttctattttttactgtggcatgtcgattttttaaaatacataattttgaattaaaatactcatgttgttctgggttgtcctaatatttgactatcaatttcgataaattattatagttccatacaatgagattccaaactcttagagattcaccataacaaatattctctctgtttcaaaataagtttattttttacatatctcacacataccaataaagaactagaatacccctgctttataaaatctcaatgcaactatttcttactaacttcaatataatgattacttaaaaaagaacttattttggaatggagaaataagtttcgtaatataacccacgtgttattaagctatacagatttttttaaattaatggtacatgtttcataatttaaaataaaggtagtattttgttagcgtggtttactctaggcctcacgtgtatcgcgggtacgcggtttgtgattatatggtctgatgtacagtcacaatatagattctgtgaccaccacaacctgacaaaccatcaacctatgtgtgcacatagtatacaagtgtcagcaccaaagatgatctacgcaacaagcctatggcagctagctagcaaggttaaatttggagtgttgtttgatatgacgtagacatggttaatgaagctatgattgatcttaatatgtggttgatacagctacgagcctatgatgggagtttgaagcatgattggttgatatttgctttatttgatctcttattctttaatcaattacttactatagctaacagtcttattcaagctagctagaatcggtgcgtatgcaagcaaagttaatcattaattgcatttgtcttctgtacaccgtttctgtggctgtgtttacttgcatgtcttataagattgacagcaggtaggagtagcaaatatatggaacaactgaaagtcagcaccaaattaatgacgttttgtgttgcaaattaaatcccgttgggaggttttatgcataaatgtgtgtcctgcaggctactggtagagtgctagtcgatgccctcgttttccacatttgattttggcagaaatactatgatcaattgattagatagttactgcgaaattgaaactaagggtatgtttgccacggctccagctccaactttatctcttctagagttgaaactcagacaaacagtttcaacttcatctaaataagaatggatatagctgaagcgctttcacaaaataaattagagatgtggagctgggtttaagatgctccacaatttaactctaaacctaacttatgaagttaatttaggagttcgagctctaccaacgagccctaaaagaatggcatgatcggtagcccaacgtattgaccaaaccgtttagcatacaaaactcgtgaacattgtcactgtctttggtttatatataagttgcccaaatttgctacatttattatgtctaaactcgagttggttaggttatcataatcagcatgacacggtgccagcgagatgaaaatctcgcagcaccattacacattaatgacacgtgggacctagatagtaaaaaaagtaatattttcatcgcggttgtggctacaaaccaaatgtatgtctaactcaaaggaattcgatcatgataaccaaaatctctattaattgagttaaccacattgcctgcatcatagtccttccaaatattttgttcattgtaatgattggaaatgtttggcaatcatcaactatttttttttcttttagaaagatcatcttatctgagcaattcatcatgcatgtaggacacaaaggtaacatgcaggaatctcagcactcatagcacgtgaattctgatggccaagcacagttctaaatttctaatggtttgagtctcctaagacaatataatcaaaccacggtaacatttcatcaagaatttacattctattgtccacaaattattcatgtctgaatttctctgaaaaatacagttagcatatcagtaaaaattattgaaatttaatttgcttcagccaccgtaggccccattgcagcattattacgccaattctgatctgtagggtacatttccctcatgacctctgctccaggccattgattttttttttcagcagcatagtccaaggacagcacatgcttcttctcctttaagagagggacggaaggtacctacctattgaaatgaaaagcagaggatgcatatctatatacatgattatggattagtttagttagttactccaatagtttctgcgtcaaaccataggttgtctatctccccaattgttattttaattattgtcaacaaacggattttttttatgtgcacaaattttccagaacataccacgaactatatatatcaatgattatatgtagtataattgtctataccttcaatttccttttctttaaaaaaaatataatcatataacccaatgcgttatgttccacgcatggtcaaatttccctgggaagaaagaaagacatattacatcgacctttttataccaaaaacatgacatcaaatcttgcaaagcaatagctcggtgcaaactctacacaagatcacacaacattacgccaaaaataaaaaggttgcagattcgacagtggccgttgctttcgatccttctgcccccaacatgctcacagcatcacatgtgtgtgtgactttgcactggccatgcacgcatgcacacatcgcgcaatatcaaaaatatgccatttcatttcatgcaggatgcaatatatcatctccacgcaagggtggattagcatgggcgcaatgaggactcgaacctccgctacttacgtgagtactattggagccctcataaaggtcactgttcttttctccaactagagttggatgtattaacgtatgattgattaagattttcatgtcacgtttttcaaactactaaacggtatgttttgtgtgaaaactttctatatgaaagttgctctaaaatatcatattaatctatttttaagtttataatagttaaaactcaatcaatcatacgttaataccacctcgttttatgtaaaaaacttaatcatcatcatcatcttcagaagaaaagaacaccaccaaagcccccacaaatttttttttgccacatgtagataggagagggctgtaactttgttctaagttgttcagacccacctattattttttttcttgaatatgccactgtctccactccacgcgtgcgttgtgttgtgtatattctgattcatgcacatcgccttcagctatagacaagccccatatgaacatcttttgatcgttttggaatttggataaacattccaaaggctaaacctcgatcatgtcctcatatgataacggccaccaattaaatatgagatatgaatatgaatatgatgcggtgacgcaccgggccggataacttagcctaatccccctttgtgatactagttcaaatcagtgacttaattagtgtgggattcgtcttgtcgtggaatagattgtacaactactctgcctagctctatccattttatttctgttgctttaagattttaaaatgggttaattttgtccttgcctccttggtggtaagttggcaacttcaaccttttcagaactccagttccgatataaattgaactgattcttgtaaaattcatataaaattcagtaatctcttttgtttggaggaaacctagtgtgtggatgtacgattccgctttgtgcatattaattatgcatgagagtctcagatggttgtatcatcttgatataattgattgagttcaataaaccttttattatttaaaaaatataaaaaaggaaaccaattccaataaaaattgaaccgattattgtaacattcccgtgtattgaaggaggcacggttggatagtaaagctagattgagagatctaaccgtgtccatgtgcgacaaaccatttctccatgaggacaagcaaaattattctccaataattcttttgccttgagggctccacagaccacttacataaaatacatgactacatgaattcctccatggctccatcctgcatgcaaagccatccacaaaaaaggagccctctcccagcacaagtggatcggacggttgagttcaatcttggagagcactcacaccgtctagtcgcgtcaagaaaccaaaaaaatcattgacctcaaggcacatcagccactgttcaggatgaacaccacgccacattggaataatctgtactggtctggcagtggcatgtatgtacatgatgatggcaatattgaagactagaaagaaaaaggccaagaagtggctttgctaggtgaattaagggtgtgtttggttcctaaccatactttgttgtcatttatcaataaatattgtcacacggtctaagttgaggcgattaaattattggccacaccttagtaagtctaagagaatcttgttacatttttctaagtcaatgacacgtgagactcagtttattagaaaagaatcttgtcatagctatggctacaacaaacagctgctaatgggattaaatctatctaatcttagatgtagtaaacagcagtgtggctcgcaaccaaacaccctctaaacattgacatgcaaaacaaacgccgccgtggctgctgctggtagcaagctgcaatcagaggtccaagaggagtactactgtaccagccatgttcactgcccggccagggcagtcaacttgtctgtagttggttaatccaatcaaagtagcagcagatttagtgagatttcaatcagctaagcaattgcaagtaaatgcgtgttagtaaggcaaagtttgcatgcatattttattttaaccccagtgcttaagctgatggaaaattaaagggcatatatggatagatcagttcaacctaaaactatcccctaaaaaaaaagttcaacctaaaacttgactagtagagaagaacgggcaatgcacttaggggcagagctaggtaggagagaggggtgcccagaaacctggccaagaaaatttttttagctatagtttttctatttttactatatatgtacctccttaatccaaactcaaatactcatattagcttaaacttgatttaaagtagagtaaagcaagtgaatggtacatctctctatttcgttttagctccgcccctaaattgtcttatactcccaacgaacaatgcagaagagacaggattggtgacattggggcctcggactcaagaaggaagcttccaccctccaactaatggaaggtgccattgctcagcagaaaaaaagggagaaatcgacacccaacttcggaagtgcacgctgctatcaactctcggaaagaagcctcacgtcgtctccagcttgtagttcagaaaagttgccaacgcatgctccggctcggctgctcatcagcgtgtgcactctccactcaccatcagatatttttcatgaaaaaagcactagcctgtattttacttttggaagaaaagaaagccccttgctcacaatggctcgcacacagaaatccgtacattgtttgtacgaggtgaagtgaacgtcctgcttccccatcaagaagaatcatcactctgcaaggctgcaggtgcaacaaactgcataaatgatagtagtagtataccttaatgcaacttctgaatctcccctgttgtgatcaagaattcaaatggacaaaaacacaggattactgtcttactgatagctttgcttttagctttgaagaagctttccttgtgatatataacagactgatgagtcatatatatacatagcagatgctggcttgattactctcacttactttcagttctattggtggttgcaacatacggtgcaaccgtgcaactggaagcgacgaccagagaattacagtcatcaaaactacattactacatgcatgtacagcagataacattgtccatcgaatctgttcgtgctcagtttagctcagatacacgtttttacaagtcagcttacaaacagtggaatgcccacacaacaaatgctatttacccatttttactgagcacatggttagcttgaccttaaatggtgagtggcagctgatgcttctcaccgttgggcgtatgtacgcagt

SEQ ID NO: 17804 - DNA, 964 bp, Oryza sativa
gcctgtatagatggccatgtgggccgcccggcacggcacggcccaggcccggccgtgcctgggccgaggcttgtcgggccggcacggcccgaccaacgcaccgggccgtccgtgccagcccacgtgccgcactcacagcccaggcacggcccaacacgcctcgggccgtgccgggccgacccgaaggcacgatgggccatcgtgcttttcctcagaataagtctaaattttctccctcctattgggctgtgacattgtatagctaaaaaaagtctattttacctccctcttctttgtgctgtggtatataaatagctaaaataagtctatttaaggttcctattctttagacattgacatttatatgtctatttttagtccctatactttgtgtaccgggcctggcctgccagcccatcgtgccgggccggcccgaccgtgccgggccagcccagcgtgctggtggggaggcccaggcacggcccgacagtcgggccgggccggcacgggcccgacccaagtcgggccgtgccgtgcttgggccgggccaaaaaggcgtgccgtgggccgggccttcgggcctcgggccttatggccaactatagcggccggcgcggcggcggcggctgcggtgggcggccgctcggcggtgaccggcgcggcggtggccggccggcgcggaggggaggaggggaggcggcagtggccgccggccagatttttttttctttttttcttttgagatgtgaatctgtgatgtatttttatgtgagatgtgaatctgtgatgaattttttagaaccctgtgatgtgatttttttaagagtttgtgtgtatttggagatgatttgtttgaggatttggagatgttctgtaatatgtgatgatttggatatgggaggggatggtgtgaaattaatattcaatattaaaagcagaaaaaaaaagaaagggctgcaggaat

SEQ ID NO: 17805 - DNA, 15794 bp, Oryza sativa
gatatatcattgtcgatgaaaaagtggttactaataggcttcattgatgtcgtagagggacacgatgtgggtgtgggagggggggggacgaggtggtggcaacaataagtaaatctagaggataggtgttccattagaggttgaactagggtataggtaggaggaaggctttcacctttgtatgagatccaatagcctaaatttgacgggattttgattgaaaaataagcgcctatcaaatacaattcatttttaaatcttttaagtttgtttaaaactcttttctgagtgtttttttcactctataatgatgatttctatttttaactcaaatttctgtaagtgcaccggtgtagaatcgaactaacataaaagagtgggacctagacccatggttcttaaattttggttttgttaggtacctcacggcgtatacaacgtttttatgtaggggccaacatataggtattaaaaatcaatctttttcttctaatgtctcttccatttcccttttttatctttcttctcatgtacattgataagcaatgccaaagtgagtgagtagcctgatgacggtgatgtgaagatatgatttaatggaagccaccttgatctagaagtggggaactctgatcttgtgatggatacacgatctagtgtgcaaagatttggttaattgagtagtaaatgagctccattccggcaacatcaacattcatctagtggctttgaactccaatttgacaacatgacatagccttcttgtcatgtgctgccacctctttccctcgaggtggggactcatgcgtgagcttccctaaggtggtcgcgcttcgatgagtgggctccttcctattggtggtgggtgccaacttatgcatcggttacttgactccttcttgctagtaacaattatgattttgtacgctagcgactcggactagtttagctagctttgttggttcaaaccaaagaatcttgatgttttgtttacttgctccatgctcaaatcgaacgaaatcctcacctctatctctcttggtttgattttatcggcacaagccacacataaatatcctaaggggtggacctagaccctaaacaacttaggccatagcacaagcctcagaagtgaaggcctataaatccaccatgtgaaaatttgacgtgagctaaaataaaatgtgccgatggatccatacgtgaggattgaaagcccactatgtaaggcatatttttatcatgtaaattcaagcacgaagcaaagtgcaataggttgtccccgagccttaggctaatgccatgttagtccttgggctgacccacgagcctcactaaattaatgccagatgtttttttataatggattaaaactcggccttctatatcatgtgcggatatacacggctaacctacacagaatatatcattgatttaaatttcaacagaataaatacttttgtagtgaagagtccaacaacacggcatcatccccatcccaatgagggagaatatgcagtgaaaaacatatacatatacatacatacatacatacatacatatatattggaaatatgaaaaataccgtaggatgaaaaatggacatatgagatttatccacgtaagcacgagtaaaacttttactctcataaccatgagtaaaagtgtaacggggagtaaatattttcctaacaataacggagacaaatatgtaccagacgtctatttttacgtgctaaaatagttttcatatattttttttacactacatattttcttcgcgcaattaccatcaccatgtgcaggaagcatcagcggcacaggaacctcagaagatccgacaaaacgacgtgcaacccagggatctgatctccattgccatgccatgtcatgccaaatgcccgagtgcgccggttgcgacacgggcactcgcaaccatccatcgctccgcttctttctactgtgtgtctgtactcttgtgtgttccagtggtaaggcatcccacctaaaatttttcatcctgtcacatcaaacgtttgaacacctatataaaatattaaatataggctaaaaatatataattacatagattgcgaataatttacgagacgaatcttttaagcctaatatctccatgatttgataattaatataatgctacagtaaacatttgctaatgagggattaattaggtttaataaattcatctcgtagtttactgatggattgtgtaattagttttttattagtgcctgaaccctatacaacatataatataatagccgatgtaacacgttaaaactttaggccactggatttaaagcccgtgcagcgtcccaaagctaaagacaaagcttaagctcagtgtcagtgtcacagtgtcagacacgacgagacgacacgacgacgccccacgtgcaaaccgcagtgcttggcaccatcattaacacgccatacttaacgctgattgcacttattaattctgtagccacgagatgatgatggcaagttcaaacggagctggaggcagagctagagtgagactgtgagagtgaacaagagataagctaagctagtacagcaaccagcaagaacaaagaagagtggccggagtgggcgggggagatgagctcggcggcggcggcgacgaggttcatcaagtgcgtcaccgtgggggacggcgcggtggggaagacgtgcatgctcatctgctacacctgcaacaagttccccaccgttgagtgccgcgccgccgctaatcccttcctctccgttcttgctccggcccgccgtgctggcctatcttctcttcggctcgatttggtttggtttggtttgatttgattcggtttggtttgggcaggattacatccccaccgtgttcgacaacttcagcgccaatgtctccgtggacgggagcgtcgtcaacctcggcctctgggacactgcaggtggggaaagctagctcaagctcaccctcaatctcaatctcaagctggggcttgcaaatcttgttctcctctttgattttattttctcaagtgttgctgctcacttgtgctcagctcagagaaagatctgatttagtgattttgattctcgttttggttggggactgttggttgcaggtcaggaggattacagcaggttgaggcctctgagctacaggggagccgatgtgttcatcctgtccttctccctgataagcagggcgagctatgagaatgttcagaagaaggtgaactgcttagaaaccccttgtcattctgatgcaattttttacttggttggatatgttactttccttcgcattgcgctagtagaatcgctatggtttcctgatgcattgcattggcaagattgtagatatgtagttcagaaatacgcactgtttcaggtattcaggtgggcattatgctgaggaggtatcatgtcaaacaaacatggaagaatattaaaagcattgaacaatttgtcgtgtgtaataataacgctttctaaaagcgtgattcgtacaattgctttcctcgaaaagaacaaggccagttgagccgtggagacttagactttgctcgtcacgcttttcttttgcagctgtttgtgcattatatgcaaggttataatataaagccgaagatgaaattgcgagcaaaggagataatttctgttaatgccgaattaattaccagttgacaaaattgttaggagttgtggctcacttttgatttacttcgataatggtaaaacgcctccggttgtttgctctataatagcttcctaatgtaaataagatatcaacacgaagcttactacctagagacaagaaagcccatttacatgtacaccacattgcatcatgctttgtctcattacctttagaatctctaaagtgtgtactaatgacctgacttcatctggacagtggatgccagagcttcgccggtttgcgcctggtgttcctgtagttcttgttggaaccaagttgggtatgctatgctattcattaattcaccctttaccttctgaaatttcttaattttttgaacgccattcaaccccacgaagatatttgatacagtaaccacagcccagtgacattctttgctgatgctgcattaccgatttcctgtctgttcagatctccgtgaagatagggcctatcttgctgatcatccagcttcttccataataacaacggagcaggttggtgttttgactgtgacaagagaatgacacatttttgccacatttaggttagccaggtttcacatttttaggtcacagtttggttcatgccaaagttgtggctcaacacactttctgagcaccttgtcacacttgtcacacacaatttttccaaatacttgtggcacttgatttgttagccatgctttgtgtgtgttgcccacactttcggaagaaaactgtggcaagatgtggcacacatcctcaacaatgagactttcctgactctttctacatgttagggagaagaactgaggaagctaataggagcggtcgcctacatcgaatgcagctccaagacacagagagtatgcttctgttataccctatgcaggaaaactttggaattttgagctccttcatatttaatcatttactcacatcctaatctaaagaaatgttctttttcttggttacttgtagaacattaaagctgttttcgacactgccatcaaagtggtgcttcaacctccaagacataaggatgtaaccagaaagaaactccaatcaagctccaatcggccagtaaggtacctttgaagtttacactgtctgctcacacttcatcagtcatcacttcatcagtggtgcatcatcttttccagttcagcattttgatttccaatgaggcctttgacacttgatcatgattctgtaggcggtacttttgcggaagcgcttgtttcgcgtagtcaataaccaagaagaaaaaaatgtggtttttgttccatcaccatgatgttcagatggccccatggatctactcagaatgggatagaagatcatggttgaatcaacattgcttgcagctaggaggaacttctagttctctttttttctgcagtggagctccttttgtttctcctttctctttttttcttatgttgtaaaagctccagaaagttttacccttggtaataagatgtgctcttctggatggctacctttacccgtatctcctttcactttgcgaaatgttggaaactactggacctaacagacctaacagacaaacaaaaaagaagccacatgcttcaaccttttcttatatactttggattgaatacataggaagttaattacatcatggtatcaccaatttatcatccatgttaccattaggccaagcaattgaagcaatgaaacaacacgtggctgaaaaaggagaatgcaagtctcctatacatgaatggattacaagaaacaatcaaaacaaagaaacaagaagcatatatacccagcttcttcagatcacacagacatccagaaaaatggcacggcaaaaaagtactgtaaattctccggtgttgacttcaagagtaaggtaacacatcaatctagaagtttacaacacattgataacgagagctagtcgtttcaaccttaacaccgacaaaaccatttctcgccgtcagtcacacacagctcacaacactataaacctccttatggtaattacaaaatgggggagacattttttcaacaaggttacacatttctccttgtacaaacaagcgcactagtatgagtacaactacaaagtaacaggaggacgtttcttggactggcaaaacaaaaaccggatgctgcaccttgcaaagcccttgttcactgtctggcaggttcccatccagaaaatggggcatccacaacttacaagaagcctgcaagaaccatccttgctaacataagtaatcattcttttttcttaaactgataaacttgcaagaagaaaaagttcaacttaccttacagcagatccagcaaagccctcctcttacagtatgactatttggcgccataaagatgaaatgtatgattgtaaatgttcaggaattatgcacaccactttctgcttcagcggtaatccatatactcgttatcgttactgattgtagtaaaatcagctgggttcttgttagttatacagatatcctgtctcacaaaccgatccaagggatgaaccattttacccttgcctctggtccaagattgagctatgctgttcctcgctgataaaaaatctgcactggagctaacagaacccaactgcaatgcattccattttgctgaaaacattccagaattcagggcttcaaaatgttcctttctgttcatctgatgcgatgttattcctgttgacactcctaacttataaccagattgtgtgccacagttctccgaccagtttgcaatttccttctgcagcaaggagccaagcacaccaactctaggatgtgggcgtaaaggtctgtgcagatcatgcagctgatgccgtgataagtcttcgaatgtcaatggaatctttccattcaggttactgccatatgatgtgctggttgatcctttgtactgattatgtgcatactgagaattatgaagttgagactccatctggttcctgctagaagttccatagttggggaagcttgctaatgttgatggatccatcattctcagaagatgcgtcgcaggcatggattctttaggatacaagactacttgtccagcatttctccgatcacataacttactcgcttccatggttgctattgtgcttggaaaatttcttgcatggacctggttaaccgctctttcagcatagcggtccagtggcgcaattactggttggcgagatgcataattgctggaagatcccatgacatgagtagaagtcaagtcaactgcttggataccaggtctaaattgagcaccacatgttgctgctggagaatttcttgtagtggccttaaattgctcccacgttagcttctttgcgtcttacggccccaatgttcagttggtgcttcagcaatatactgatcatcatgatgtgaaaatagtggtgagcttgcagcaatagtgaccatttcttccatccgcaaatgtgtctgctgttcctgagtagactgaaagttctgaggatgtggagactcttgtgtggtcaatgccaaatgaccctgtaactccttctgtgtactttgggatgccaaggacttctgttgggaattagtgtcaaacacacttgatgcataatctgaaccatccttggcagctactattacacaatcatcatcagcagttgtcttggattgaatacggttgatgtcagaacaatcagtctcagtcataagctgcctctcatgctggtttttagctagcagttcaacaatatccatggggatgtcatctatcatggtctgtttttcacgagtcacttcaagtttttgcttctttttcttcttgggtagactctgctcatgaaggtcagacataatttggatatcatgctcagctggagaaacctgagatgagaaatgaggaaaatgtcagtccattacaatcactataatatgagtctaaaaaagaatattgcgccacgcacgtgcacacacacgcgcgcacacacacacacacacacacatgcacacatgcacgcacacacaaaaagagtatcaaaacataagtaaagaagaacagtggaaagcatataaataaacattgtatgcatatttcttaacattgttatgcaccaatattattccttcatacagataaatgttgattcagtcaatttaaaaagcaaaaattcctcatgattcacaaaattcgtacctttgccgagtgactcagaacagagttttcggtttccatctggcattgatcttctgcgctgagtacatgtatgttctgaccatttctggtgctttcaccaccatatttggtactagcagctgaatgtgttttccccttactcaaacccgctgttttcccctttgatgagcacctctgtgtggagatttctgatacatgctgacagacatctgtcttatgcatatttgtgtcaagaccattttcagtatcattctcatcatcatgctgagtactcgcagtgggtgtcacttttttgttgctcaaattcccagctggatgagcaactgtgtgatgcacacttccagttcttttcttttttccattcagccagttcataagtgatgatccatcatctacaacatcagagtatttgcgttttgtcttgttcttacttgattttaacccatcttctcccactgtatggttgctaacaggaatatccatgcttacttccatcgggaccgggatggtacttctatcatcctcacagggatcagcggcattttcacgatgaacttcgtcacttctagaatcctcaacctggttagcatttataatttctgatagaagccgcaccttttttggctttctccgacaaagctttgcatctgaaacatcagcctgggcagtgcgtttcttgctgtgctgctgcttcttcatcaacttcttatccgtcttcctcttagatttggagcttcttttgagaacaacttcttcacatggctcattgcagatctgctcacatttctgcccagacactggtttcggatctttggtcaaattgcactgctcagcaacctgatcacgttcctttccagacattgggttaggatctttggtcaaattgcactgctcagcaacaagagtctcttcagtttttccattttcatcttcatttcttttgaggaccacttcagaaagttttggagtggatggaggttgatctgcaccatttacttctatgtgccatgtaatctggggaacttcaggtaaagccccaacatcaacagaagtgttgtcctcagagacatttgctgccacatcataattttgggctggcccttgcaaatctgagaaaatcacacaaacattagtttattctataccttaaataaaatcctacttaggaatttgaaaggctctacatctaccatacctttcattggtgaatcagtattggcctcagcagctccattcttgccagaaggcgcattgcatttggagtcattgccttcttgcacactctttggaagagttgatctatcagcattcttcccttgagatgattgtgtgctaggagacactttttgggaaccaacactagcaggcacaaaagtgctccgaacaaatgtgatggagcaaccatcacttgtgccattctgctttgcgggaagagttcttggtgctgttccattatctgaagttttcaacttatccaagcacttcgagcaatcccatcgtcgaaactttgctacagaaaatgggcttgaactagctttgtgttcatcacattttttctggtcatggaaaatccgagatagagagcagaattttggatccttcttctgaagaagagcaacataccctctggtacaagaaaaataagattatcattataaagatgcatggcacatatatatagcacattgcgtgcttcagtcaatatacaactgataaactcagaaaaggccctacataatctaaaggatgctgggaggtaggcatttcatacatagcttgtacagtccagaaaaagaggaccttcaagataatctaagtattgcagtttgaattcaaagataatacaaatagcatgacaggataaactacaaaaataataatctaattagttctagaaagtattaaaccaaaacgtgacaagtctatggttgatatatatcatctctagaatctctaaacaattgaaaaggcttaaaataataatggactatcaaatcaaacataatgcaaatatgaagaaaccatcagttctaagaatctcctaggatgtaaacatgcttatgataaaaaagttttatgctgaacctcagcacaaaggaaaaatgattacaaaaatgtagggcccaatatatgagtgtaccccaaaaaggttaatttcattagtaatcagcttgttcaacagaaataatatacaaacacaaatatctagctacagcctacagcatggcctgaataaatgcatgcgcaccccaacacaaacaaatatgatcaaacacctaatgaacacacatacagacatgcatatgtgtagcactcacaatcatgtgctcagattcatacattgaagatattaatggatgtacgtagagtataaagatacatgaaacaccaacatatatgcaaatattatatatattttttgctgctagcctgctagctgtgctatggcataaatgagttcacatggctagatatagagctagtagtggatgtattgacttcctaaatcgaaccaaagtcataagcatgtcgacccagtgtatacgatcgtacaaaacagatgaccatataagtcccaacagcaaactgtgcaaaaaccacgatcaatcatactcttccatcaaacagtgcaatatggcatgacatgccgattcattattcatccacaacgcgatactggaattggaaatacagaaaatgattaccttatggagaaatgctcgcattggtgttgtgccggttcgtctacaccagcttcagcggctgcatcctgacgaggcgtcgctgtcagctccaacactggcgctacagcaccagttccaccacgagcaagcatacagttcgtcccaacaacacgagctccctcctgatctactgcaacaatctccatatcgatcaccacgacgaggagagaatcaacacacagctagcacagccgaggcacaactcaatatcaatccagcagtgatcttgtaacgccgcgaattagcacatcaacaatccaagcacaaaccacaaaccacaaaccacaaaacacgagctctggatatatcacagaagacaatcaatcagctagccgctgcacacgctagaacaacctgaaacagaaaccagaagaaacaaattaatgaagtagtaggcaagaagaagtcaagccgatgtagcaatagcacgcacgcacgcacaatatatatccacttcaatcagctcatggaatataagagcaccagaaattcgagcgggcaaaattatagcaagaaataaattcccccaaaacctagataaacaaagagagagggggtgcgaattaaactaattaattaccgcgccacatatacacaaccataattaaccttccaaataatacaggtatagctaagatagacacatgcatgcacagagagagagagagagagagagagagagatgggtagatctaaaacctagagggaggggccgcataaaccgccgtaactaaaatccgcgcggtaactagggctcgtacgtagccgcgaggatccccgcaaaagacgggatttttttttcttccgcgacatgaaatataagggctttggttcccatggaggcgaggagctcgaggcccgagagaggggcacagctggaaagggggcggacctaacgtggggcttcggatgagctgaacccctctcctcccccaaaaccgcaaccccccaacccgaaaggaagaaaaaaaagtggggaaatcggaagtaaatcgaggcgaaattggatgggtcgatttggggggaggggggaagaaatcggtcaaaaccaaaccccccgcgggagctgttcttgcggcggaggaaaagttcgttgattacctggggggtttgcgtttgctccgacagccgcgacgcaggcggggcggggcgcgatctacccggcgcgccgtcgacctctccccggagctagctgctgcttcttcttcaggcggggggagcgggaggggggcttattggagaagactagtagtagtcgtcgtcgtcggaggaggaggaggagatgcggggtggggcggtggattcgatgaagctaagacgcggttggcgcccggagagggagatcgactggtcgccgtggtcggtcggctcccggggaaggaagaggacgcaggcgcgcgggcgcgccgcggtggattccgatcgagtgggtctcggaacgcggccggcggcggcggcgcggtggtggtggcggcgagtactgcaggaggaagagaagctgcggggggaggggaatagggtaagaagggatttggagtggagaagagagagagaggggggtggaatggaagggaaaagaggaggaggaaaaagaaaggattgtatattttatttgtacgggagttggagttggagttggcgttggccagtccgccctgcccctgcccctgccctcacctcacctccgcagcgctgccctgctgcgtgtgtgggccccgcacgcctttcccttccactctttctctctctctctcctttctcttcttcttctatctccagtaataaaaatgataaaataagctccatatactactgtgtactctacctgccgctgtactctacctggtatgtgtatataggtaggtatagaggtaccgatactgcccgagcatgcgtaggtagtatactccactctaatatcacgcgtacatgcatgctaaataatattgtaccggttaatacgtaaatacgtaggagtaaaaaaaattgtacctatctgtgttttatactcgtgatctacaaagtattactatataacatacagtgctttgtaatataagtagttttaaaatgcagagagcagagatatatcaaactctgacgaagtatagatcaaacaacagagttgattgccccctctgtgtttatgtgttctctgtgtttgtttgtgttgtctttattttttttaagcctagattgattactcactatgtggtgtttaacatgttaaattaaactacagcggctttcttcctgccaaggcatgtctaatgtgatgttccaaccactatatgttgtaccaagttaaatataccacatagttattcttatctcagtcgaattttcaatcaatagatcatataactaggtagacacatgtcactagtggtacataatggctctcaccaccccatgcacagcatatgtatgtgagtgtcctaatctatataaaacgcttaaccttagttctcgacacaggtagaatggatttgacactgacctttcagttgggtttcttctatcaaactcatagtctacgatgttagacaatggggacgtgtaatgtgtgcccttgccacatgcacatgataaccatgttgtaataggcacggccggcatgctccgactctaagtgccattgacctagagaatggcctgctacataccgatgttgcctagctcaaaagtttgtttctccttaaacaaaaacaacttcattgccaataggcagttggccttagtgaggctacaagtcaacaaagccagccttcctccgttgctacccatcctatgcaggacggcacgtacgcacatgaagccatcgacgcctacgtgtatgggaggatatccacaatctaccagcattaagccgacacctctaattctaaattattgatgccaacacaggcagtcacccgttgacacccatgtgcaaccgcgataaacgactagttgtagtcacatttttaaatcccgttctaacctgactatccaactaaaccaatatttttaccaataggagcatggaggagaaaataccaatccaatgagctcattttcttcataagccatgccccatccgtgcgccacaaatatcaaatctttatccatgaaaccatcgtttgaggaagtacgaaggtcattactcaaaaggggattaaattgtaagggaaattgtttttcacttattgacctaaatctaccatgggaacttagattggagtcgagaatcgaaaatgattagtgcgaggaaaaaagggctaccaagatcatatcggggctaagatggtgaaaccaaagtagaccgaatccaatcaagataaatcaaaggattaaaatgacacaattaggtagattaaatctcaagagataactaagaaagatcataaacaatcaagatgcagggccatgggcagacagcaaaccaatagatgaatcaaattgtggaccgtttttacgggttgaaattgttcagactcatctctgattggtcaatgcaaacggagtgatggtcctacatgccattgacctctcaatgttactttggtatagaagtctcgagatgctctgctgaccaatggttggtctttagtaagtcggtaggacaagaacctcttcaagaacagtagtaacaattgtagaagaagggaagatgtcgtggttatggattttgaagtggacacagtggcagctaaggagggaggtcaacacaaccatgcttggcatttggcgatagtggtagccagggaagaggtgttgcagcgtcctatgtttgtttgtgtgtgtgtgtgtgtgtgtttgtgtttttctagcaatgtaggaatgcggccaccaatccgagtagagctaccattcctacattgttgtacatatagctgcatgatgtcgttgtgcatgtgcatactagtgaggattcgctagattcatagtctcctagatcgacacccacatgtcaatgatgctcaaacatgatagcaagcaaatcgatgatgctagtcacactattttcccttccattaagccaatagattcccctataagccgacagaacagtgcaaccaaggcaaaaggacctactatgctacctagcctgttcagacaagccattgtactgctactccggtccaaagttttataaaccattccatcaccaaatagcactcctaagcggttttgtcgataaccatgattgccattcaattactgacaaaaactagtgaaattggacgaattttgtcagcttgtttcttttgaaattgacctatataccaagttggtttctcgttatttattagctcaataatgttcgtcacattttgaacccttgtctacctagctagcccagcgaaatccaatcaacgatagatctaaggcctaccaggcgatagctgacatcctttccagtaggagcacaaggaggagaaaatttgcatccaagaagacccctttcttcctagaccacgcctacggctatcgacgagctgaggtcacctgcctaggctcgactttaacacaagctcaagcaagcctatataatcttcgagcttccaagcgggctcgcctcgacctcgactaccaagcatggctcttaattagtataagatatattttaaggatatataatatcaataaaaataaataatttgttgttaatcacattaatgaaagaggagaaaaggaataagataaatatatgatgccaacaaatactaatccatcgtgtgaatccatacaaatgcatgtaataaaaatcatatactatggagctagatcgagctcagctcgacaaagctcatgagctttggcatatacttgagttcggttcgagctgatcgcgagcctcgaacttcttcgtcagccttaaccacgccccttccgtgcgtcataaatatcaaatctttctccatgaaacaaccgattagaaggggtatatggctaataagatgattaatcaaaaggggattaaattcccacgggaaaaaattttagtcatcaacctaaatctaccgtaggaacctagattggggccaagaacctagatcgaagcaaaagacataacctaaacagatcgaatccaacaaattcagaggattaaatcgatgagaccaacaatattgaattaaagttagagagaaaacataaaagaaaaggaagaacacaaaaaaggacggaaataatcacgatgagaaa

SEQ ID NO: 17806 - DNA, 8142 bp, Oryza sativa
acttgtttatattttggaatcgatgcactagatggtcattttagatatattgtatacatagttagagtagcaagtatgctgtgtgtactttatctagaaaacgtaaataattcttctatatcaagacttcaacggagaacacacagctgtcgtaatatctagcgaagcaaccattgaaaaccttactaggaaagtaattaactactacccccatctctaaataagtacatttttagcatgtgaagcacaaattaatagggaatataaataaataactatgcctccaaataaaataggaaaatgctatacatactaattttttcttactaaattcttactaatagtactgatgtatcatgctataagtacatctagatcttttataactttcatctacctaaatcaaatgattgagatgattgttagtaaaaacttagtacgtgtaacagagctcaattaaataagagatggttgaaagtgctgaaagtgtagagatggttgggggtaagatgtgtagaaattttaaataagaaacgatttatgaaacatgtactagcaccttagaagtacacttattttgagaaaaaaaaactagagccatagaaacaattagggtgtgtttagttcgcgaaaagaaaatttttgggtgtcacatcggacatttgatcggatgtctaaaggtattttcggacacgaatgaaaaaactaatttcataactcgcctagaaaccgtaagacgaatttattaagcctaattatttcgtcattagcacatgcgggttactgtagcacttatggttaatcatgaactaattaggctcaaaagattcgtctcgcgatttccatgcaaactgtacaattggttttttttctttttatctatatttaatattttatgcatgtgtccaaagattcaatgcgacattcgtgggaaaaaaattttgggaagtaagggcccctttgattcgcagaataggaaaaacacaggaattgaaattgaagtagtaggtttctcaaatcctataggaatcagcaaacataggaaagacaataaaagtcctttgatagtgctatgggaaaaacaaaggaaagtttacaaagaggtcacacctcttactatttttcatatgaaatatgaagtataggaatacgatcctatgaaaagttttctttctttcctatgaatcaaagggatatgtagaaaaaaattataggaatttaaatcctatgaaaatcctttgccaatcctataaatcaaagaggccttagacaaggccttagcacaagggacggagggagtaggtacaatacctggtacgtaaagcatgttgctccccgggtggaaaaacctaggaagcaattaactaggacgtcccatccataagatcaaggaatagcttagctataggattctcacatcatcagagtttttcgtagatctaaagattgccaaggatgggagagatatctctagtcttctggatagtgcgtagtactccatactccctcggtaaaaaaaaaaaagacaaaccctgatttccgtgtgtaatatttgatcgtccgtcttatttaaaaaaattatgaaaaaaattaaaaagataagtcgcgcacaaagtattaatcatattttatcatctaacatcaataaaaatatgaattataaaaaaatttcatataagacggacagtcaaaattggacacggaaatccagggtttgtcttttttttggacggacggagtattcttttactataatatagagaaaaaatattattatatgtagcaccatcaggtaggagtattagctagctagtactacactcgatgactaaatactagctagtactccagtgtctcaagagtagatcagcacacgtcgatcagaaatccactgtactttgctaggagtagtactatacctatctcgtacaaacgggattaaattaatatagattgtatcattaaactactaattaagtaattaagaaacgtacaggtcgattaatttgatgtgtaatgacttgatcgaactaccggctatagctagctagctagtcaaggaagaaattatgatggatgcacgcactactccagtattaatatattgatgtgtattttttttgccagttcacgaaaacgacttaagtatatatatggagtaggccacagagatcaaaaagatactgggtgcggaattttttttattttatagacctttttatgttttaattttattaatagaccgttaaaaaaatattttcaaatttgaaccttttgattgtgtcagcccacctgtaatggccaaatagctctgtcacgccacaatactggccttccatgccattatggcattatgactagcgtggccaaacagccctgcctcagctggcgtggcaagaaggttcatttcttgaaattttttttgaaaatgtctattaataaaactaaaacataaaaaagtctaaaaaataaaaaaaattattgggtgcgtgacagatatatattaacccatattttaagtaattaattaagaaacgtacacatgcagaatgcatgaattactggccggtcatatatgcaagaggctcatgcagttctggcctggtgtttgtggggttcataattggtctggtccatgtccagagcgttttcagtggtgatggatggaatattggaatctagcttatgtcagtccagaaagtatatgatcaacccctccatatagcaagaaaagagatctcagtgtgatatatatgttcagaaaaaacaaggaaaagagatcagtgataatttcgcagacatctgttgatggtgcactaattaatccatctgctgctcataagtacacaccagacagatcatgtgctagatgagtgagatgtaaatttatatatgctttaatttaataataatcatgtgctagatgccttttttagcaggggctactagatgcatgtgtaattgtgtatactgttggtacgaagatggcttaattaattggtggttaggaaattgagaactatatatatacatgaatttaccaaaaaaattgaatcttattaatttggttcaacgtgacaaactagtggtaatgtatgatgaaataacttaattatatagcgaactcgtgggggtcatgccgtcatgacaaaacacaaaggggagtagaatgtatacgctcatctatgatagtaatatataagttcataagttctttaaaaaatatataagttcataattaaagtctttttttcacttctgtacagtacagttatattttcttgctgtgtaatatgcacaaatatgtgtgcaaagttgaaaacagatcgtgcagagtaccatatcagacgatgttttttcatcttgagaattatactcgatcctatttattatcagttcttttccaatcgatcgagaaggaatatccagtagttagtactattagttaatcataattaatagctaaaattaagaaaatataaccttatatattactgcatggtcacacacacgaatgctgacacgcatcccagagcatatggtatagaaagaggaaataagctgttgcagaacatatataggaatggaaattaaagttgaaaacaaatcaatactacaattaacttggagtacataaattaaaaatgatataaacaattcaagtttatatataaatgtgtgtgtgtatatatatatatatcactgatcgaggcatgggccaacttagttgggtcccattggtcattaaataaattggccgggtcacatcggccattagctagacaactggactgctctataaattgtccatatcccagtatcatcatctttcttatctcgtccctttccccatcactctcatccctgccccaacaccctactagtagtagagtattctaacaatctcaccacaacaattaaccattagtttttctttatcttacgtatatactactcctacaaagcaattaaattaataattaaacgacgaaacgatcgaagctagctacccctccgtcaaaaaaaaaagtctaatcctaacaatgaatctggacacgcatcgttgctagctatgactggattttttatcgggaaggagtagtatgcgtagctagctaagtactactccctccgtttctaattgtttgacaccgctaactttttagcatatgtttgaccattcgtcttataaaaaaattatgaaatatgtaaaaatatatgtatacataaaagtatatttaacaatgaatcaaataataggaaaagaattaataattatttaattttttaataagacgaatgattaaacatatttaaaaaagttaaaggcataaaatatttaaaaacggagggattatatagttacgcgcgcggcggcagcgactggccggccgcccgccggcggcgagaggattgtgtatgcaacaggtcagttgttgtagctagttgtgcttatttgagggcaaaagctagttatactagctaggtatgcagctgcggttattgcagctcatcacctggatcgatcgcggcctcgccggcgacatctctactccctcaaaaaaaaaaaaaactaagatgaaatacaattcaagacaatgaattaccctatcccatctttatctaggagtaggttagattttttttagacgaaagaaatatgttgtcacgatacgaggttacgatggataaacactgtcagaaggagtaatgaaaatgtagatttacaccgaagagaaaaaacatttatgcatctgattcattgctttggtctgacccaatgcctgcgacatttatgcatgcatgtgtatatatgtacagttaattagtcagtgctagctagctagacatatatgaccgagtttagttccaaaatttttcttcaaactttaaattttttcatcacatcaaaactttcctacacacgtaaacttccaacatttccatcacatcattctaattttaaccaaacttttaattttgacgtgaactaaacacaccctatatgtagaaaagccggaaaatgaaaggagaataaagaagcatggtcgtcttaggggcctaagtcggttgtgtgaccgtctagggcccaagttggtatgggacccatcaccaaccaaggtggtcacaccttacgttcaattcccacgtggtcacaccttatttcatcgtggctaagacttgtgatgttttcgtcttctcattgcatctaattagtctgaaaattgggctagtattttgttttgttcctgttaattaatttacacaatatttttaggtgtttataatatctgttagcatcatttttgattatatatgatttataacagtatatattacaaattatttaatcttgagggtgtatgttactaggtttgcctaaaaccctctaaaatatagagctggggctgtgaggaaagaagcatgtaatgaggtccgtttgtttatacgtgttggatgattttgaatttctgataattattaattgatgtatacgaatgtattaaattttgtaagttaaaatattgttttaaaatgttttttctaaaaatataatgatgaaaaaggttccaaagaaatcttacttcctccatttcataatataagactttctagcattgcctacattcatttagatgttaatgaatctagacatatgtatgtgtttacattcactagcatctatatgtatgtgagcaatgctagaaagtcttatattgtgaaacggatggagtgctatttagcagcttaatgtatcactgatcatctctaccaccaattagccacgtgtccacgcggtaataataagcaattgagttaattattacctctagctatatatagtcatcttttcgcttatacttatacttatcagccaaaatttaaatttttaaccttaattttggaactaattttgaggtttttttcatcaaagtttatttttcagcctttactgttagatagctaaaaacacgtgtataaaagttttatttacaaattacttttcgcttattccataagcgaaacgatagctagtatctgcatgcctagctcgcttgtcatgcatactggaaagtggatatacatgccaagggatatatatatatacatatgctacgtacgtaacgtacttatgtactgcgtacacgcgatgtacactagcaatggcgcatggaattaactaattttgtacgtgcaagctatagctagctagcgcgtgtaattgaagcaaagctcaaatagtctatacggctgcttgtacgcgtgcgaggaatgacgtcctgtacagcatgagagtttgagcttttttcgctcacgcctatatatatgtgtgtgaagaaaaaccgattctagagaaataaatttgaacatatataatgttgcccaaattcatccagaacttttttttgacagaagtagcttgccacgtcacgtcttttactgagttcttcttatcagtttataagataagctattttcttgtttatcttgaacatgtttcgatcctagctagactgctaacaatacatttcgtgaaagaaaaagttatatataaaagtttccttaaaatcaaataaatttgtttttaaatttataatagttaatacttaattattcggcgctaataacctctaaactaactagctcagccgaactaactgctatttcaaacgcatccttagctagataaaccataacttttttatgtggtttgctgtagtttcttagtttttttctacagcttaccatacataatttcttagggcttgtttggtttggagtaaatttttaccctacagtagtgtcaaaacattggtaaattttggcactatcaaattgggtagtattcaatttaaactattgtggataaaatttggtagcaaaccaaacatacacttgctactattgaagttaccaaaattttggtacggtaataaattgatatcaaaacaaacaagcccttagcaccttacgtgttctatgtatgtgtcatagactcggtggctgttcagattgatgacattttcaactataccattttggtaaagttactaaaaaactatttatgtttagtttgttggcaaatttaataaatacataataaatcctaccaaaattttagcaatattaccctcttaccaattgccaaaatttggtaaggtttattttggttataatttggacaggccctcaattcctagccaacctctaacatatagtatatcaacaggggcggagttaggattatatcaagatcactagagtatgaatttcttgaacaaattttaatagaaaaattagtaaattccttggtattttttctgcctgatcgtaacagttattttccacattatgcaagcttgtgacgacacgagcagcgcatgcaatgcaacgcgggggcagtgcgtcgcggcgcggggggacgggtagctaaggtttaatttgctaccgatcagggcgcggcaaactgaagccgggaagcgaccgatcgagatcatgagcgatgcgtggagccgtgtggacgcatgcatatgcagttatgcaagcagagtacagacatggcaggagtactagctagtaggatatcacacgcccggtgtgctgctgcacaaaattaatactacgtgcatgctccagttgcaagttcctatcgtggatgtatggataaaaaggtcgtaaatagtcttgctacgtaatccctctgtcctaaaaaaaagacaaaccctgggttttcgtgtccaacgtttgaccctccgtcttatttaaaaaaaattaaaaagataagacatgcataaagtattaatcatgttttatcatctaacaacaatgaaaatactaattataaaaaaaattatataagacaaacagtcaaacgttggacacggaaacctagggtttattttttgggacggagagagtactccccaaaaaaaaacttagaagatgatgttactcctagtataatgactctggacaaatggatgcccagatttgttatattatgaggggttgtccagattcattatattagccattaggaggagacacattctctcctaggtttttttttatggatggagtatctctatatataacacggctgattttattcagttattgtcaataatattttttttgaat

SEQ ID NO: 17807 - DNA, 41290 bp, Oryza sativa
gtaactacaaagaaataaaatttcgcccatatgattatgtgttttcaaactaaatagttcgagatgtattgataatcaaagttttaaaactttcacggaataatgttgactgtcagagagagtattaattgtggagctcctagttaattgaacagtaaaaaatgtttttaagactgggaatattgttagataataataatctgaaacgtcataacaatgtccaaagatgtgaaagaaggttggtgatgacagtatataacacgtcgtgtagtagcctttaatttaccctctcttctcttggcagccgggcagtaataaatatgtactagtgacgctgacctgcactccttcacgcaaatacatatatatggacagtagactagctgttgcgtaccatcaataaagatatccatatcatatctagattgggtggcgttcatcgaagatgcctcttttagcaggtaggagtagggtacagcagagactgccaccaaggcaagtacggacacagtcctgctatattaaagacagtagtatatcagaggggggaaaaatacatgcttattatactagatcatcaattaatttaccagcgtatcctctcagcggccgtgatcagtacacacggtactgtatgtataacgaatcaaatgaaatcaatcggggccgggcatcgtacaaaaccggaacaagattatacattcaaatgctacaacagcgtatgatcaagccacgtggggaaaaaaatgtgtaacaattacacaagagatattagacctcttcacactttttttttaatactccatttgattgtttctcattaagccttgttctgctttgttttggcaatgctaagaagatctccaaacagcttgtcctcaggcttcgatggttgccccatggaagatgatgatgaaggtgttgtagagtagggcgagctgttcatccccatgtaagagctgtcttgcatggagaggccatacattttctgggagaggtcattcataccagcgtagtatgttggcctcccttggctgttgctgtagtattgtgccgcttgctgctgcacaagccggtactgggacatctgggggccatacattcgtggttgcggcatggctgcaaactgcatacccggcatcatcatcggttgcgcatacatcatgactggctgcgctcctggcatcggcgaaggttgcatcccggggaattgcattcctggcatggagtgtggtggcatcgaaccgaattggttcgcaaagcctgattgcatctgggttacagcaggttggctgggttgcatggctcccggttgttggttgttgtacatttggtgggcttgtggacctcccatctggttcatctgcgggtgcaagggctgcatcccacccatctggtttgatggtgttgggagagatggcatacctccaaattggccgtttgacaccgggtgagactgcataccgccatttgacatgtcgccgcttggcgctgactgagcttcccaaggaggtgggggaagggctccactttgctcatctacaaaattcaggagacccatcagaatttcttcaaagctcaaacagaacacaagcatggacatgcgtggttctgacatccaatgatagggatgatggtgtaggaaaaaggttgagaaatgtaaatgtataaataaattgcaataccataattcactgtttgctgcgctggaggcgtcgcattgttcgcaatttgaccattccacccagaacttgtggggtatgatgttccagggttcacagctcccccattaggatagaggcccacctgctgaggctgctgctgtgcttgcagaggatgctgggttggagcattgtatggctgtgatccaggaagagtagagctagaattaacaccaaagggatccgcaggtttggcaatgttattggttgtgttgttttgagagaatatgtcaacgatagctagtgcattttgacttggagtagaatcaactactggatcagtaactgggacaagcgctagtgaattttctgttgtagatgggttgtcatcccagctaagaagatcgacgccaagatcggattttggtgctggggttgctgagccatttgacaccggaggtgctggaagcgctagttgctcaaatggtgactgcacactggcactgttacaaaggcaggtcacatgcaaacagatgttattaaagaagccaggtaaaacatgataaataatcaaaaaaaaaaagttacgaatatagatcatcactatggtctagtgatactatgaaagccaagagaaacaaacaaatcaacactaaatgcagtttggatcataaaatttggctaggttcaagaaatgcacatttatctttattttagagagagaaggttctacctacgtgctttctctcaacaactatctttttagttctacaataccttacagagctgagagccacagtttgctctgtttgctaccaaaacaccctctaccataagttacagaaaacggatattcaacaaatttgtaaaagacagcactacgatttccaataccaccaattcaagtaaaataagaacagtcggattgtagatttagtgtagaaaacaaaaactgataccacaccaggtagcagttaagggccccaatcagtagtcacagtgattaccatgaggagtcagtagtcacaggccaaggctcctcatatgcaaacagtggctaccatgtataagatgtacatatgcaaataggctggcatatggacctaccctccaacatgtcctaataattttgatatactagtactgtgcagaaagggagccatgggtgtgattgttcagtggtttgggtcactagcatttgtagatgccattgggcttccatatagccactgaccttttatgattaaacaagagaaagtagtgagaagatgagaaaaatttagccccagggtataatttgatgataaaatggattgcaggggtgttgataaaaacaaaaaaaaagtactatctccgtttcaggttataaaactttctagcattgcgcacattcatatagatgttaatgaatctaggcacacatatatgtctagattcattaacatatatgaatgtgagcaatgctagaaagtcttataatatgtaacggaggaagtacttgtcaagggtataaatgcattgactatcagacttgtaggggtgttcataaacaaaaaatatatgtacatatgtggaggtaagcagcaatggtgatgactttttggattttaatcggtgtttatgatactggctttatcaggaacataaataggaaattttatacacatgacaacatgttgtctggaagtgcatatgttcacaagcctaaacagctacactacactgggcaaattgctgccaatagcagaaactgtattgatcaattacaatgtacaaacttgtttgttctttagaccaagtataattagcagtttagaagaatagaactctgcaatggaaaaggagaagcctgaaatacccacagaaacatggtggatggtacaattgtacatcaccaaaactgaagaactatattacagtgtttaagcacttgttaataaagaataatggctaattactaataaaaaaattgtttccagcatttatgcacaaaaatcgcacgcacatgggctgatatcattcaatattacctagaaataagaaatatgcaaatgtgacaggagaagattataacctttggcttggttctttattagtctcttgggttgtaggatcctcaatatctacaagtgcctgctctttcttagagtcttggttcatagaatcctcagtgtctacaagtgcctgcagagacttaggtttcttctccactcgaactgcaatgcctgcagcaattgcatcgtgttttgcgagaacacgttgcaagtcatcattcagtgcaagcccttgtgacataagttcctcatccctgtaaatggccaaaccagaattttagtatatatgttgcaataaatagttaaatgagataatacagatgccagccaagggctacttttgccagcttttcatgagtgaatattttatatttggatccaaatgctttataagatgataagataattcttatgatcagctcttcttgagcataacattatatctcacacaggaggaaatgttatagagattaattcacaaaaatgacaaagaccatcctttttaccatcctctactcagacacatgcccataatccagggttgtcaaggaagttcagtcagtcaacttcatccatatcttagaagtaaaaactatattcaccaaatattagatttactcacgcggtagcattaactagtagtaccactctctgcttgtaagtgcgacactgatcaacaagctccacaattacctcctgccttagtccctgtgtacagagtagtcagacaaacaaaatcagtaaacctaacacaaaaggaggttgttaagtaactaagtatggaacatataagtacagatttgaacctcgaattaaaattccatttagacttctgtttattcttccacaataaatggattttaaaatataatggagtactcctttattctaagatttttaaatatgggtgtccaaacccacatacgaatgttatcaaaagcatgaaaacaatggtataccatgttcatgcttcgataccttagttaccataccaaatagatttcataacaatatagggtacacggcaaccaggcaaatggtatttcaagtaatgctgcttggaatcaatgaacatttgatagactacaggctgacgtgtcatatactcaaatgtttatagaacataagcaagtaagggcaaaaacacgctccacagcatagtaagttttatgtggttagaacaagaccatttctcaaattaaaagatcaggagttatttctcaaaataaaacaagatggattgttttctttaacaggtatttgtgacactaacatttagatgtgctttttttttgtgcagcttgagtttaaaagcaaggtaagtgttatcggtacctctctgtttccagggtctaaagcatttagcatctcggctagcacatccattataccacgagcattctgaatctctgacatgctgaaaatataagcatacattcagttttacttcaaatgacagaaaaagaatataaggttagagaaacagcaggcaaagcaaggtgaagtagatgagttattcaaaggttctcactggagacggaaaaaaaaaaaactttactccaaaggaattagtgacttggtggttgtgatgaagttcttcatctatcccccttctttcaaggattcttttgtggatgggtttacacaaacattttcaaattatttgtaatatcttctataaaggattacatcctctgcacagcacatgtgcgtataaggtgtcaattgatgtgatgtgaattctgtatgcaattcttttagggcgtatttatttgttttaagtttagaatttatagtatatttatttgagatccattgaaattcacaggtagttaggtactacgctagtattgtcatagcactttacacacaactttgctaaacagatcagcaggaggtaccgactagtgaatagtgatcttctaatagttatagttttccacatgttcatgtgataatctcaaaccagtaaagagaacatataggaaaagatattatcaaatcagaaaatgaaaagtatgaaagcacacctcaaagcaggaaaatcatttccagcagacgattcagcttcatcctgctgatcaggactacgcatatttctgcctgctggagactggccattaaacaatggtgcaggtcgatcagatctctttggaaatgcagctccagcacgctgcaatagtgaaataggaggatagctatgtcaaacagcaaggtgaattcccccttaattctaacaaatatagatagatcagtaaccaattaatcacatgatcaaacaatgcaacgacttctgaatatggaaaattcagtgtgggaaaaaacttcagagcttgataaaccaatctgggattcaaaaccataccaccaagtcatggtacgctgcatagtactgtggatatcttgcacgtggtcccccgaatgcttcttgccatgtatctatcatagttaataccttctctttgacattctgatcagactgtaataggacaagaacatatgccatcatattcaggacattaaaacaaaacagcttgagatcaaaactatggagcatatcaaacctttttcttcactatcttcaccatctcatgcaacacatctctttctgcaacatgcatgtggaatatatccccacagttcttgattgcagtttccaagagctgaaacagagctcccccaaaaaaaatcaggatattattcattttagatcctgtgcaagttgtcctaaacaagatacatctccaaaataataatgaagcataagtaaaataagttgtatcctcatcaaatctccctcccaccttcgtggactggacaaggaattaatacacacatgtttattatgaaatgatgttcctttgtgctaatgatgcttcaggttgcatggttgcaactgatcattacattaacacatgttcatgaaatattggacaataatattaatacagactggaacagtagtgcttagtgaacaaaataaacacacaaatatagctgagcaatagacatatatgcttgatgttaaaacacacagagaagagattcttcccattgcttgtaccattagcaccactcttaaaaaggatgtaaagttatgataaactcacagtcagcgcaagaatttggacttttggatttttgtgcccaatccttttcttgagtgccttaacaacatcttttgattgcctgtacatgacaaatgtttgctcatcaataattgacgaaccaaaacgaaagaaattatttacaatacaataaatattcatcttcagagtcaacctcaaccatttggtttccaatcacaataaccgaccatgaatcaaggcaaactataaaacctctagacaggaacagaatcattgcctcatcaaaaccagcagacacattaaacagcccaactgcatcaaacttttggtggcctccaccactaacttagttgtaagttgtaacaactaatgactaccgttagtagctgtatgctaagtattcaactaataaagatcatacgttgcagcagcagtacagaaatactagtttaaaagcatgcaggtgaatcatgaagcagcactcaagtagctgccttacgataaggaattaaaggtactctaatatgcaattaatgcttcacagtttatcctaaagctgtgcttgttaggttttaaggttaataaatggggtagccgtttaaacaaccaaataatcttggagacacttaactaaccccctgagttctattttctctccagctaacctcctcctcctctatctaatcactaattttgattaatgttgttagctgccaagcacaaaaattgggctaaactaatcttagtaggattaatgtaagctaacctaatttttacagcagctgacaaactgcatcccgagtcaaatgggctagttgtcatttgtttgaagaaaacagtcaagttgcagtggcgagcaaacattcatcatttctatttttcaaccttctcacaataatatctactaccttgctatattgtgggatggagggagtacgaaccatcctaggttgctatattatctgcagtttctttttttttctctctctactagtatgtgtgtcactaggaacacctcgtaagttatgaaactcacaggttactgaaaattgtttatgaaagcaatattattccatatggtagctcgtattttctcctcggttacggttggttccactagcaatttgccagtgaatccatgaataccaccacgctcttgcgatctaactgcagcgtatcatcttgtcacctcaccaaataagccaattgaacggcaaagcaagcaccaatccccagcaattctatctagccatttccaaaacttcctcctcacaatcaaagacctcatggcgaaccaggatgcgagcggagccagatccaccgccaccgcaaatcctgatctcctcctcccatctagcactagcattcattcacccaccaccccccaatcgcattctaattttcagaatagaaggatccaattcccgcgccgctgtgccccatcatcccaacgagaaaccacaccaccaccaccaccaccaccgctcgccgcggatcaagatcaggcagcccgccaccgccacgggatcaagaggagcacacgtacccggggtcgcggttgcagatgtcgcagatctccatgttcttggcccagtcgggcccgatgagcatgtcgctggtcgcccggtccaccatggagcccgccatgcttcccctcctcccaccggccgccgccgctgcccacgctccggcggcgcggaggaaggtggtgcggccaaccacccacccaccctagctccggccagccgccccccctcctggccggattcgggtcgccggcgagcgagcgagcgagcggattggcctccacctccagatgcgatgcccccccacccgccttgtctaacgatttcctcctattttcttttcttggaaatttctccccgccaaattagctctcccaaaaaaaataaaaatgaataaataaatcattttttttattttttttaggaaagttaacgagttcgtttggtaggtggcggcttgtcggatggatctgagctgtcccccacatcataactgtcacttttccctcaacgtgggcctccactaccaggcccattttggcccatactctacgtgggccgaaacactgaggcccattaaaaacgaaaacctggagcggggaggcgtcttcgtcttcctccctccgcacgcgccgccggaagcgcgaaaccctagcaatggcggcggcggcggcggagggtggcggcggcggaggtggggcggtgtacgacccgagctacgtgccggactcggtgaagacgttcgtggcgcacatgtacaggcacgtcagggacaagaacgtgtacgagatccaccagatgtacgagggcgggttccagcggctctccgaccgcctcttccgcgacgcgccgtggccggcggcggaggccgtctcgccctactgcgacggcgaccacgtcttcctcctcctctaccgggagctctggtaccgccacgcctacgcgcgggcctcctcgtcgtcgtcgtcgtccgcgccgctcaccgccggccagcgcgccgagtcgtgggcgaactactgcgacctcttcagcgtcgtcctccacggcgtcgtcaacatgcagctccccaaccagtggctctgggacatggtcgacgagttcgtctaccagttccagagcttctgccagtaccgcgccaagctcaagaacaagtccgacgacgagctccaccagctcaagcagttcgacaaggtgacacacccagctcaccaccaatgcttcttgattatgcattattactactattctttcttagctgcagcctaatctaatatgtaattcagtttctttcttatctgcggcgcataatataatcggcaatccggtttgctgaattgttcttagctgtggggtacaatctaatatgattttctgatttgttcttatccgtggtgtacaatctaatgtggtttgctgaattgctgcaggcgtggaatgtgtacggggttctcaattacctgcaagcgctggtggagaagtccatgatcgcgcagattctggagagggagaaggaagggctcgagcagttcactgccaccgacggctacgactaccagggtggcagcaatgtgctcaagatgctcggttattacagcatgattgggctgctcaggatacactgcctccttggggattaccgcactggcctcaagtgcttggcaccaatcgaccttaaccagcagggggtctacaccattgtgattgggagtcacatctctgctatctaccactatggctttgcaaatcttatgatgcgcaggtactaaagttcattgactgccttggaatcaatggatacttcaatctacagtgccatgttagacgcagagttttttgctcttctatgttcaaattgtacttaaatcacatgaaatgcgtcctaggatataaacattatttccagtaaaattagattgagtcatgttgtacagccacacctaggatataagcattcttttcagtaaaaccccattttatgaatttattttttaattcactttcttgaaattgcccaagatggttgttttagctaatgctatattcttctggtagatatgctgaagccatacgtgaattcaacaaaatcttgctgtacattctgaaatataagcagtaccatcagaagtccccgcagtatgaccagatcttgaagaaaaatgaacagatgtatgccttcttggcagtttgcctttccttatgcccgcagcacaacctcattgatgagaatgttagcacccagctgaaagaaaagtataatgacaaaatgacaaagatgcagaggtttgatgaggaaacctatgctgcgtatgatgaactgttttcatacgcatgccccaagtttattactccatcacctccagccctggatcagccacttacaaattataaccaggtaatgcttttggtgttaaataataatgtatttttctgattcatagatacgtcctatctagttgttactgcagtcaatctagaaatttgtctcctggtgtttggttcacgactgcagctactggatgttgtcactccttgagcccttttgccttctcttcatggactttattgtgtttgccaaagttctgacagctaatttactctttcccaaaaacaaattaataaaatcaaatagccctttagttacttttccttgtttcagactattgcacattcaattttagggtgaaattgttcttccctgttaaacaaagtaaattctcctgcagtaaaacattccggtggtttaaattccatttaaagctcctaaaggggtcataagaaataggcatgttatcttgtcacatggaaatgatagaatgtaggctaaatttacacgtttgttgattacacaaaatggtgtgtttctgattattgtggatgtctaattctataggatttgactttcttgtttactacattttgtttattgttttactattttgtaacaggatgcataccgccttcaattgaagttgttcctttatgaagtgaagcaacaacagttgctttcagggatcagaagctatctaaaattgtattcaacaataactattgccaaacttgcgcaatatatggaagtggatgaggcaacgcttaggtctgtatgataattaacttttcttggtaatatttcaaagggccatgaagaacttaagtcaatatttgtacaggtctatcctgatgacgtacaagcacaaaatgcatgcagttgacaataatggaaagattgtttccagcgcagactttgatttctacattaaggaggtaatgtgccataataatacccttctctgaggcccagaatatttttgtaaccatttcttgtgttgatatacaattcctcttttcagctgtcttgataccttccagctagtaaatagaactgcatagctgtaaaacttctttaacgttgcaaattctccaatttcaagttgatatttagttcttgaatatttgggtttggcttttatgtgtgatcctctaatccttttgcttactcagaggtagctgtagttaaggcactattggcatatgccattatgcatctagtttgacactataattaactgccaataatctatgtgcaaccatgcaggatgttattcatgtcatggagtccaaaccaatcaagcgccatggtgattactttttgagacagattttaaaggtatccataccaccgcttggcataaccttgctgtgaaccactactaccatttgcatttcactatttcttctgaaaataatgtgtatgttgctataccttcaaatctttactattatcctgcagtttgaggaaatgattggtgaactggagaaagtacagtttgactgagcctggtaggaatcatggaggagcggggtacatccccacttagtttagctgttgcaagaggcactcatgatagttattgtgtacttattaatatatgtgccttttgtactcctttttgacttcagagatgaaccggtaaattctttttgaaaattgtaggaacttcagagtctgaagtttgaattctcactactgtgccatcatggcgttttctgtgatgattctatacagtagttgagctattatctcttctagctgttcgatatagtccttgtgatccaattgctcgtgaaattgggtaaatggtaagaaaatattttgcgacattacttctgtttttttaacgtgacccgataaggggaaaaaaacgctaaggcatctttggagcacgggggattagttcaattcttataaaaatcatccaaacatccttcaaattccaaaggaagcataaggtcgctgcagctggctgcgttacaatgttgtctgtcttgaagatgctctgcacagatctgttccagcatacgaaccccaaaattaacgtcaaagaaccttgctcacatccacattcaggtaggggtgaaaacggtacggaaaccatctttatcgttttcgttttcatatttttttttcggaatcgaaatcggtaactccggatacgaaaacggaatcgaatattatcgaaaccgaaaatggagcgaaaacgaaccggcacaaatacggtaacgaaaatttatcggataaaaaaaccctcaaactgataaattcaattctcaagtctcaacggtcaacgattcatcatgaaacacaatcatataagtccaattgttaagtattaacaatacatcacaaaacacaatctatgtaataaattatctatgttttagagagtaacgcagttgataaatctgaatgcaggaaaaaaatattcttatgtaattttatatttgcataaaaaatattttttaaaaaaaaaataacaggaaaacaccatggtattcactattaagtgcttaaaaaaataaacctagagtatttaagttacaaaatttctagaaattctgaaaaaaaatccgaattccaagaaaatttccagaaagtttccgaccgattccgagttccgacggaaactgccctttatcattttcgattccgtttctgagaaaatatttccgaattcgtttctgtttctgaaaaatttcgaaaaaattccgactaacagattccgtttttgaaaataggtccggaatccggaaagttttcagccctacattcaggccatggcaccacattttactgggaccatgactggctggctacatgctttcagctatggcacagtccaaacctccaaagttgaagacttgaagtttagcaccataccatgctgaaatctagctattacactccacaaaagcataattatcgacctggcttttcgcaaacggtggactcgaaatttcaactactgcttatctacccgacttttctggtgaaaagcctggagaaatcttcaccttcaccatgcataaatgcggattatgaatatgtgacacattaaacaggaatgaattaaaattaaatataacagtttgaacagcccatggatcctgttgccttttggaagctatggtttagcttcaacattttatagctgaaaatgaaaatctaggtgtaggatttgagtataacaggcataaacttgaagaatttctaatagccaggtaaacttataccattatcagatattctagtactaccagaagtgtgatcatagagcggaataatgtagcttctgggctgaaattgtaaggtcgagagcaagtcacaagaagcatctttttttacggtaatgaacaagatcgttcgcataatgattgttacagcaagtctgaggtgtattcctcacatggtatatcaagctatctaaaacttttcagaagatgggacgaaggaataggtgagctcagatatcttcccagattgctgccagcatttttgtctgatgatctttcaggtgtggtacactcgaaatccaggactctaccctctgcctgaaaaatatggataaaaattacgatcaatagtgataatacaaccaaacaatgacattactgaggatgttaatttatgctcaaaagtgaccaattacagaaaaaaaaaacaactgctatccttttatttccttttctatttttcaacaaattgctaccattttggcactcacaaaccaagattttgcaagagctacaagctaagaatattaacgcaaaggcagttcactgccgcgtaccatgatttttgtttgcaatttggttgtccctggttccttcttggcatctggattccccgtgttttccttatcagagcttatgttgtcacattggccgccgcttgccagtacctcacgggcttccaccaaagcagcagcagtctgcacatttatctgcttcatcaatcctagtgcgtcgtaactatcagctgggctggtgaagtatgaaccctgggaggaacgtatggacagaagttaaccaaagaaaataacagtaaacaaagtaccaaatgcgtgacagcatgaaggattaatgaaaaactattatcaggcacaacccagtagtccaatatatttccatccacttaacttaacccagtagtccatgctttttccaaacactggatttctatatgacacaatatgaacatgagaaataaaattaaaaaaagaggtaaatgtacctgaaaatgcatatcgacgaaccaaggggacttccatgctgaaggagattctagtcctcttttgatacctggggtatcagccaatctaacaagagcaacagtttagaatttcagaacgacaaattaactgaaggaacaaggatcataaaacaatctcttcagacttcagtagtgggtttaattccctgatgtattatcctaaatgtatcatcctaaatgcattagggaattaaacccacatttcagatgaaataacgtgccaattacagtaagatggtggctaaaaggcttatgataattcatttgatacaaaaatatttttcagtttctgtctaaagatggaagctcttgaagggatattctgattgcatagacaaggatgagcatcaacttcataaatcttgtactggtttaagtatctaagtagatatcaggaaagtgaaatatgccacaccactgaactaagttcaacatgaaaaccctgcaagacccagtttaagtttaggtttagcagacttcacaacagtggcgtagctagctaggtggcactgtggtccacctacaaatttgatcaagattaaaactatagtatatgtactggttaatataataaaaattgtatagtggaccacccttttaattgacctagtacatatagatggaccacctactttaaatcctagctacgccactgcttcacaactattcagaagcatgcaggagtatgggttcaatgcattgatgcttgctaatatcaagaaaaggaggaactcatcattcactagagatcagtttccaaaaaaaactttgattttcacataatctgagaagataaccaaacaaaagaatctgatggaaaacaacaaaggaacatgtgagtggtgtgaagtcttacatgttcacatattcataatccacatttatacatggtgaagatttctccacgatgagttcagtgggctttgatttagcacacactccctccttacagactgataaagatttcacatttgtgttcagcttctgattcatggtatttttgccataatctggggaaatgggatcatcgccgctgtgttcaataagaatacctgcaggttgctgcatcaaacaacaatatagataagaacaagatcatcagcaaaactcatttgctattttgcccgggtctgcccagcccccatatttcatactactaacatggttaaaaagcacttgctacactcagtcattcagggcattaacttggtccacctcctcaaagaaataaggtactactgacaagctaaatatcatcagaaactggaagtacttactaaattgcctgacaggtcatcattagtagctacatttgttgcagaactgcgttcccctgttgtctgctcgtccatgtgttcgtcatttccagcactctgtccatcttttgtctgttcagttgtgtagcccaaattttccttgttttcatcagagaaaacaagtttcttttccagagatttagaagaagcagatcgctcaatacgcaaaactgtagttataagtgcatcatctttagtggcattgatacaacttgtttgaatgccggtggaggatgtgtctgataccccacgatccttttcagtcccatatttcttctcgattcttttatctggaataggagacaagagatctctgtgacgtttcttcagtattgatggcgtgcatatgaagcttttggcagcactcttcagcaaaacgcccgtgctttcatcatgagtaggggagccccacaatctcattggcgtgcagacattcatggttgaatgcattaactgccgaatgccaaggggactaaactcttggagatcaccagaggttacaagatcgcaactgacaaatggaacatccaggcttggaaaacgaggaggttcgtagaagagggctcccttgtcctgttcatctggtgcagtcacactctgtgtaagcgatggttctttctctagactggcttcaggttcttccgcattagtaacctgttggtccccacattcaggtatgctttccatcgttgaagaaggaacatgtctgtcattgctacaaccagggttagcaaacatttcagcatcaccagaagaactggaagattgggtaaccacttctgcctgagaaagtggcatttccttccgccctggtctattatcgaaaggtgcatcatcagtcatagcatttgaacaaataagagatggaggtactgacatctgtggactctggtcatcagcaagccccatcacacttgaagaatttgatgtctgtggcatgtagggtggtgctaaaaaatgggtatctgcttcagaggaatatacatccgattggtgatttgatcttgaaattgaatcagcttcaactgcatcaggtccagaaagaaggccctgtaaggaaatatcctgccagagttcagatttcagacagttaggactgttgaagtcagcctcagacatgaaatgtagtttttgctcagctccagaatcacttgataacatagagagaggcacctccattgctacatcatatggctccagagatctttcatgattttctatactacaaacagtctggttgtctgcaaaactaggaacagttggcatttcatctatagtcatgtccaaattcagtccttgagcaaagtcctcttgcaagtgttgatctggatccaagttagaggaagaaacatggcaatgcacagcaggcaaagcagatgcaacagcctccgcagaagtatagcatgcttggggacccatggaagattgagaatcatgtgcttcattcttgtcaaaattcgcgtttacttgcaaatcacagcccaatggcacagtagtatcatgcacttgggagcaagaaaccttggcaagtgatgattgactacaccctgatgaattttcaacctctcggacagcaaaacaaccactatcttcactgttttgttgggtcatcgctggtgaggaattacaatttgcagaatattcatttagagggagacacgaaacttgggtaagtaaacctgatgacatgtatgaattgactttcttctttactgaactgttccagtgatttttaattgaattgtccgtcctgataggggaaacagaattttaaaaattcaatgacttcaatagtctaaaagaggtttttttaaaaaaattaacaagaagaattaattgcacaaaagtactagatcattgtgcattactccctccgtcccaaaaaaagtgaatctaggactggatgtgacacattctagtacaatgaatctggacaaatgtatgttcatattcattgtattaggatatgtcacatccggtactaggtttttttatgggacggagggagtaggtcataaacagctagagaaggcaagaatgctaaacttgaatagatgtgtcaaaatggccgtaaaacaaaaattttgcatgcatcatttcatggaaaagaacatagattaatttcaagcagctcttaggtaaggaagaaacattaccttcctggtaaaaattttgtcagctcggcccatttatttccatacattcgatgagcatgtatgagggtaatttcctcttcttgtgtccatgcctccttgtttatgccagggttaagatggttgtaccacctaaatgcagattagatgatacatctgtaaggcatccaatacattgtaatgatactcaaattaaaaataatgctaccatgcatattaagaaacaaagttaggatagtttacaaaatactgcattgttaaaataaattgtacagcatatatggattgtttaaatccaccacatggtttggcagccttcattgtacaacatatatggtctatggaagaactatgtcaaaagaaaacctgcattcatctgcagaacaaaggactagaagaaagcagtagttgctagcacaaagaagctaccctgttgagacccacaaaatatattgttctatctttttttttacttggtgcaagctaaatggaataagtaattttcatggcattaccgttctcgacattgctttcctatacgtccaggcaaagcttgagcaatggttgaccatttctttggtccaagtttgtttaccatctgaacaatgatttcatcttcctgaaaaaaggagcatgccattgtgagcgtaagatgagtaaccaatacagtattatttaagagatgaaaataaatcaaatagcatgcttacttctttggaccatggccctttgactaattcagggtttagaaccttttgccacctgtgcaagcattgtacatcggttctatccggaaagcattccgctggaaaattagaatgttctctgtcaaaacttggatttttaacaatatactggaaatctcatcaacagggtaagcatgtctagggtgtgagttaatgaaacagcagaatgctttcctgtacatgagttagcataacatcgaaaataaaatataaaatatgctgattggtttatgatatcctagtgcactaaagtacaaatataaacaatggttagaaaaaggaagccttgagaacaatatggtaaaaatgcattagatgttatgtataatattgtgaaatataaatattattcctgttagaacctgacatgaattgccatacaacagtatgtaatcataaaccaaatgcgcaaaaaaaaaataaaagaaaaaatccaagggagtctaacatatgcgtgataagctataaaatgcagtgttatgtagataccaaatggattttagaaggctattttattttgtttatatattccaacataaaaaaaaacaaccataaagaattcaagaaaaagaaaagtatgtcagctaaaagatacaatacaaatacaatgataaagagtaaggactaaggaaatagccaaagaatcattgcatgattttccatatcattgcagcaatcgaaagagcatacctatttttttccagttcttcccgttgtatgtctgaacagctctggacaatatggcatcctacatttgaatatcacatatgtgcaatgttaaaccatgtaagcaagaaaatttatgtataagacacatggaaattttaaatgttgcatgagaggctgataagatgggtccaggctcacatatcagtgaggcattaaaaggcatatacaaaatagaaccaaaatgctgctggttacaatttacaaagcatagaatcagaatataattgcacacatgagtatatgacaaaaacagaatagcaggaaaccccaaggtagaagagtgaagtttatgatttgcctcagagtacatgcaatccactcgttgacctaaagttgcccatggctcccttggattttagcaattagtaaattatcatattcaacttggtttgtaggaataaagcgccaaattaagcaactcaagcctccacacaagagtcgggatttaaattgaaatgttttttcatattaaaaaattataggtctttgccattaaacacattagatgtctacagtcaatcattctcaacaatacataaaataggattttcagtcaccatttaataattcgtacaggaaaaggactctttgtcaacagaaacacaagatgacattcatgtggtatacctcttcaggggtccaatttcctttggtggaacgccgtgtcggaccggtggtcctcctaaatttgcatggacaaagaaacaaaacaaaatttagtacaatatacattacgatagtcaaaagagcttttagccttttacccattgagaggtcgtcgcctttttggttcattgctgatttctccttcttgaggagccgacggaggtccagaaggctctccatccttatctggagcctttccgttatcgcttgtcatcatgagtgaagacaatcaatcctcactttgcagtagaaacctccaagggatataaaaatcattatactgtcaagcctcagtgaggccttcagggagttgctccaagggagaagcaatcataagctgcaaaagaattggacgaatgaagatattgtcacaagatgtaacaatagaagcattcagggatgcatagaggacaggacattgactaccctcataagaacatgaattctcatttcaaaggagttggggtagaattcatgtcattttcgttttattatagagatggattgtataatattttatctaaaaaaagagttggggtgataatgtgtctacaccccctcgttgtacatctttatgaaaactaaaaaatgcatcattcaccctgatgtatatgtagatggttgattgatatgcagtcaagtggataacttgcaaatggggaaaaactcctctttgcttccgtaaactattctgcaaatctacttattagctcattctaccctccgaagtccgaactactgaagtagctaatttcacatttagggggagtaaaccttaagctttctgcaatatataaaatagttttagggtagtaaaatgttttttctccttttagatttgaggattgtattttctgcaaaatgtgaattatctcctggtttatccataatctaaaaatatggacctcctctgtctgggtttcaggtttatttggtgctaaaagcgtctgactttcgctgtggaatttaccagacaaaaaatatataacacagatcttagtgatacgaattatctgggctcgtaagtcggtttatatcgtatagcatagcacctcctccatattcaaactcaaatcagcacaacacttcaacccaatcaccaacgaagcaacatcccaaagcaacaattaatcaagcagagagatggagagatatataccagatcaccaatcgccttgctgacgggcgagcctggacgcgagacgcctctgccgtgccgccgcctcgtccgccgggagcgcgtcccttccgcggcttctgctgctgccgctgcctgcctggatctgggtggcccgaaatccttaccagacgccctcaactcaaccaccgcggcggctgctgctgcggacgccgcccggcccgagcgatgacggcgcgatttgcggaggtgggagaacggagggaggcgcctgcggggaggtcgatggaagaaggcggcggcggcgcgcataggaggaggggggcttcgccggcggcggccgcgacgcgcatcggcggcgcgcggcggaatttcggaagagaggggaagatgagaagaggagtggatggctatttggcgatttttccagggtggtttctgcaaaaaggacggggacgcgagggggcgcgggggtgtgaaatggacggcggggagatggcccgcgtgggatccgcgcgatctgggccgtccgtttccacgtcggccgcctttgtgtcccgcttcggcaatttttgaatgccaacggctggattgcggctagtcgttggttgttgttttgttaccttttttttctttcccttttgtttcgatggtttttaatttgggaatggggtaaaacaaaattcgttttgaaaggatggggaaagcatttgttttgtgtgtgatgcaactggaacagaataattgtttgcgtgtgtggtgaaaatgtagaaacaattgagatttggttttcactgtttcttacgtttgaagaaaatttgaaattattggtggcaataaatgttccatacacgttgttatcatgttatggccaacaatagtcacatttcacccatggtatttttctctttcccgtgaataaatatttcatttgcaattacttcttgtgaaagtacatataaattatttcaaattctctagctagtattgctatttattggcatacactcataggatacaaacaggaattcgtaaaataaaagtaattcatagttatatttttcatgttgcaaggctttatactaccgggttaaactcaaaaccacattttgtagctaaaaaagctaataaattcgacgtgacctaggaaagcccaaggctcgagcctgagttttaagtcattgtcgagctcggctcattttatttggctttgatttgttgtagcctaatctgaccagggtttggagatctcactataccacaatacacatatcagggttatggataccacatacctaatagtagttgactaaatcttggcaagacccaccacataccatgtcctatacggaaacaacctgcggatataggggagttccggataaggaaagacaaccagagttctacatgaaaacgacaaggactactcggattgtatccatattggttccctagttctacttggacaaggggacacctatgggtataaatacaagtccccctaggaggagagggacagaatccacacacccaacacaatggacatggaagccacaacatagaagcctacatacgccaagacacgccgccggatatcgacttcagggataagcacggctagtaccctacggtgtctccggatactgtcaggagagacgaaagcgctatctctgatctcgccgggcacggattcgaggaggaaggctatcctgttgtcgactacgagtcagatcgtcagaccgtcatgtcgacaacagttagataggctaccccaaatattgtactggtgtgattatcatgaataagagcaataccggcttcggccaacaggatgtagggttattacctgacaattcaggggcccgaacctgtataaaaatcctcgtctccatctcttttacctcagtctcgcgtataccctagtaccaacgatccctatgccatgcaaataccgtaatcgagacatcaaacgtcgacaacacatgttccataagataagcggcttcatcttttcgcttatatttatgcttatcagccaaaatttgaattttcaaccttatttttgagctgattttgggttttctcattgaagtttacttttcagccattgtttttaaatcgctaaaaatacgtatataaaaattttattcaaaaattacttttcgtttgcaaatatattatttggcttatttcatgaataagtgaaacaatagggccggaaatcttccaagttggacatatccttgtttacacagcgggatagtcattgtctcattgagcaatgagcatatgatgcctattattagcatcctctttagcgacaccagtgattgcgtcaagtttaccgtgacttcacttataaaggttaaaatcatgatgctcataattaaataatcatgtccatctataattggtgcataacctaaaagttatttccactgtataacaattgtgcttcagtgcacctggtagtcgaccacaacatcacactcgttcccttaggcgtggcctgtcgttttgatcaagcagtactaaacctaattttattcaaggttgagatatatttaagcacgtggtcttccacaggcattaccgcttttgggaatttgctggaacctaattttattaatgttgggatatattcaagcatgtggtcttccacaggcattgccacttttggggtttgctcggagcgtagtgtagctccgcctcggcgcctcctccctctcgttgtttggagtaaccattttttcgcaatagttttcccttcttttactttttggttttttttctttcttcctcctggtataggcttgtctggcagattatgttgtataaaaaaactcttttacttctaatatattgacgtgcaatctttttgcgcgttcgaaaaaaaatatattcaagcctacatgtaaaacgaaatggttcattagcacattattaattgagaattagctataaaaactttaaaatgtattgatataaatttataaagcaacttttctatagaattattttttaaaaaaaattatcgtctagtagtttagaaagtgtgtccttaaaaaacaagtgtgtagaagttgaaaaatggtagtgtcgaacacaactttaatcatccgtctagcccattataatttactacaacatatagacacatgctacttttttttagaatattttttttcaagaattatagacatgctacttagtatatattcgtgctcggacacaacttggcaatggtaattgccgcacagcctcatattttttgtttatgcctaattgcatatacttattagctaaaattgaaattttcaaccttaaatttagagttgattttaggattttgtttttcaacgtagtttattttttagcctttatttttatatcatttaaaaacatatatatatataagctttatttataaattattttttatatactgtttcgctttttttttcttcaatatgccaaacgaaaaggatgctagactcgtggaggtgggttgtccgatctgggctcatgctcatccaagtcaacaaactcaaatatataaatatgcgaacgggcacgtttaagatttgccttgtcccaggatctcactggaaaccatttacactggtgtacctctgctcctcctcctctcccataataaggccatacccataatcaatactaccagtacggcagcactactccaccactaccgcaccaccattacacccaagaaattaatcccacaactcaaggccggatttagttatcaattttttctttaaacttttaatttttccatcacatcaaaacttttctatacacaaactttcaacttttctatcatatcattctaattttaacgtgaagtaaacacacttcgaatgtacaaaactccaagcacggcaccactactactactcagcgcaccgtgtcgcagcctgcgcgcatgtgctcccccctgcaaccgcacgtctgcgccgcgccgcacgccgcgcgtccgtccaccgcgtccgtccgcgcggcgcggcctccgtcctcctccgtcgcctgctgctgcaccgacgcacgacatgcggccaccgcccggaagctacctaccgctaggagcatgtgtaggcagaacctactccgctccaaaaataaatcaatctcctacgcgatctagatgtaacacatactaatactataaatctgagcatacgtatgttcatatttatagtactggaatgtgttatatctcgtaagagattgatttattttgagacgaagggagcgacttcatctcttttaaagctagaactcaaccaaacaatattagcttcaccttaaaaaaagaaagctaaaactcaaccaaataattttagcttcacctaagaaaatagaatagcgtaaatgctatcacaaaataaactaacgaggttgagttgagtttatactattttataatttcattgcagacctagtttttaagttaaatttaggaattgaaacgctgttaaacgggctagctctagtactagcaaatcctcgtagcagtatgtaacacatgcgctgtggcagtgtgacactgacacgatcacacggcaagggccaattttgaagaaagaaaagttggaatctaaacagacccttgcgattggttagttggggaattggagatctctccggtcaggggtgatgacagagctccgatccggactcggtgttgccggcacatgcgccatggcccatggggcctcttgcctgatcaccctctccccacagctgaaggactacgaggacacattctcactgaccggcaagattcaaaacttcagagagttgttgtattattcagatggtctgaactctgaagaaaaacgtggttcacgatggttgggcaccgccgctaatgatgtgtctctgtctgatttttcccctgctgctacgacaaactctcctctgatcatgctctggtccctagcaaaccttgttaggttgggattggtggccccttggatctcaaagtagtcccaaaatctgaagataagggatcttttcaatggaaggattttcttgggaattttacagaatttaaatcctataagaaaaaaaaattcctataaatacctttgaaacaagaaatgagagtctcatcggttcccatattccctaataagccaaaatggcttatcagagaataaaaattaatttatatttaaaacatttatatatttgttcgcatcgacttaaaagccaacgctaagatatcttaaattcaacttcaaaattaagttcaaacatttaaattttgacttttgctttaccttattaggccaatcaataggctctgagatgcgtaaattcctatgaattggcctcctactacctcctaatgtcctataccgtcaggaaaataaatataagctctaacatcatgtttttattctcctttgagaagtccaatgcattctttctccatctctctaccacatgtaaattcatttttacttcccgtgaaccatccaaagacggtgaaaaatatactatttctgtattttaggatcgtatgtgattctatataatactttttctctattcctacgtattttataatcatgtttttttaaaaaaataagccctaattcagtaacttgtgtaggactagtaatgtactacctactcggtagtattttgttctgctccctattgtaaaaacaatacttcacccccgggatcattattgttattgtcctgctacccgcatctacaattaaagattgtgtggtcactttatctgcccatgagcacggatgcttactcttaaaagtgtcatgataaattgcagcaccaggaaaccttggacaagaaaaccgggtaaaattaaatgcttactacgtcaaatctaaatactacctccgtcctaaaataagtgcagccgtggatatctgtgcccaacgtttgaccgtccgtcttatttaaaaaatttgtgaaaaatttaaagatatttagtcacacatagagtactattcatgttttatcatctaatagcaataaaaatttttcaaataaggcaaacggtcaaacattgaacatgaatagtgtaaaactgtatttattttggaacggagtgagtatcagacaaccaacttactcctacccaacggtccaagagaaatcctgagaaacaggcaacatgcaacatcctctccttttgctgtaacctgtactaccggactgttccttttagattattcactggtttattaaaacaacatactgttagtatttgctccacgctaaaaaaatattttttggggtaaaatacttcttatactatattattttaaacgcttattctaagtatttttaaagcttatttcttaaatatttaatttattcttataataatcaagcagataattcatgataataatgttcccttgataataattaaacaccttaggtggtatttgtttatactgtagaagataaagttaaagaaaaaagaaaagccagtagcatataattaattgagttttattttattgtaaatttgatttaatagtttaaaacaacttgtatatactccctctgtcccataacgtagcaacttaagatgagatgagacccattcgagacatgtccagatttgtagtcaacccatcctaggttactatattatgagacagagggagtagaaagcttttcatataaaatacaccgtttaacagtttaataagcattcaaacaaaaaaacgagataggatatgtatctcagcccaaaaagaacagaataaatcaaactgggcataaggttcagatttaagggggaaaaaaagcttcagaaatgggacctgcctgagtatgacacagtggccctactgcacagacacacataccctccctgaccctgagtgtgagtgacatcatcaaccatcatcagagaagagaagaagagagggcatggtcaaagtaaacgagcccaccaccggtggcaacctgtcccctaactccctttgctcatcaaaagacagagcttgagctctctcctcatggccaccaccactagcactgtgccgtggtagtggcagcagtaggaggtcactgcactagcccacatgccgctgcagtagctagtcgtcgtagcagcagcagtatactactagtagtagccttcttggccttcttcttcttcttcttgcacagatcttgggggcgcaatcagccagttgcaggcttgcagcagacgaacctcggagagagaggcctgcgttcttgcgaaagaggagctagaggtgggtgccatttattcccgtcttcgttcttggcttttgtttttggttgtaaactgacaatttgggggttggggattgagttgataatcggagatagtcatatagatggtttctgaaaaaaagcttctgtgagttcatttgcttggccactctggtttttttgattgtttacttgggggaggtaacaacaagaagaatgcaggggacttcttgtttattggtcatcttgtttagctagttaatttgggggttttttttttggcgctctacagtaaaatttggaggattccatgtctttggggagataaaataaactgtccagtgttgatacatgattcattacactgttgtaataggcagtctgggatttttggtttaggatttgcatgtttgattttacagtatgggagtcatgtacagagttaatgagagcgaatgacctctaactacaaactactaccttccagcttccatcaccttgattcactttccccctttcccttttcacctttctataagagaaaagtgtagtgtactgcttgtgagctatcagttctttattcttgacatgatccatatgaaattcgagcactggtgaatcgagagaagaggccaggtaggtagctggtcaatgcatggatattccgtgggcagatagagaaccctcgtagtagctttctttcttgtaaccacttcttccactgcttctccttgacattcaatttctctgcattatttcttgcaaaagataaaccttggtatatgatatcctaattttctatatttccctctgtaagagtagctttcttgtgatttgcagcttcaggataaagcagacaccaattcctcaaggaaacaagttcttaaattgacacctccttcataaactattttataaagattcaaagataatgtaacctttcctccctcctcagtctgacctgtgggataatttgttcacttgaatttgtttatcatctgttgctattttctgaccatttcggtttgtcaatttgcctttcttatgttgctccagagaatagagaaaatgcatcaagacagtttcaggtcggtggtttgcagatccctttcaaagagtctttcctccaaaaccaaagagagcagctaccctgaaatagctcaatgtgctgtcccttgtgttgtcacattgcaacctacggtttgtcgaggctgccaaggccgggattggagcccatcacaaagcaacagggaggatatgtccatgatgttgcagaaagattacctgatggcatcctcgctctcgaggcgcttcgcggaggacctcctaagaggagccatggacctccaggattcgctcacgatgctcgagaagttccaaactgcgtcgcggagcatgagagtgtcaaacaagaagagaaggccagagggttgtgagagatcaccggacacaagtggattccgtggagccctgtcggaagcgtcaaacgccaagaagatggtgggtagaagcgccagcagtggattggatggggaattaacgaattctactgatgagctgaaaagagtgatcaaggatagcttttacaggaagaacatcttgtcggtatatcccaatgatgaacaggcttccatgagccagtcattacattacatgccaaacaagaattcgttatccaagcctaatgagcagaagaaggcagcaccaagatcattgccatcttgtgcaccagggcagtctgagaagtccaaatccccaagcttggtagcaaagctcatgggccttgatggattgcctacacacaatagcaataccttcaaaaaagacgagtcaatgaagacagtaagttcaccaagggcactttttgatattgagatgcctaaggtccagcaaaatgatgctcatatgagttctccttattcccgaaaaagtaatgtttctctgtatgattctactgtggttaatgagattggctcaatgaaaacaattaggagggaaaaaggcatagagcaacctcaaacccgagcagccaaggatatcaaggttgtatctcacacaagtcgaaagcaacaaataaaagagaccactgaaatgggcaggagaagtagtgacaaacaaagacctcattcgacttataggaacagagaagggaggaaggataccaagtctaaaacaggatcagcatctcggtctagtgctaatacagtgaaaaggcctgataagaaatcaatgattgcatcaagtagcagctcttcaacatgtcgcacaaggaagccggtcgcacgtaaagcacctagtaattcgagggagaaggcagtgtccagtagaagtcgcaagaactcaactattgatgacattgtggtatgcatcttctattatagcatagcctggaaatattttattcatctgaaatattaaactattttggaacattgtaccctcagatttaaaaacaacatttatcttatttttccctttagaagtttcagttaaatcattcagaccttgaattggaacagttcgttgaaataatttatttcgcttaaatcacgggatctttttttgctcctaacgtaggcatatgagctgcacagagagttcatacaagttgatggtccatccactgaacatagcgcaacacctagtgatgaaagctgccaaagtgttgttgattgggacacagagcctagcattgatggtaaggaacgctgaatttcttttcattcttctaaacatgttttcatttttatttgtcactaatacaatttgaagcctgtgaagtaagaaaatttcaaatattgaacttcaatcgaatgttgaaatttggaataaaccatttagtgaggaatttgctgcttatttgcaagtggaatgtgacagttttggaattcacatgcagcgggtgtgacagttttgtcccgccaagccagcgagggtggcgtggccaaataacgctgccacgccagtcgccagctagaccagcgtgaccaaaaaacgttgccacaccagctagaccggcgtgacagtattgttttgccacgctagtttagctggcgtagccaaaagattcagatcatgtaaataagttttgatagggtttatttttaaaattaaaaattaaaaaaaaatcattccgctttaactattgtagacattaattccacttctatttacaggtttgtatctaataacagtccaagatgattaatttcaccacttaaaaacctaaatgttctctcttgcaatgaaaataggtgtttccacactaaacagaaatcttttcatgacaggcattcgggaagatttgagtgaatcctatgaagcttcagtgactaccagctctgcggaaagaaccgattcagctaacggagatccttttcacccatcgacacacttagtatcaaaaaatgaagttgaaataaaagacgagatgagtctgcttctcctaagtgatcaaccattccttacccgggcagcagaactcattggcatcggcgaaccggggcatctgatcaaccgatataaaggtatccgcaaggcccagatgggtaaccatgagcttttcgtggacaccgcaacagagcagctggagcggaagcatcgtcagcgaaacagcttgtgttacacaggaatttggagccagaaatgcagaacagcaccatacttctcactggaggcattgctgacagatattcgcgatgcgactcgaaagctgagcatctataccgaagacgacgatggctgcactacaaaagacacactatacatgaaactggagaaggatctgagatgcacagatgcgtcgatcaacagcgtgtgggatatgggctgggaagattggattttcatggaggaaacacaatgcttcataagagatgttggggagagcattttatcagggcttatcgaagaagctgctctggacatgtgggtacattgatctgggaaaatgaagcctaggtggttcttgcgttcttggagaatttctagctttgttctccacttggctggcacttctcatgatttccagtttccagtttgtatctatctttgttacatttcacctgtgtaaaaaatgaaaaatgtgcaatgatttagagagttgcctaaagaagtgatggagttgtcttcaccaagaaacaattgtaatttgtgcacaaggtatgaaggcatgatgaatagacaaagagcaatgtttcgtttcactttttcctttcgatgaatgaacaatgccgaggaatctcaaatagcaatgagcaaggacagttcttgttttcatttcttttttttttaaaaaaaaagctagttgtatgcccgtatgttataaagggtcacgctcatataattagggacggattagacgggtgattgatgatacaatattggatctggtggttactttttacaaacgagaacacacgtacattgagaggaggaaataaaaggagaagggccccatttttaaagtagtaactagcattgagagtaggaaataaaatgaggacagttgtgtttgctaggggaggatgggaacctgcacactacgcacggaaaacgatgtagtctattagcgcgtgattaattaagtattagttatttttttaaaaaaaaaatggatcaatatgattttttaaaaaactttcgtatagaaactttttgcaaaaaacgtaccgtttagcagtttgaaaaacgtgcgcgcgaaaaacgaggagagtgttggtttggtctaaaagagcgtatttttttaattaatcattttttatcttgagattttttttatacagtgcagtgggcgaggggaagatggacaataaacaggagagaaacgtaacaatattatgaaatctgtgaatcaaaaagagtaaagcacttactgatggagatagcttccaggcaagttgggtggcctccctccgtttctgccttcttcattgtcaacaaccatcgatgcctataaaatattactgaaaaacgctattaatcgttcgagctcgatggcgatgctagctctgccactgcaagcacttgtttttttcatttcttaaccagcacttgatggtgtggttggttcgatatttaagaccttttaatccaaagtgagcaactcatcaaatcccttttacaaacaaaaagtattacacccgtcccaacaagttttagagttagacacaattattaagaagatactatctctatttttaaaatatagttatttctagcacattgacttgttccaaatgaagctatttctccacctaccatctactctcaaccaatcacaactattctctttacctactttatcttttcgaccaatcacaatcctccttcaattatctctatctattttttaaatatccgtgcctacctaaaaaagtatttatgatttgtaggtagataagattatgatttgtcgagaagtgaaaataagtagaaaaattaaatggtgaagggttatgattgggaagagaatgccgacgaagaagttgctatattttgagataaatttcgaacactaaggtggtgtttgagaggggagggacatattttaatccatctcacaaaaacataaatcactcccctagagacttatacttatataagaggtactaaacacccaaacaccacctaaaaaatgttttatcttccgatgaggaattagttagctctcgaacagtagtacgagatttgtgcaagttgtggtcctgtcgtcatcctgtggagttgtggtgagtgtttgacgaattttttttttttttggcggctcgattgcaacccgcggcccgcaacaaatccgacgccaaatcggacacggccggcgactccggcgacccaccaccacacaccaatcctcctcctcctcatcgccgcctgcgacggcgaggcggcgagcgatggattccctgggcgtgctgctggtggcgccgatgaacgcctacctggagcaggagctggaccggcggtgccgcctcttccgcctctgggagtcccccgccgaccgccgcgacgactacctccgcgcccacgcctcctccatccgcgccgtcgtcccctacgccctccagggcgtcgacgccgccatgatcgacgccctcccctccctcgagatcgtctcctccttctccgtcggcatcgaccgcgtcgacctcgacgcgtgcctccgccgcggggtccgcgtcaccaacacccccgacgtcctcaccgacgacgtcgccgacctcgccgtggggctcgccatcgccgcgctccgcaagatcccccaggccgaccgctacgtccgcgccggcaagtggaagtccaagggcgacttcacgctcaccactcgggtcggtttcttttttccgaattccttagcttccgttctactagtattatccatttacgattttgcttaatctttctccaaaaataaaaagttcttaggtttgatccgtagtttatttacagtttggtttagtcgaagcaaatatagcacaaaaactgattgtacagcacgaactgtttggttgggtactattgggtacagtggaaaatacgattgaatggaaggaaaataagtcagaaagggagagctggaagtgagaaattgttggtcctgatcagatgtggctctagtttttgtttcacatcattagatatcttccttagatagtctaatcttaatttgatcattcaaacatcgttcttttataccatgtgaactatttaactaaggaaggaagcacgggaaatggtttcagagctctggtggatgcgtttttgtgagttggaaatgcatcttatttggctgaaatttaaacttgtttcgagcaggttgttgctgattgtagttgcagtgattttctatgggtctaaagagaatcatcgtgttcagaagttactcatctgataatgctgggtgctaattttgggttgcagatggttcttactgagtggcgcactgatagcagtcatatattaggatgttagtctatttaccggagtttatccatccattttattatgcatatgctgctgttattgtgcctggagaatttttcctttcaattaaaattgcattacagtaaactttatgttcagatgcagtatctgaaggacaatatagctagaagaaagattaatctgctaacgttcaattgattatgcataaattggtgtgttcgtggaaatgtaatgcttggtattcttatttttctgcagttcagtggtaaaagagttggtattctggggcttggcaggataggcttagccgtagcaaaaagagctgaggcatttgattgcccaatcagctatcattcaagatcagagaaaccatttccaaagtacaaattttatccaaatgttgttgacctggcagccaactgtgatgtgctagtcgtagcatgctcacttaatccagagacccgtcacattgtaaaccgtaaggtcattgatgcactaggaccagagggagtgctcataaacattgctcgtggagcacatgtggatgaacctgagcttatatccgcgcttcttgagaaacgcttgggaggagcaggccttgatgtgtttgaggatgaaccctttgctccagagcagctttttgagttagataatgttgtcttagtgcctcatgtggggagtgacacagaagaaacatgctgggcaatggctgatctagttctacaaaatttagaggcacatgcattgaatcagcctttactcactccagtcatctgattgtttctgttagaagtctgggatgattgtgccaccactactacattctgtaatcccaattagttttctatcttctgtttattagttcttcattttacccatcattagggacatatgccactcttttgtaagacatcattttatcggccttatggctgtcattcaatcaaccatgacaaataagatgatcagttccagaagttgaatcttcctgtctttggatgatatattcacatattctcagtttctccttcttacaattttccattctgtcagagcctattctacccttcccagttttgtcatcaccctattatctttctcatcatcttgtaacaaatatcatctttctttgttcaacatgatatgatcttctgatgagagttttttgtttatcctttttgcagttcagtggcaagagagtcggcatcatcggtttgggcaggatcgggctcgccgtcgcgaagcgagtggaggccttcgactgcccggtgaactactaccagaggacgaagcaggatcaccccggctacacctactacccgtcggtggtggagctggcggcgagcagcgacgtgctggtggtggcgtgcccgctgaacgagcacacccggcacatcgtgaaccgggaggtgatggaggcgctggggcccaggggcgtgctgatcaacatcggccgggggccgcacgtcgacgaggcggcgatggtggcggcgctggccgacggccggctcggcggcgccgggctggacgtgttcgaggacgagccgaacgtgcccgaggcgctgctcgggatggacaacgtcgtgctggtgccgcatgtgggcagcgcgacgcacgagacgcgcacggccatggccgacctggtgctcggcaacctggaggcgcatgtcgccggcaagccgctgctgacgcaggtggtgtgagctaattgagtgactggatgattctgatttgattgattccaaagcaggtgcaattcgacaaaatgtagtatgtactgtttcaggatgtgaaaaatctgttttccctttttgtaaacacggtcggtctgggacgatccagtaataacgatttaatatttgtcattggaaatgtgaaaagtgtgttgggttgaaacggaactgcattgccactgctatttcaggtagagtaatagagtattattttttttctgaaaggaaaacggcaagagtattgccgaatatattagagggaaatagaaattcagggattacagaggagcgattacattaagaagcggtaagcaactacttagagaccaaagcctctttgcgaagtgtctagcacagatgctactttcacgaatatcttgaatgatttggtgtgatgtccttcgcgtgtctggttcttctccccctaaaatttatgcgtttctttgaagccagatatgccactgcgtcttaaccggggcttcagctcttggcttccatcttgctttcattttgcacaatgcatgtcatccattcagcaatggagcaataagattggttattttttataccctgggcagcagtgacaaggccccacgtttccttgaagaactcacactgttgaaacaaataatcagtgtcttgaaaagccccctgcataggggcaaatccagtcgcactctagcgtcggattagcatcggattagcatgttttcggccgagtaatagagtattatataggagtactagtatatactccttccatccctaaaaaaactaatctacagtggtgttcttttgtggcgtagacgaagatgaaaataaagatttagtgttttacgcaaaataaggtgatatttacgtatgattaattgagttttaattattacaaacttgaaaatatatttatctgatattttagaacaatttacatataaaaagttttcgcatgaaagacactgtttagcagtttgaaaagtgtgtcacgaagatgaaaattttcatccaattcctataggagaaacggacgggaccatatataatgaatatgaatatgaacatattcacatccatattaattgtattatctctaatattataaaaatcaaagacgtttttgccggtattttgatacgtcatgcatctatgcgtcggtttttaagttcttttagaaatacatatccgtatctgagtcagtttttaagtttgttcgcttttaaaaatacagaagtagtcatataagaaatcactttagaaaaactcacatgttaacttgagacgatcggactcctaattgcagcttatgattttctaaagaaaatgtatatatccaagcaaattctcacagtgcatttcaccttaactaaaccgtataacaacaataaaattaaaatagcatcgcataggtttttttttatattctaatgctagtttgatttttttttgacggaaggactattaccgtccgaagagattaaccgacaggtgggggccacgcgttgcatggtcaaaaggtagggtccgggagacagccacacgagttcctctcccgtgtctctctcgctcactcggcttggctagctcctgtctgttcccctcgccgccgcttccgagtggtagggtttggctgctaccggcgctggtgaagaataagaagaagaagaagaggcaaaagcgtcgtcttcttccccggcctttcttcctctctggctctccgctcgtgttcctctcgcgcggcggagatcgagggggcacaaccgcacaaatcccattcgtttcgatccgtacgtttcggccttcccaaaatccccacttccatcatcacagcggtgcgggggggggggggggggggaggaaagtgatggtttctgcccgacaactcccaaatcttctcttcctcttccttctcaatccgattgttttctgaaactaggttggttatctttcttcttttgtcccttttgatttgatcaccgtattcaactcgatgtgctttattatgtgatcaggttgcgaatgcggatcaaactttttgtatttttgttcacccatttcccactaaattttcaactaggaaaaaaatgaaaaaaaaaaacgcgccctgtttcttctgtacaaacagaattgccggggaggaaggtccggtggtggtgacacttggcgagatctgctgcatcggtggtagcagtgccacctttttctgtccgctgttgagcttgtgctacacgtggcatggtcctcccttcgctttgcagacagcattttcaacgcaaaagttcacccttttttctgcttcctttttctgtttgcgaaattcgatgtagattagatttagattagtcctatgtgtctcttgccgggttcttcttctcgggactcatgcttgcattgcacctctttgttccagcgaaaatgtgagattttgaagagatctgccattgcaaggtggtactgtacgctccatagcttttccttccggttttggatttatttattcttgttctttttctcgaaaatttccaaacacaaaccttaggctacgttctccatgtgcctttcgtcttcatggacaaaaatgtgtatgcttgcagtttcttttcttatgggttttctctcttcctctaataaatctttctaggatgaactgctcttaggatagagatgtacagttggttcttttctttttttttttcagttgagtcttgtacacgactgtttcatacattcaaacaaaagtaggtttgatcgaaactgaatatggtctacagctcatgctgaagaagatattggctttttcttcttcagataggttcaacaggttgtcatcttcagatgcttctggtaaaattgcaggttcagtttcagcaagagctaaactcgatcggattcagaccgcgaagctaagctttgcgaaggaggatgaagccggcgacgtcggagtccgacatgacgagcctcgcgacgtcgtcgccgtcgcggtcgcccaaggcggcggcggcggcgtactacgtccagatcagcccgtcgcgcgactcccacgacgacgacggcgacaagtcgccgtcgacgcaggccacgccggtgtacaacaacagcccgctcgactcgccgtcgcaccactcctcctccttcggccgccactccagggtctcctccgccagccgcttctccggcaacctccggtcggcgtccgggaggagcaggcttggtggcggcggcggccggaggcggttgggcgccaaggggtggcgcgacgtcgacgccatcatcgacgaggaggaggaaggcgcgtacgacgagtttgacgacgacgacgatggcggctatgagccatccagatgctgcgtcctcgccttccgattctcgcttcttgctctagccttcaccctcgtctgcctcatcgtctggggaatcgctcgccattacaaacctggagttcttgtcaaggtatattatcactgaattcgtatccaaatcacacaggttcataatgagtttgtgatggttttttgaacttgttaaattattactgatcttttgtctgattctagtagcattgtactaagtgtttgtttttgtgtttcttcaagaacgcaaattcataatgagtttgtgatggtttttgaacttgttaaattattactgatcttttgtctgattctagtggcattgtact

SEQ ID NO: 17808 - DNA, 7172 bp, Oryza sativa
ccgacaaagctggtgacaatgaactgctctctgcagataaatgttcacaacccttccacgatgttcggcattcatgtctcttcgacatcgattcagatcttgttctcgcaaatcgcgatcgccaacggtcaggtagcagctagcaccttcagcaccagaatttctgtactgcaatttcctcttccatattgaactacaaccacattcttaagctcaattcatcctgctgctctgcagttggagaagttctaccagccaaggtcaagccatcatgtcgcctcggcgatcgttcatggcgagaagatccctctctatggagctggagaaacattcgccttgtcgaatgctggaggtgctgtgccactgactctagacttggtggtaagagctagagggtatgtgattggtaagcttgtgagggtgacacacacaaagcgtgtgaaatgcccggtggttatcgattccggtagctccaagccgattaggtttatccagagtgcttgtagttacacctgatgcagtgccttggccttctataatctcaataagggctgtgatcatgtactccctccgtatcataatataagggattttaagtttttgcttgtaacgtttgaccactcgtcttattcaaatttttttgaaattattaattattttatttgtgacttactttattatctaaaatactttaagcataacttttcattttttatatttgcaaaaaaaatttgaataagactagtgatcaaacgttacatgtaaaaaatcaaaataccttatattgtgggacagagggagtagatatttaggtccttcatgacatgagcaaacaagaaaataagcagtagttttatcttccaattttgccatgttgatatctcttgctaacatattgtgatgtcgttttatcagtgttacatgtcattgcgctttgcgacaagtttttatacactaatttagaagttggttttaaacaatatcctctgttagtttcatagatcgatgaaatggttcagaaagaaattgaaggtggaaaaaaagaagttatctcctgaacagagtttcattctaattctacatcttcaaatttttcacagaatcattcaacaatttgagttctcttcctgtcctcagcaatgacaacctgattcattgaactagacataccatatatcatcagtgttttggaaaacaagctgtccatgatcaacatacatttgctatcttacataaacatatttcccagtcttccttccaaaatttttgagacatctgaagcgagttcttggcacagcagaaatcatccaatgtgtgttgagaaatagtaagaattgtaattgacaggttcttgccagtgtacatttttcttttttactgagcaacaacacaagatggcctcctctaactgaggaacaccatcttcagtgagctgatgctctggccatacactccacactgcatctgaagctgcttcctgcaaagccacgtggatctcaccggaagccggcacgatcgccggagcagcgacagcgacggcgacgacgacctcgccgtcttcaagctcatggaagctcttgtcacctgcatggatcgtgacgcgtcactcttggcatggccattggttctctcgaagctctgcagcttgtcgtcgccatggttgtccgggaagtagggctcctcgtcgtcgtcggcgtcgaggaggtcgccggaggaggaggaggagccgagcgcgcggttggcgttctcgacgaggccgacggccttccacgcgtcggcgacgaggcagtaggtggtctgcttggggcggacgccggcgtcctgcatcatctggagcacctcctcggccttccatggctgcttcagctcgctgtagccccagatgagggtctcgaacgtcctgaggttcgggcgcacgccggcgtcgcgcatggcggcgtagaccctcacggcgttgcccatgtcggcgacgctgcaccacccgctgatgacggtggtgaaggtgacgacgttggggcggacgccgaggcggcccatctggcgcaggagctcctccgccttctccggctgctgcgcgcgcacgtagcccttggcgaggatgctgtacacctgcgggtccggctcgatcccggcctcgatcattttgtcgaacaccttcatgcacttggccatgtgccccatggagctcagcgcgttcagctggtggctgtaggtcacgatgtccggcttgatcccgaactgctccatcagcccaagaacctgcaagaacacaagatcgcagatgaaaactcgatttcgtttagtgttcttggttattgttttgtgatgatagctcacgtcgtcgacggcggccatgtcgttggcgtcgaggaagcccttgagcagggtgttgaagacgatgacgttggggagcacgccggagtccttcatctggcggacgcagcggagcgcctcgccgaggcggccctcgcggcagtagccgccgacgatgatgccccaggtgcgctcgctggtgcggagccctgcctgctgcgccatctccacgacgagctcctcggcgcgccacgtctcgtcgttcttggcgtacgcgctggcgagggtgttgtacgtgacgacgtccgggtcggcgcccgacgcgcgcatcctcgccaccacccgccacgcctcctccagcctcccggcgtcgcaccacgccttgacgaggatgttgtacgtcgtcaggttcggcctgaccgccgcctcgccgccggcgccgccggaggccatcatgtcgaacacccgctgcgactcctcggggcggccggctatgccgtagcccttgatcagcgtgttgaacgtgctcgccgtggggcggcagccggagtggcccatcctgaggaaggtgttcgtcgcctcgcccatccgccgggcctcgacgagggcgttgatgagcgcgttgaagaagatggagtccgggcggaggccggcgtcctccacctcggcgagcagccacgggatggtgtcgaacgcccgctggctcgtcagcgccgcgagcagcgtggtgtacgtcaccagcgacgggcggtggccgtcgtcgacgaggtggcggaacgccgagtgcgcctggtgcggcctcctcgcgtcgatcatggcgcgcatctgccgcgtccgggcgatcaccgcctggcacgtgtgccccttgccgcacgtcgtgcagagcagcttctgcttctgcttctgcggcggcgacggcggctgctttgcttgcccgtttgatgggtgcagggcgccattgctgccagcttcgtgcttctcctgaacacacacaaagacagaaatcaatcgaggtgttcttcgttttctcaggtagacagtcacaaagatgaaacaaacgaggtgcaattataagataaaagaatactttgaggtgtgatccgtttagcacttctccattgattcttatcttgccattggtcttgacagtggaggtcaatgtgagctgcacaccgttctctaccatggtactatgcttctgtcagccagctccttaacctgaaccataatttcagaatttcagaactgtgctcattttcatcaagtccccaacatatgtactgcactaatgcagtcagtgggcaagaaacacatgcacacattcggagtgtatagatgaaattgatgttcctactcttgtctgtttttaaaaccaaaagaattgcatattcctgggaagctgttaagagcaaaatgtgatatttctctgatccatttccacagtgaaggacgcatttcataggggcatcctggattcctaacaatgaaaacatcatttacagaattttagtggtcatgataatcaacatcatcttcagatttcatggaacacgtgttgtattaacaaatccaatgaccaaagcagttgatggacaaactaccagaattaaagaaaaaaaaacaaaacagaaacaaaatcaactcaggatctgaaatacaaaaccggccttatcctgaagcctagaccaattcaaatgtagaaattccattattttcacatattatatcagcagaattattttatacaagcagaaaaacaagcagttgcagagcgtcggtcgacaagaaactgcctacgagagagacaagagaagctaattcaggacgaatcccggtagaacacgagcgagcgagagggcgcgttcacctgagaatcaacgagctactggcagcaacgagcgttcattggccaaggagagcgagctgcgctgcagctgcagctggtggccagcgtgtgcctccgtcccccccgcgctctacgcacgcacacgccgcgcgtggccagccgtcgctgtggctcgcaagcaaggcgggcggagcggcggagcgacgtggaggaacacgaggcgcaggcggcgtccgcttttttttttttttttttttgcccccggtggagctttttttgggtttcgaagtgggggggagcgctttatccgcggtgaggagcgaaacgggtggcgggggaagcgcggccgctttggcggttgccggggtgaactggaccggacgccgagggagcgtcgcgtcgcgtcgccggttgggtgaggctccggagcggccgcgtggcgcggtttgcagggaggcgtccgatcccgcgaggccccggacgtgggcgttggatcgggacgggacaccgtgtggtcgctctcctgacgcagcgttggatctgatcgagccaaagctaatactctccccgttttaaaatgtcggacatcgttgtttttttcaagtatgtgtttgatcattcgtcttatttaaaaaatttaaataattattttttttcatataatttgattcattcttaaacatactttcaagtacgcaatttttttaataaaacgaacgttcagacatgcgctaaaaaatcaacggtgtcaaatatttttttttgaaacggagggagcagctcttttcacttcaacgtgcaggcgggcgcggtataaaaacgacgcaaagctaacaaaaaatcacatggtagtgtagtaaccaatcttgtcattgtacttgtcaattggaattttattgtattacatgacatgcacgcgcgtacatacccaacaccacacttatacatccacaaatacaactcctaacatacttgtgaagtgctataaattttgactaccatttgttttaacttgcgggctcctttggattgatggtttttcaaagtacttatggaggattgaaaatctcaagaaagttttcatacgaggctctttgtaccaaaggaatatgaatgtcaaatttcctatggattgacttcttttcttctatctaaaataaaataatacctccattcaaatcgaaaataaacatgagtcatacctcatgttttattttggattaatttaattcatgccattacacacatgttatttcaaataagtatcattacaattcatctatttatatccatgtcacataaatttttaaaaattagaatcgttctgtcgtcatattttccatcttcttcctcatttatttgcaatcgcatggatcgaatacccttttattttcctctaagaagtataatgcaccctctttctttctctctagcacaaagaatttactctaatattcctatttttgtttctgtgaaccatccaaacacctactctgttagaacatggatcctatttctacatttttactggtactgtgcttttagatctcgcgtcccaaaagagttttgatcaacatatcagcctaccagtcatagccaaaatttaaattaataaacaaatttttagagttgattttatttttttttcatcgtagtttgtttttttatattgtcttttatgtcgctaaacacacacgcaaacgcttgagcgcgcacacactgtgcgcgtgcgtgcgcgcacgtgtgttttaaagtcagtaataagcgttagagtttatgaattatagttagagtgacataccatgtgtgtagtttcagagctttgagttagctggtagtattttctcttgaaggtttaaaattggagttaaaaagttactacgaagatcatagctttctttccaactaggtgaaaccctgcgcattgctgcgggaatttagtatgataataataataataataataaataacgtgtaaaatagctagataacatcagattaagtaaattaatgtggtttatgataatttaaatttaaatagtatgtagaatggtgattcaaacgtaaaaagtagggagatagtttggaccgtagattaatcatctaaaggctaaaaacaatttatgtgatatgacttaattagaggaaaaaaaagagaaagataatttggaccatagattaatcatttaagcactaactaagtgaggatgaactatataagtatataggatatcataaaacataataaagatatacattgaaacattatgtgaattatgttggatgataatttaacatgtttgtatttgaaaagctcttaaattataaaaactataaagatataacatgtttgcatgatgtttaaatgtgatgattgttagtggatgatgatgtgacatcttattaattagtgaataatgatgtgacatctttgcattttaagcttaaggagttagtgggagataactttatagtaagataggatatgagagtattggatcgtatacacttatagcttataattaaggcaatagtcataatttttggtcaagtatttttttctcttactataaaggggttcattattattttacgactgccaatcatatatatagtttatacttattcaaaacaaccgttaaaaacttttatatgctatcgcagatttacgagtacttataggactctttgactaaactttttaagatatgatggtgactattggattgcttgctgcatctcacattctataatttcctgataacatgtcctaatcaagttttgtgaaagctcagggtttttactactttagatatgatttccatatttttaagtgataaggaaaactacatcacccaaaattattggaggtacactaaattaattttcatatagaatcttgaaatgttcaatattccatccacatgtgcattaaaactgtattctttgacctgaactcttgcactcctatctcggaaaccccctaatatgactgacttgacgcacctaaaaa

SEQ ID NO: 17809 - DNA, 9984 bp, Oryza sativa
gagcttggaggtggaggataacctagcaaaggtgggattatagggcgtaggggttgtctaatcgattgatggtgtgtaggtgaatcgaaatagtatctcaaaaacttatgcaagttatcaactcctgtatgttgggaatggccggatttgtgctttgttctctggccggtgagcttccctgtaaaggactgggaatattttgggtggagaacggccgtgataacgatggtttggtgacataaatggtgcaattttgggctgatgttctcctgcttggagccctaggatctactttgcggaaccgtggtgtcgtcggggtggtttgagaacaatcgagtcgtctgctggtagggagacatgattttttttctgttgctaaaaatggcctggtatgtttggtttgtcttaggtaacagtgtcatactcaaatcctgtagctttagatgtattttctatttcagcatcgagatcagataggcggtgagcttgatttggtcactgcctctactacataggaagttcagtggttaatccctaaatagctgaccggttaatattttgatttcagtgaatgaaatattcttttggtaatcgttaaaccactgtttagatgggatcatgtatcaaagccaaccacggttctatcctatggtagcagggtcagaagtacttttctggttaccttttttggtaaacggaattgatgtggtggcagctaaagagttggttatgttgctatgaacaggaaaagttagttgaaacaagatatttattgctgttcatggtgcctttgttcagctaagagattgggaaatctaaggaattcggacatggattttgtttgaactatgggacaccttacaagtggtccaggggcactttcaaccttatattatttcttaccatcccttccaagaggtttcctcattctacaatttgaatatttgtcacttttcaggataaagataaagagttcaaaattgattggaagagggtgggcatcacaagctcatttggatttgcttttgttggaccagttggacattactggttagttccatccttttcatattgagcatgaacagatggtgttagggtcaattttgtttgtggattcctttcttatggtcataaattggcaagaagtttttggaggttttacccattaacaactgaaaatctgctagcagactttatctctcccagtcccaaccagcaacatggtgtagattaaggaaaagagaaaaataggtgacatggaagacataatctccatcctgcactgagcttttccatttaggttgtcatatctagagaatgatatgaatgttgctttatcgtattagtatcaatgggttccaactatgaaaaactgaagatagttaaatatcagatgctttgcttgaatatatctaggtccttttagttcttttaagtttcgatattcactgtggtgggtatcgaatggtgggttagattggatgcagtgggtgctatctttatagaactgctgtgcttttttttagatgaactgatgcatctttttctaacataatataagaaagccatcacactatagtcatccattatgagtgcgctgtgtgctaccagtggcttcttttactgaatcttgtgtcacgcaaggggcatacattatcttttggagttaagtagatattgatgcactctgcagctgcgcttcatgtttatgttcatttgtgtgcttaccaatccacttcaacatagacttgtttttcaccatgtcacaatttcttgccttttcatgcttaccattcattacgtatgtgtagttaaactgtaaaatattcttctcttgagagcatttcgtgattgatctgctccgctttgtggttagtgttctacattttaattgaccacaaggttttcaactgggaagattttggtatttgagaccacttaacagtgcatttctttctatagtacgccatactatacaaaacttcaaattaataacatgatcatatgcatccttttttgtgaaataagctaataattgaatataaataatacttgttgatggacttctactgccctgccctacatttttgtgtttgtttttgttatgaatggtgattctatggtttcctctcacttatttgttgcagtctactcatatgcaaaacctgggatattgtgaaatccatgcttccaacaaatatgcttttgcttaaaaatgagaatcctgttctgaagcaattttatacaacaggctggcatataacttgcgcttgtttctgtcacctaggtatgaatacttggatcgcttcatcctgaggagataccagcctaagaccttcaaatttgttgcgtcaaaagttgctgcggatggtctcctatttggaccagtagatcttctcttgttcttctcatatgttggtcttgcatcaggaaggagtgtagagcaggtgaaggatgatgtgaagagggacttcattcctgctctagttctagggggaaccatctggccagccgtgcaaatcgcaaatttccgcttcattcctgtgcgatatcagctcctttacgtgaacctgttctgcctcttagacagttgcttcttgtcgtggatcgatcaacaaggagatgcaccttggaagcaatggttcacatcattccagaaaatcgaaggccagaagggcaaggtttgatgtggatcaggcacggtccttttgacatggtcctggatccagtaacatcacccggcaaaacaccgggcatcccagaaaatttgtcttctgtcatttggatcaacctttgtatgctttggctgatccatgaaaaaaacactggaaaagagaaacacttgctgctatggtagcaattgttttaagcgcaattgcagtaccaagcagagctgagcatcaatatctgtgtagagatttgtttcatgtttaatgccaaggaaaatattgctcaagttgttctacttgtgtctgtatctctgaatgtttgtacaagcgattctgtaacttcatgtggttgaaatatgtgcttccaaagcagctgaacgcactgaattcaacaactaacatgcataaaaagtcgatgagatttaaagaagagtaggcaaaaatgctgtataaatcctctgccgctgacgctattcttctatagcataagcaaacaaaaccataatatcaataacaccaaccaatcattggctacaactctgcacggcagctaatctaatgtcaatttttttcttcataatcctttctaatcttcttcagtgtcaccacaacaccggccattgacatcctctggtcaggcaagtcacttgagcagagcaagccaacctcaaatattggcaaaagaaggtgattcaggtcttggatagaagactcatctagctgtagcttgtcgtccagaacatgaacaagcttcgccggaaatgcttgattgacccactgcctaatggtcacttctccaacgaacaaacgatccgtgggtcgctttccagtaaagacttcaaggagcatgattccgaagctgaacacgtcgctattgcgcgacgcctttccgagtgatccgtactctgctcaggaaattcagaaacaaaattttttaagaatgattgataatctaactaaagtaatctccatgatgatatattccggtcagtcaatgggtttatggaaattaaaatttactccctccatattttaatgcatgacgctgttaacttttttttatcaacgtttgatccgtcgtcgtattaaaaaaatgtaattatcacttattttattgtgacttgatttatcatcaaatgttctttaagcatgacacaagtatttttatatttgcataaaaattttgaataagacgaatgatcatacatttgttaaaaaagttaatgtcatcatacattaaaatacggatggagtattatattagtacctggtgccatgtacccaaatgttccaggcatgcttgccgtgatctttgacgtgtcatcacccagtagcaactttgcgatgccgaagtccgccacatgcgccgtcatttcctcatcaaataacacattgctaggcttcaggtcacagtgtaggacaacctcataatgctcatggtgaagatattccatcgccatcgacacatctagcatgatgtccaacctcttcaacaaccccaaagaacttgtgccttgagagtgcaggagcatgtctaagctgccattgggcatgtagtgaagcaccagtgctctgaactccatgttggagcaggtgttcagtacctttatcaggttccggtgccgagccatgcgaagcacacggcattcggcatcgaagcttctaatggccacttcttccaggtgcatatctagaacttttatcgcaaccaccaaaccgctgctcagttggcccttgaaaacttttccgaagctcccactccccaataagttgtcatcgctaaatttatcggtggcacgagcgagctcatggtaggtgactatcaaatgattcatgtcatcgcctggagtgtgacttgaatcctctttcttgttcttacttttccttctgatcattaggaaaatgcaaataaccatacagccaaatgctacggtgacaactggaagtagaaatcttaggaagtgtctactgtttgagtgagacttctgaagacatggtgaaaatcctagacgtggagcaccgcataatgcagcattcccgatcaaggactgtagcgtaatgtttgagaaaacaccaccatctggtatctggccttctagcctattgaaggacagattcaaggctgtcaagtatgtgaaatttgcaaggaattttggtatggtaccagagaggttgttggaggagaggtccaatgttgccaagttagcaagctcttgaaatgagtacggtattgagtctccaaatgagttgtgcgatagatttaggtaggtcagcatcctgatttgtccaaatgattctgggatacttccaagcaaagaattggacgataaatcaattgtatcaccttgttttagcctgctaagatcatttggtagtgcaccagtgaaggagttgtgagaaagatttagtcgcaccagtttgccaaggttgaagaagcttgcaggtattgttgagttcagttggttatgggacaacatgatgtgttctaattcactcaggttgccgatgctatctggtatggagccaaataatctgtttctctggagatccaatctctgtaagctgctgagcatgccaatctgagtcgggatagggcctgagatatcattgctagacacatctagccttacgagatttggcatcatggtgatggattctgggattggcccagtgagctggtttccaggaagttgtagctgttcaagactgctcaaatttgacagtgacgatgggagcccacctgttagcttattttcgctcgcggaaaatatactcaattgcgcagacaggttgccggtatgatcgggaagatccccggtgaaagaatttgaatccaaggtaatgatccaaatttgtcggcaattagaaagggaagacaagaagccaaggttcccctctagattattcagtgacagagtgagccagttgagagctgggatattgcctagtgttgctggcactgccccagtcaattgattcatctgcaaatctaggaaagataattgcgataaattcccaagagaagttgggattggacctgtcagctggttgtatgtgagacgcagagttgagagacttctcataaggcctaactctgaaggaatttcaccggtcaggttgcagaaggagaggtccagcgaggtaacaccggtgaggttgccgagaccaggagggatagagccagtgagctgatttccacccaagaaaagctcagtgaggtatggcagctgagccaaccatgccggcacgacatccacgaagctattcgacgaaatggacagggtttgcaggtatcggcatgccgcgagccctgccggaatccggccggcgaagccgttggagctgatggagaacgtgcgcagcatcggcaggtgaaagctcccgttgctcgtcgtcgggatccaccctgtcaggttgttgtgcgagagcaccaaccctcgcagcctcgacatgttgtagacggccggcggcaccgcgccggcgaggcggttgccgcgcaggttgaggtactcgagcatcggcagcgacgacggcgacgacgccacgccgtgcggtacgccgcccgtcaggctgttgttcccgaggttgacgaacgtcagcgagggcgtgccgttgaacagaagcggcggcaggtctccggtcagctggttcatgtgcagagcgatcctcgagaggcggcgcatgccgtgcagcaggtcgggcgggatctccccggagaggttgttgttgcccaggtgaaggagctcgagcatcgtgaggttggctatggcgggtgggatggcagccgatagcaggttgtcgccgaggaggagactccgtagccggcgtagcctgccgaggtcggcggggacggggccgacgaggctggtgttggtgaggtcgagggtgtagaggaatgagaggttaccgaggtgggcggtgagctcccctccgagcggcgcgtccggcagcgacaggccggtgacgcgctccggccggcggcggcggctgcaggagacgccgacccagttgcagaaggagacgttggtcgtccagctgccggcgaggacgccgagaggatcggcgagctgggccttgaaagccagcagcgccgcgaggtcggctgcggcgccgccgccgctgctgctgttgatggatggagatggagaagaagaggcacctgctgcaagggctgtcactgtcagcgagatgatcaacaactccgccgtgtgcaggactgctggtaaacagccttcattggctgtatcaaaccaacgcggtccatcaacgccaaccaatgattgcctacaactctgcacggcagctaatctaatgtcaatttcttttttcataatcctttctaatcttcttcagtgtcaccacaacatcggccattgacaatttgacatcctctaatataatgccaatttttttcataatcctttctaatcttcttcggtgtcaccaccacatcggccattgacatcctctggtcaggcgagtcacttgagcagagcaaaccaacctcaaatattggcaaaagaaggtgattcaggtcttcgatagaggactcatctagctgtagcttgtcgtccagaacatgaacaagcttcgccgaaaatgcttgattgacccactgcctaatggtcacttctccaacgaacaaacgatcgatccgtaggtcgctttccagtgaagacttcaaggagcatgattccgaagctgaacacgtcgctcttgcacgacgcctttccgagtgatccgtactttgctcaggagattcagaaacaaaatttttcgggtaattgtgtacttacccctactttgtattctaattatgattttactccttttttagggtgtatttttgcccttacttttctcaaacgaagcttcagtttacccctattctgttatcatcagttaacagtgtcaattcactcgtaaaaagacatgtatacccttgaacatttgtccaattcttttagaattttgatagcatttccacacaattcgcacggttgcagaactttagcacaaagattcatcacaaattcgtcgcaagtgatgagatggggaaaaaaataaaaggaaaatcaagcagcaaacgacatggcattgtttgtctttgtggacgagctgctcgccgtgcgtcgctattgccggcttgccgcaccatgctgctcgctgctcgcttgcccgtgcgttgtacaggagctgcctcgccgcagccttcgccgccgccttcccgtggcgctgcgccagattcgccgccttcccatacgctgcgccatcctgccgccaagcttccctgctcgctgcttgctggctcgctggctcactggccgacggagccgccgctcctctccgccgcgcgctggccgcggggccgccggccaccgcgcctccctacgcatgcacccgcggggccgccgcgcgctggcccgcaccgccgcttgtcgcgtgcgccgccgccgccgcttgcaacccagctagggttttggattggaaatcggaaatactacgtcccataatagttgtcactttgacttttttctttcgatgtttcaccattcgtcttatttaaaaaattagtgcaaatataaaaaatgataagtcatacttaaagtaatattgataataaagcaagtcaaaaaaataaataataattccataatattttgaataagacgaatgatcaaactttacaaacaaaaacttaaagcaacaagtattctagaacgggacggaggtagtagtaagggattgggggatttggctcttcattgaaccaagggtagcatagtcattcacaaattataataacattttctttttttgtttaattcgaaaattccggcccaccagacttctgtcaaacctagtagcagaaggctgtttcatttaaaaaaataggtgtaaaaatcacaaaccctaaaatacatgataaaatcacaattgaatcgtaaagcaagggcagaaacacaattaccccaaattttttatgcatgattgataatctaacaaaagtaatatccatgatgatatattccagtcagtcaatttgtttatggaaattaaaatgtattatgttagtacctggtgggcatgcttgccgtgattggtgatcttggaggtgtcatcacccagcagcagctttgcgatgccaaagtccgccacatgcaccgtcgtttcctcgtcaaatagcacattactaggcttctggtcacagtgctggacaatctcataatgctcatggtgaagatactccatcgccatcgacacatctagcatgatgtctgacctttataagagcaggtttaatagtatagccggcaaccggctataaaagatctaactcagcaaaaattatatccaatactaacaaatagttagctagtactaaattattatacacgggtttctaaaaattatttatactccttagagcacccgcaatggtaaagtaaggtgctatctataaaacatgtacatctcagcaataaatagtaaaccatctcaatagtatgtctacatgggtatctatagctctctaatatattgcctcatttttctctatagactatctccaggttagtagatagctttgctctctcttctttaatctctttcaagtagaaaaatatgctgacatggatcttttatagagagcctatagataaccattgtgggtaccttacagtacttcccacctctcacaatatctattctctgtctcatcgaggcaattgggaagcgtgcaaatggtgggaaaagcttacagttgcagcatgcatggatgacgattggtcatgctgctttttactatcgctgtagccgggtgatagattaagtgctggttactctctctcctattttcttactcttccatctaggatttatcttagatgaatagtactaccgcccgctgattatatctactatatttgctctaacaaccccaaataacttgtgccttgagagtgtaggagcttgtctaagctgccattgagcatgtactggagcaccaatgctctgaactatatgttggaacaagtgtttagtacctttatcaggttccggtgtttagtatctattttccgtttagatgtagagaccgatttaatctattaaaaagaattgcgaggaatcatggcacggctcgccgggaaaaaaaacccttctatatgacaggggtagctttttcatcccaagggagattccactggtggagaaatgctttttagtcccggttcgtaacccccttgtagtcccggttttccaaccgggactacgaatccgggactaaagatcgttatctttagtcccggttaaa

SEQ ID NO: 17810 - DNA, 9565 bp, Oryza sativa
ttactaaccggaactaaagatcatagggccctgacacggcctgacatgtaatcaaccgggactaaaaatgaactttagtcccggttgaagttaccaaccgggactaaagatgatttttagtcccggttggtaacaacaaccgggattaaagatctttctcttattaaccgggactaaaaattatttttattcctggtttttaatggaaccgggactattatggatttgggttgaccaaccaaagatggtttctctaccagtgttcggtttcacaaccttcatatgactgtgcttattacgcaatccaatcgtgacgtatgaagctaggtatactgcccatcgatcgattctaccgagatggcaacatatattcgtatatatcgatgattaatttcacaaggccatgattctttcgaatttcggacaccgcaatacacttatatatggacagctcggatcatcaacgaaaaggaagcaatgagaggaggcggcggcggcggcggcggcggctgctgcggctcatccgtggcgggtggccgtcgaaaagcttcgggctccacatataccggaggaagttcgccgcccgctcgtctttcctcatcaggaacgactacggcgtgtggtcgcaggcgcaccggcggctcatcaggatgacgcgcctcggctactggatcgtctacgacctcgacgccaaggagctgaggacgtggtacgaggagaggctcctgcgggaccgcggcatggcgcggtggccggagtacggcgccggcgacagggaggaggtccggtcgctgatcgccagggtgagggaggagtactggcgccgcatgcccgagcaccggaggcagaagttcgtggcgagactcgaggaggagcggcggctcaaagaggagagcgatcagcgacagcagctcgcggcggcggccgacgagcgccgcggggcgcagatggccgcggttgacgatggcaagctccgggcatcgtcgcggtcgtcgacgcagcctcctcctcgtcgtcgtcgtcgtcgtcgtcgttgggctccgccgccgccgccgccgccgcctcgcctgcttggtattctactgtggatacttgctgcggaaatcgtgctgctgttcgtttacaaatttatgcttccatcgtttcgcttcttctaactcttataagccaaaatttaaatttaaaaatttattttcgattttatgatttttttatcgtagtttattttactgtatttgtttttaattgatcgttataaacatgtatataaaagttttattcgtaagttattttttctaataacctgtaccgcttttgcttctaaagagcaaacggtcatatgcacctctcgttttagactgaaattgacgatttactttcctattcatcgtcgtgtgaacttgagtctaaacgaacacccatctacattggagtaagttccatttcttttccttgttgtaagccgaaattcgagaggagagaaaccgaactaccggagagtgttctagtacaaggaactttgggtgaaaatgaactttgggcgaaaattaaggagtaggccaaaacctgatcgctagcaaaaagctctgtagatccaggaaaaaataatagtggggctggacaaactatgctagtataaatcaaaacatgtatcacatataaattggctacatatctagttcaaagtacacatacattgaattaatgatatgtagagaattttgtccataccaaactaatgtccaatagataatatgtcacacccaattgcctattattcttcatgagtaataatctatacaaagaaaaaggcaaactaacgaattcaaaaaatttagagacctagggatcactgatagtgttgcttgaactattataatacgtgaaccatgttctttttgacatgctgacaatctataaatgtacagaaacaattataaatttcaatcactacctcacttaacttgaactattgaggcacaattttagactgtctattagtattagaggttagtaggctaccaaatttaacttcaatcaccggttgctgctgcaagttgtgtagttgccggccactgcgccgctgcctgcctaccttgcgccctcgccggctccaggctcggcacctcccgcccggcgtgtcagcgcaggatcgccgcctggtgccctggcccagctcgtgtctcgctacctccccggcactagaccgccgcttggcctgtctcccgtcccaccctccaggcccctagcttgtttggtgctcgcggcttgccacttgcctgcttgctacacgccgcacacccatggggccacgagccacgttgcctcgtgcctaggggtggcaatttccctattgggtccggtgacccggcgggaacccgtccctacggggtcgggaccgggggagaattctcaccagcaggtgagtggggacggggccccgcaaaattccgaggataggggtggggatcagaattaatccgcgggtgacccggaggggccccaaatatatatgagttacttttccaaaattagcccatttcaataatatagacccaataaacccatttaaaattgacatataaaagctcaatatcctagttctcctcaaccgtaatccatttccttccttcaaccaaccctcaccgccggaggctattgaaattttatcacactattattcagtgtattacaataaattttacagagtattaactccatccgggtgatgcggggccctgatcactcgccggttcccctgtgggggcaaggacgggtgatgtttttcactcgacttcctttgtggggccgagggtggggatacctgcaagagggcgggcgggggtattccagcccaacccggccccgccccgccccattgccacccctactcgtaccctcgtcagctggtgttgtcgccgggtgctggcctcctcggcaccttgcgtccttgcctgtccaccgtgcacggccgtctcccgtcgcccatcagccgcccccacacccgtgcctagctaggtccttggagatttggagaggggaggtggggagttggcagtggccaattgaggaagtagccgagtgggccggcttgacctgttggtttggggagtgcgccttgcttcattgcttggagtgtgttgggccaaaattggaagattgagctcatgggttgctcttcttagccagcccaaatcgcgaaatacttcatcttcaacctctagcctcccctccagccgatgttgacgatctgatgaaccttcagcccccacatcccatggatctatggaagaagtttttagtggggggtttatggaggtctccatggttccggggttgatagtggggtctgaagatccctctcctcccctccctccccgcgcctccacagtaaatccatccctgctctcacagcttattcccttagctttatttcactttatttttctttatataataattcttcatgcttgtaaaacttcctttaacttctgctgtactcaatggaattgagatactttaagtgccagttaatgaaatgaaactttaagcacatatgaaaacttacagccatgttgttaataggattagggtgcaaactcccgtttttggtagcactttattggtggccagagtcgtccatcaccatcactcatggactgttgtagttgtgttccacattatcgattcaatctcctcgagtgaggtctacattgataggatatcccatatcctcaaaagttaatcaaccaatacataaccagggtcctattagttgaactgcagatggtaacatcttttctcaagttaaggcatacgtggtttagcgacgacatgtagaccatacttgagatgaacagctatcccattgacctcactcatgtctactggcaacgcccatgcttggctgcccctcctcctgtgatcagttgccgccgcctcccagtcaaaatggtagagcaagctcgcgagtgctatctccatggctgacaccccgaacacgatcccggggcaccccctcctaccggcgccaaatggtagcagctcgaagtcctgtcccttgtagtcaatggtgctgttgaggaatttctccggtgagaactcgtccggttgctgcccccatgctgccgcgtctcggccgatggcccacgcgttgatcaccacccgcgtgtgcgctggtatggtgtaacccaggatctgggtgtccgccggtggctctcgtgggatgaggagcgggagtggtgggtgtagccggagcgtctccttgaaaacagccttgaggtagggcagcttgtccacgtggtccttggtgacatgactagtgttgcccacgactgcccagatctcgttctgcgctttgcgcatggcgcgtgggtggttgatcagctcggccatggtccatgccatcatcgtggtcgtagtgtctgagccccctacaaacatgtcctgctcgtgtccgtgaagcaagaagcatatcagctacggaaatttcacagtaccttaacctcaaggtatctaaattttgcactaaattttttgatacctaattaattagtacctggaggtactaaattttatactaataaatacgatacctcccgacactgttttaatatggtaaaattgccctatcagctatattaatattcagtattcacttttgtcataaatatgtgatatttagaataaaattttgttaatcttttaaaactttgatcattaataattttttattgcctagtttgaaacaagaaacatattttgcatacaattaccttaaaaatcactacaattacacctatttaatattataaaattgttccaagataacatgatgatcagagttttaaaacctttggactaaggagtgctagtattccaactagactatagctcgattcataccatgataatagccttgatttcgacggtgccgagctgaatgccagcgtccttgtccgtctcgttcacgtcgagcaacacgtccacgaaatcccggtgatcgccgccgccgtcgtcgtccatacgccggccgccttcacggcggcgacggtgatcgtcgatcaccctctcgaggatgccgtccagcgcctcaaacgtgcgctgcaccttcccgtctatccccctcaaggcgtccacccaccagaaccatggcaagagctcccccatcggctccgtcccgagcaacctcgcgaagtcgtcgaacaccttcctcagctcgcgccccctgtcgccgccgccgccgccgccgcgcgcgctctcgtcgccgaacgcgatgcgcgtcaagacggtgttggagtaagcgatgaggaggtcggacaggtcgacgacgacgtcggcggcggcggcgcggacgcggccgacgagcgcggcggcctcctcctccctgacgcggcggaacgagaggacgcggcgcgcgctgaggaggtggaccacgcagatgcggcgcgcctggcgccagtactcgccgtagggcgcgaacgcgacgtcgcggccgccgtagagcagcagctcggccatggccatcctgggccggctcgcgaactccatgtcccgcgaccgcatcacctcctcggccgcggccgccgacgacacgaccaccacgggaacgcggccgagccgcagcagcagcaccgggccgtgcgccgcggcgagggaccgcagtgcccggtgcggcagcgcgccgagcaggtggaggtggccgagcagcgggagcccccgcggcgacggcggcagcctccggcggcgccggccatcaccgccgtcgtcctcccacctcgcagcgccatttctcgtcgtgtacttcacggcgggaagcagcacgaggtacaggagcggcgcgacgatggcgaggagtacaaggacggcggggaggagtgagacggccattgttttgcgcgcgtgcgtgcaacggaaagcgtttggttacttggttgtagttgcgcgcggcagcagcatgggactattgataatgttgaggacggaaggaagggtagcaaatcaacaaccagaaactggacgggctgacggtgacggcccctcacgaaaagtatattttctggtggtgaatgggagcaagggacaagtgataatgttgaggaatttttcgtttttaaatataactcatctctcacgatgttgtacacgtactatatatactaccgccatatctctaaagtactataggtcccatactcccatccagaaaattttctctattatacccttcaagtagtgctagtggtagagccataatttttctggaccttaattgaattaataaaattttgcctttatcttctaattttttgaaggtttaaaatgaaatttcaatgaatatttaggatcggctacagctctacctgctctactcctatctccacccgggccttcaagtaccactccaatcctaactatacatcatttataaatgaatggaactattattttttccttaaattttaacctatgctaaaatatatagaatgataagtactccctccattccataatataatgcacaaccactttttttagatgttctataatataaggcatacatgcatgtaggccattaactatgatcacttcttcattaaattattacttttttaaatcctccactctcatgttctctaattctattctcactccctccatacttgtaaaggaagtcgtttaggacagcgacacggtctctaaaacacaactttgacttcttatttctataaaaatatttattaaaaagtaatatatgtaaacttttatgaaagtatttttcaaaacaaatctatacatataatttttacattttcaaaactcaacaacttgagagttattcatgatttatattcccaaggtttgacttaaacattatcttaaacgacttcctttatgagtatggagggagtatttattaggatgatccaaactacaagatgataataattattttcttggtctttgagttaggagtggttatactttatattttggaaagaagggagtattttcgaacggagagagtacatgttttaaatttgtttgtgcaaatatgcatacctcgcgggctagggagcgcgagggacgagggagtcgtcaccctcgaagacgtgagacaaatggaagagatggtggtgcgatgccatcacacgtgaccgctcgtggatcggggacgtggaaccgacgcagtcgcgcaaattggtcacgccgaatggcagacggatcgatggcgattaaatagcgtggtcacttttcgtccagctaattaactagcgtggttgctttcttccatagatttattagggagaaaacttcaaatctggcgctcgattgttctaaataaatcaaatgatccaaatgtttcagttgaccacggtaaaaattaagttacacatggtggaaaacaaataaagtcactgaatcattgaaaacttttgtgaaacataataaaggcacacgttgaaacatgttgctatcacgtatgtgtcgacgggggatacctgtaaactggatgaatagggtattgggatacgttggtacgaggatatacatgatcgacatcaagcaaacaagaagacaaggattatactggttcagacccctcataaggtaatagccctaatccaatttatataagattgatatggaaagaccatagattacaaatagagaaccgacgatcccgagattaccggcgagatcccttgtcgagatggtctcgacgagaagtcccgcaagtaggctatggtggttgtgttggcagtatgattcgatgatctaaacccctcagggggtgtgccttttataccgtgaatcaactaagtctccaagtagaactcggagactatggtccccacatgatataatataaaccttatcttctccaagtaggactctgatattcacttgcctgtgagaataatttccataatctcttgttagttttattatcatatacggaaacatatcatatactcgaaggtataccatatccgtatattccataagtcataggatatgaggtatgtcttatctgtaaccatgacagtatgacacatcgagtgttaacggattgaaatatatgttttttcattagaatttaaacatgcgatacttgttataaatatttaattataacaaatataacgatgtaatcggataagtaatttagaagaaaaatcgttttgaagatcgttaaatacatgcaggatggagtggagggagaataggggtgagttttgtgaaacacagtgaaaatacacatgtaaacatgttactatcacgtaatgaaacatctagttttatcataatatagttatacgatatcttgttgtaaagatttaattacaacgaatataatagtgtgatcagattgtagatcaggtaaataattgaggagaaaagtaattgaagagaggaggagggaaggagaagaaactagcttagtgatcaggttgaataaagtttaattttattcagtgaatggagccaccggtccaaacattcttcatttgttaggtatagattcatatagttaagctcgatcgatgaattcgatgtagatttcttaattaaatcttgatttttatacgtgtcgcatcaattttcttgttcattgcgacaaaattaaataaattgggtgccaccaggccaacacacgaccaatccgcgggaccacgtgtggctatagattgcaggccgcatcacaccggtgcctcgtccgcgacggcgcttgggtaccgcgctcagggttagaaattccagttgaaaatttcgaccatctgatatgatattattttgaccaaaatttttaatattttttaatctaaatatatataaagagaacaacttatttctatggttagggtgaaacttaaccattgtttcgcagcagcttgcgagttatatgtagtcattatcttactcaattcaggaaataacatctccaggatcaatatccgattattttgacgattgaatttcaccacatcagcgtcaatggctgaagtcgaattgaagtgaaagataccgtcagatagttactgagttgtaatttgtaaatcagttgccggcaaatgatcccacttaggcacttaccatcagaacaacttcggtgatgccgtgatggtggatgtcaatgtcagtggtgaaaatacacgacaaataacgtttccttttcctctttctctatttggtaaaatagaaaatatactaccaatgttttttttactaggggtttaatttggccattgacatagtatctaatttataaccatccaccattttatttttatctattttcttaatctttgtacctatttaaaggtagctatatttaaaacacgagagagtaattatagccactggaaataagataaaaattaggaatcgacaaatagcaaaattgtcgattttgaggcatgttgaggtgagatctaattcgatctagccccctagtgcatacaaagttcaaggccgatgatcagcggctaactcaaaaaaagtggcaccatttttttttcactttgtgatttttaattaactcgttctcatataaaaatat

SEQ ID NO: 17811 - DNA, 3583 bp, Oryza sativa
attcgcaatgcgatcatgcaacagcagcagtgggagcaatttcaacgggaacataaagattaaacgcatctgaatcatatatatatccatgatggttttcgcgacgaatctgtgggcacggctcctggcatggttgacatatacgatatgggaaactgttaacagctcgaatagacgtccacctatttattacatgtccagtacgatatactattttctcatcattcgcaatgcgatcatgcaacagcagccgtgggagcaatttcaacgggaacgtaaagattaaacgcatctgaatcatatatatatatatatatatatatatatatatatatatatatatatatatatatatatccatgatggttttcatctgtgggcacagctcctggaatggttgacatcaattcgtccatatcaggaattggattttcatttttagaaaggatatcctcttttttttatactacttaaatagtcatagaaaagcttataataatttgataacatatattagcatgaaatatatcactccatgaacatataaaactaaattgaacttctctacaagttacaaaacaaaaaacaaattaaactgaaaatagttaatgcatatacatagttatatttattattattaagtaacgtgaacggagaagttgaattggtatttacatgtttgtaaagtgatatattttatattaatctattttttttaaaaaatttttatatgactatttagatgacttataaatctgcatatagatcatgcttaaattcatatagaaaatttagtttttattttacaaaggaagtaacatggcagctagtgcatccgtgcgagcctccagtttgcagtttatctatctgctctattattactgcataccaagaggagtttatattcttttttggtgtcgctgcatatgcctaccgcacatgatggttgcccaccgaagcacgtacgggttccctcgtgcaccgggtgtgccaagaggagtttatattcgctcttaacactgtgcagaactcttgacacgtacgtttccggtgcatgtacgttttgtacttcatttctggacgatactgcaaattgaatagtgatgatagcctgtatgttgaactcttcttccctcccgtctctctcaaatggataagataagagggatatcgatgtatatatgttcatattcatcttcttatttatttatttatacatcctatagttcaaaaaagttgtttcactcatttttcattctttcattcatcactcaagcgtcaagggtccagatcatctcggtaaaatccaaacggcggagatcgatcccacctcccacctctctcaatcaccgcacgccccctctccctcaatcgcggaatcgccgctctctctctcgctctccaactcgcacctgcgccaccgccaggattccgctcccgcacgcgctgacgccggaaagagctccgccatcagtgctcccctctctatcagccgccgcgccgtcatctgcatcgccgatctgccaccgatccccgccgccggctcgccctacacgatccccatcacccgtcctctgccaggattcacgtcgtcgccgatcaccgtcctggtccaccgatccccgccgcacgaagtcctcccgacgccaggtcgccaccgacgccttccgcggtgatccgatctgccaccgatccccgccgcacgaatcccttcccgtcgccaggtggccgccgacgccttcagcggtgatctgctcctcactgcagacgtcgccaggaatatcttcatcaccctcatgccatgcggcccttcatcgcatcgcctccgccaaggcatatgggaggtatgggcgtctgatcattaagaataactgatgagatttgaaccatttttgagaattgctgtggcaggagttttttgcagttactatacgactcaaacaaaaatgcatgtttgctgccatatttacattgttcatttacacatgtacacctgggatacgcttttcagaagttttttttttcaaattcatatgctcacttgctgttattctcttctagatagacttgttagaatttttgttagaatttatctcgtggtttacttcctccgtttcacaatgtaagactttctagcattgtccacatttatttacatgttaatgaatctagacatatatatgtattcagatttattaatatctatatgtatgtgggtaatgttagaaagtcttacattgtaaaacggagggagctgaatggaaacatcaaacccgtacagataacccattggtaaaaggcatatgcagcggcccattgaggttttgtcacaaactgtacttccaaaaaaacaaaaaaactttggctcattcgttctttaccgcagttcatgtatttgattccattgaactttcaagaacaagtcccaaatgttgcatgagaggccgcacgtctactgtgacagctcttttgatctcatacatacttatctttcatctcatgtcctttcaagcttctgaataaacttataagatctgttcagtgaagtttatgtttctatttgttccgtttgggtatgatttattcatcctaaatgttagatcatttacttttaagcaatattacacaagcagctgcaaacgatggccattctgttaatcttgtgattttaattgttcctttttgttgatttttcagctgcactaactatattttctttagtatgtgttatggcacccacacaggcttttgtttctagagaagagtatcaatgataatttcttctgacatggcaggtaaatctccaattcaagggggctctgcgcctttcctcaacaagaaaaggtgaattttactactgcaactataggttgaatgcaactatcttgagtcgaaagttttcaaatatgagttgaaagttttttaaatctgagttacaagtttttcaatctcgagttgaaagttttcaatcttgagttgaaagtttttaaatctgagttggaagtttttaaaatttatcttacaaatttgaattttgagttaaaaatttccaaaatttgagttaaaagttttcaaattttaaccttaaaatttaaattttaactcgaaagttttcaaatctaacttaaaaattttcaattaaaaaaatcttttcttaatacattcattatccttaactaaccgaattagttacgttaactcattgaaaaaagaatccgaaaaaaaagaatctgcgtggcgtgcgcgttgccggcacgtacgcgccggctaccttttcactttggcaacgcgccggctaccttttcacttttgggtaaaggtgcacgtgtgtatatgggccttgtgttcgcattttcacttttgggtaaaggtgcacgtgtgtatatgggccttgtgttcgcattttcatttttgggtaaaggtgcacgtgtgtatatgggccttgtgttcgcatataattatatgggactacctatacatttgtcgacaaatttttctctaaaaatttgatagatgtaattatagtacaatcgtagtgtaattacactggtacttgtttgtgagtacactgtaactggaatgt

SEQ ID NO: 17812 - DNA, 2944 bp, Oryza sativa
tgtaattacactacgattatactgtaattacatctgtcaaatttttggggaaaaatttatcaacaaatatatagcaaaatcgtaattatatttgtaaaagaatgaaaaaaatgtttttatttgaggccgtagttgagataacctattattgtgagtcctcggctactgcctttgcattttcggagttcggacttcagagccgatggtaattgggctcagtatgttgggtcttcagttcttcacgcggactcttctgggccatttttgcaaattaaaacaaagattataagtctagtattagacgaatgattttactgttcttaataagtataccatgattctattgaaaatgtagtatctctcaatatttcagactagaaagataccaaattcacataatttttttatacttcgcaaacggtaaaatttcttataacagagactgcatcaatttcctacaaaagacagacataggtatgtatgcatatactacttatcttaaatccattattaattgattattctatagacggcaatttaactgcacaaaatactatacacacacgtaggtatatcttcagcggaacataagaaactcgtttctaggccttgctgcaagggagcggataaagtgggtatgacataatggagactattcttagtatggtgacaattttttttacaattgtgggtggatgcttactattcttactatctcataatataagggattagtatatcgtttttttacaaaattgaaagaagtagcaaaggacagctactcgtgatataaaagatgataatgaggagaataaactagtataaaagctagtacgtgaaaaataaatagtataaaagttaatataggtggaaattaaaatgctgtctttaggatcacaaaatcctgagacgacgaaggaagtaataggctttgtgtttaagtgtttttttccattcaagcttgaattttgtgaaagggtgctactttattaattagcactgttgatcttaattaaactagaactacttcacgcatgtcttgtatatgcagagattggaataaatctattcctttacttataaaacaaaaacattcactgtgcaaactcatatacatacatacatacatacatacataagcagcatcaacgcagtcacacaaatgaaagtttgaaacacatagaaaacataataaatttataatgagatatagtatacagagaaattaattaagatgctccaggagaccacggcttggcaactagattcagatccgccttgagacgcacggacaatccgaacagctcgtccatgtccaatctcgtcgtcgccatgatcccgctggccgccggcggtggcaactcccagtcgaagtggtacagcaggttggcgagcgccagctcgacgctcagcgcggcgaacccggcgccggggcagcctctcctcccggcgccgaacggcacaaacctggagtccttccccagctgctgcgcgtactccacgccgccaccgccgccgccatcgagccaccgctccggcacgaactcctccgcggaatcaccccacgccgccgcgtcgcggccgatggcccacacgttgatgatcacccgcgtgcgcgccgggatgcggtagcccagcagctccgtgtcctccaccgtctcgcgggggaggagaagcggccccggcgcgtgcagccggagcatctccttgatcacggccctgaggaagggcagctcgccgaggtggtcctcggtgacttggccgccgccggtggcggcggcggcggcggatgcactcgatgtgcccacgaccgcgcgaatctcatcctgcagcttgcgcatcacgcgtggatggttgatgagctccgccatgacccattccgtggtggtgaagctggagtctgtgccggcggccatcatgtcctgctcgatgaacctctcattcatgcatgtcacacgtggtactttctctgtttcatatataagtcgttcctcttttttcctaatcaaactttgttgagtttgaccaaattaattaaaaaatatactagtatttttaacataaaataaacatattatcaaactatatttaataaaactaatttcatattttagatattgttaattttttctataaacttaatcaaacttaactaagtgtgacttaaaaaggttcaaaagacttatattatgaaacagagggagtaggcatgtttagctgtgcatgtatatatcatattgcttggaatttttcatgaaaaattaagtgttgtgtagtagtgacagagaaaattgagatggcatatattcagcacagatcactaattttgaaaaaaagcaaatccaatggcatgacttggtgttagatatagctctctatgaataaaaatctagaaaatgaggtgtataaatatctagaaagcgacgtttgcttagagctttgggtggatgagaagaaattaacatgagatttgtgatctcggtcttcttcccggcccagcagtggtgtccttttacacttctccaacaacgacatgatgccgaccaggagttttggggtaagggtgaaaagaggttttcttcacgcttagcagactacaagtatgtgacgatgacactagcctagtggagaaggggtttttctcccagcgtatgggcgaagacacgatggaccggtggtgggcagccgaaaggactatggtgtgcacatatgactcttttgtagtgggtcacatgcatatgcaattatgcatatggacccgctcaatgtaagacctacaaagttagagggcaatattttagaggatctttttttctatgttcacaacaacggttggatcatgaacctatgggcaagagggctaggctggtggacaaagtcaggcgttagcggtgagagcgtgggatctagagtggttgaaaagtagagcggccatggcatctgc

SEQ ID NO: 17813 - DNA, 8120 bp, Oryza sativa
gcgaacgccatgtcgcggcggtagaagagccgctccgacatgcgcacctggggccggctcgcgaacgccaggtcccgggtcctcatcacctcctcagccgcggccgccgacgacgccacgacggcgggcacgcggccgagccgcagcagcatcaccgggccgtgcgcctcggccatcgaccggagcttccggtgcggcaaggtgccaagaagcgggaggtgcccgagtagcgggacacccggcggcgacggtggcagcggcagccgccggccgccatcgccgcagggcggaggaggcctcttcttggtcgacgagacgatcagccatgagaagacgagcaggagcacggcaaggaggaggggtgagtgcaacagagcagcaagcgacgagagctccatgtctgaacgagtgtactcggctcgatccgcttgtgtccaatgacagtgatttaacatcgccgaataatttgtgttgatggaaaagccaaaatgctggttgacgtgattaaaacgaagacaaaaatgtagctctcgcgtatagttgttattgtagaaaataagcgtaaaaggacatgtctagtggttgcagtgatctgagtagtatcctaaggttttgagtttaaattttcatatgagcgaactttatattaggttatttgagggctaagtttctaatttataaaggttgcatatatccggttagatgtagaggccgtgtaaaaaaaataccctttctctaaaataaataaaataaaataaaaaaagtagaaactaagcacaatccttccagagaaattggaaaagtcacgacagtaaattgaagtctacaattctatatacacagacggcccgtttggttggagggagttttcaggagggattgggagtttaaaaggataaggatattaactgctttgtttggttgggatacatgggaattttggtgggatgggggtgaggaattgagggaggaactccctccttttcaatacctgggtagggggtggtaattgggaaggaattcctcctttactttacctaaataaatctcagccatccgttttcattaatgacctaatttccaactaaactccctatcaatttccaccacctctaccaaaaaagatactgggattaaaaatcaaatttctatcttaatctcaccatcaattcccttgtataaactcccaatccccttccctcgcgttgtcaaacaagccgtctagaacctctacaaagtccatatggaatcaccatcatgttctcaaaaaaaaaaagaaatcaccatctttggaccatgcattatatggctggaaataagtctattttggtcactcgtctatttaactccctaatcattggaccaggtcgtgccgggtcggcccatcatgccgaggcaaaggcccaagcacggcctaaagatcgggtcgtgccgtgcttgggtcgggccaaaaccccgtgccatgggtcggccttcaacatccacaaacactgaaagtcagtgtccgagtcggtatatgcatggtagaggcccttccggccatatccgttccctggtgcttcatgtttgatcacgaaagtggaaataaggatgttgtcgtatcatacggggtctgttgtctctgagttctacttggagactaaggtgatctgcggtataaatacatatcatcgaatcttagtgcaagacacccaccacagcaggagcaatccagaggactacttgaaagccaacttgcagataggtctcatcaagtagttctcgacagggatctcattggtagtctcgggatttttgttgttctctattgtagtctgtagttttcttcataatcccatataaactagattagggttattaccttgcgagagacctgaaccaatataatctctgtctcttatgtgcttgatgtcgtatcgtgtagatcctcgtatcaacataccccaatatcctcagaatacggtccgcgagtatccccgtcgacaatagctgaggaggctcgtgacgcggtcgcgccggtcgccgttgagccgcaggggtgaagtgtggtcgagcgggacgagaactggcgggtcaaggacggatcaggaaacgaggtagcggagcttgtccttgaagatgacgagaaggggatgatccggggtggtgggcgcggaagcagaggaggaaaccgtagtcggagacaaggcggcgccaccgcttgtagacgaggaaggcacgagagatagaggacgagtgcgaggggaggcataagaggatctcttggatgaggtcattgtcatccggcggagagccaacctctatatttttctttatctctcttctccatataagattatattagccttggggtagtcccaaccctccacctcaactagtttacataacattaatatactatcacataatcaaaaagctaggtggcaagaggatttactgatgagagaggaaaaaatattaagaaaccatttttcatgaaaaaaattagttttatacaggaataaagaatgaaataagagaatacatggacgaatgcagagagaaaagaggtgattaattggatgataatttattatgaagaaactatctatcgggtatacagtttttatgcatgcttagtgtctatatgacagataaatatggattaaaaccattagataatttctaggttgggactgccccactattatcattgctctaagttcatgtgcactctatctacgtactaagccattaaatgctttactgatattatgaattcatgttataccgagaacataatatatattgtgcttaactaaaatataaaaagtatacactaatgtcaaagcaaatctaacggtgaagcacgtgtaggtgcacatgcacttaccccttaaatatagatgaccctcgctacacaaattatatgttgcaataggcacagatggtagctagcctgcctagcagctttcatactgaacacatcaaacatcggaagaccatggctttgcgactagattcagcgtcgtcttcattcgcatggacagcccaaacagctcacccatgtccagcctcgccgccgtcgccgccgccgctccgtcggcatgtggcggtagctcccagtcgaagtggtacagcaggttggtgagcgccagctcgatgctcggcgcggcgaacccggcgccggggcaccccctcctcccggcgccgaacggcacgaacctgaagtcctgccccagctgcgccgcgtactccacctcctcgccgccgccgtcgagccaccgctccggcacgaactcctccgcgcggtcgccccacgccgccgcgtcgcggccgatagcccacacgttgatgatcacccgcgtccgcgccgggacgcggtagcccagcagctccgtgtcctccaccgtctcgcggggcacgagcagcggcaccggcgcgtgcagccggagcgtctccttgaccacggccctgaggagccggagctcgccgaggtggtcctcggtgacttcggcgccgccggaggcgccggggacgccgacggccgcgcggatctcgcactgcagcttgcgcatgacgggagggtggttgatgagctccgccatggcccattccaaggtcgtgaaggtggtgtctgtggcggccgctatcatgtcctgctttttcattgttcatatgcgtcattcattaataattgaaatgtatcttaaactgtttcaggttacaagactttttgactttgatcaaaatcaaactattttaaatttaactaagtttatagaaaaaaataataatatttttaactcaaaacaaatttattatgaaaatatatttaattattgatttaaagaaactaatttgatattataaatattattatatttgtcattaaacttagtcaaatttgatgtagtttgattttttctaaagttaaaacgtcttatacctgaaacggatggagtaatactgcagtagttgtattgaaaagtgatatgaaaaattgaaaacacggtttaatattggcaattaatatgcatcacgtatcactatgactttgaacatgatactttgaaccagagccaagatagatactggtgtggtgtggatttattgtcatggaaactaggattatactccgtattatttggactttgatgaagtggaatatttagaagatactccatgattttgcaaaattatatgagacggtttcgatcgcaataatcaacgtgtcgtgtcacaacgaaaggactcaccaggataatggccttgatggcgacagtgtcgaacagcagcacttctccggcgccggcgccctcctccacctcgctcacgtccagcagcacgtccacgaagtcccggtgatcaacgttctcatcgccgtcgccgtcgccgtcgccgccgtccggctggctgaggcggcggcgctcgcggtggtccgcgatgacacgctccagcaagccgtcgagctccgccgatatgcgcgccgccttggcgtcgaggcccatcagcttgtccacccacgccagccacggcacgaactcccccaccgtcgccgtcccgagaagcgcctcgaagttggcgaacagctccctcagcttctcgccgccctcgtcgccgtcgaggccatacgcgccgtcgccgaacgcggcgcgcgagatgacgccgttggcgtaggacatgagcaggtcgctcaggttcacggtctcgccgccaccgcgaacgccgcagcggcgccggacgcggtcgaggagcgcggcgacctcctgctccctgacgccgcggaaggaggcgatgcggcgcgggctgaggaggtggagcacgctgacgcggcgcgcctggcgccagaactcgccgtatggcgcgaacaccatgtcacgcccatagatgagccgctccgccatgcgcaccctggcgcggctcgcgaacgccgcgtcgcgggccctcatggcctcctgcgccgaggccgccgacgacgccacgacggtgggcacgcggccgaaccagagcagcatcaccggcccgtgcgcctcggccatcgaccggagcttccggtgcggcaaggagccaagaagcggtaggtgccccagaaacgggacgccccgcggcgacggaggaagcggcagccgccagccgccgccatcgcctggcttcttcgccgacgagaagctcagcaaggtgaacacgggaaggagcaggagcgcggcgaggaggaagagaggtgagtgcaacacggcagcaagcgacgacgagagctccatttctgaacgagtgtactctaactcacctcgatccgttcgtggggaatgggaacaaatctacactgaaagggaaattgtttgtgatgtacaatgtttgtattttttttttctttgaaacgagatttatttcaaaaaaaaaactaaattcagacaataaagacgaaaatgtagctctcgttggggaagcatcggtgatgtgctgacggaattatgggtgtatgacttcacctactgtagtttaaatcctggtggctgtaaatattacgcacatgtaggtgagcttaaatattggtgcccacgactattacgcacatacaggtgaactttcaacaagactttaataatttcagtagtatgtcgttggtttctgtttttagagcatgtgttaggggacgcgtaggttttcaacaggactttaatgaaatcaataatataccgttggtttgagcatgtgttaggggacgcattcacatgtgtgagtgagatgttacgtgtgtgctcacgtttgccatgtaatcaaaagaaaaattgtagctctcgttggtcctggatatggttgaaagctcaggacaaatgcacgatctttccagagaaaaaagggcaatttcacaaccgtattttctattttttgtggccaaaaaacagaacctccaaagtccaaacgagcaatgaattcgatggatcaaaatgtagtacagagcacggacatgaactgtacatcaagcaagacataatggaaggattgtattagcaagtagcaagccatatagatacagatctggcacgctctaccatcaaaatgggcagagaacagaaccagattgataggttgttctgtcaatttacaagctttcacagaacatgttttggtctctccagatatgcactgaagcaatcaaacagaaaagatatgtgcactgcagcaatcaaacagaagggtagaaagactaaaaaggtatcccaactctagcatctagcagatacaaaggtaggagtaaaaacagttacaaatgaatcttctccaattatgttggagcactaaaaaaacaatatgtagcattggacatagatagaggctttcaaactaaagatatcacacagtggaagaggtgaggatgatgatctacaccgatccggtagaatcaactggcgatatcgctggtgccatatcttctagcattcacagcctgacgagcgctgttgccttccagcacctccaacatcaattgtatcaggaagatatctacaaaattatagcaaagtgtcattgaacggcatggtttgcactttgtagttcatctctgcgttagtacttctaaatgctccccttatcaggaaaaagaattgagtttttttaaaattgatgtttctactgggaggctgcaagatacaaattttacctcgatttccattagcaacgcttttcaaactgctaaacagtatatttcatgcgaaatctttttatatagaagttgctctgaatatcaaataaatccaatttttcaagtttaaaataattaaaacttaattaatcatgtgctaatggctttctcgttttacgtgtgcgtacttaaatcttcatcttcatcagattcaaacagggcaataattaacttacatctcctcttccggttcattcttgatagcattccttgctatacactcaaaagcagcctccacgttgaagccttctttagcagatgtctcaaaataagggatgtttcccttagaagcacaccaagctttagctttcttctcagaaacctgggaagaacaactaggttaagaaaagcacaatgcaaatcaggaaatcagaggctaaaggcacttctatgaggacaaatactcacagtccggctattaccaccatcaacatcaattttgtttccaagtacaacaaaagggaaattctctggatctgatgggctagcctgcattgagaataatgattcaactttcaataaacagattgcagtacatttggaattttgggtaatcgataagtaagctacttacttgaattaggaattcctcacgccagctgttgagcctttcaaatgacttggtaacattgacatcatatacaagaacacaccagtcagctccccggtaaaatgccaccccaagactttgaaatggttcttgtcccgctgtgtcccaaatttaagttccaggtaaacacaagtattagcgtaaatgtagacagaattactgtttgacaaatgacaaggtattactttgattgccatacattctagtatttctatgatttataacacttaaaccagcagatattggtaataattatcaggtattgagctataacagcaaacgttggagttactttgctgatttacgagttagatacaaatcgaaaaccacagtctttgttccaataaatgtgggaaagtgaatataatttttggcactgatggactactatcaaagagcattatgggtgtggatattttctccaacttgctgtaaagtgagggtatcattagttccacatagtcaagatgattctctactgcagttgattttgtcttagaaaagcatttgccaattaataatgtaatataatatttactactccctctgtcccaacatatcttcaagcgtttgaaatttgtctcaaaatataaggacttccatagtactacttctcccaccaactaacgctcatttaattttcacccaattttaccccaaaccaccttcccactccccaatcacccaacatttaatgaggagcatcatagtcttttcccttcatcattaatctctctcaagaaaaaatctagaagtccttatattttgggatagagggaatagaacagaatagtactcgcttttcacgaagggaacaacacattg

SEQ ID NO: 17814 - DNA, 1577 bp, Oryza sativa
cgtaacataatcctcattgtagcttatgaaaggagctatgcaatatggcttccaaactgcgtaaatagagtggaataaaaacaattttctagtaaccgctctatcccttctgtcatatttgtgttttacatcttttgtgatctcattaacgtctccaataagcaattacatgatggttgcacaggtatctcacatctcacactaaaataaaacaagagtaccaagcaaaataattacatgaaacctaaactctaactgtcacaagcaaaatattttttcttttgagcaaaacgattttactgttcccccaatattatctgaatccattgttgtctagtagaccaaacctacagtactagtagacggtcaagctaaatcaggtctgcacgatttggcaaaaaagcaattccgaccacaatcagtcaacggtgcatgtgcatcacgccctaatccccaattcccctacttatctgcaaagatctaagcaccccaataatccccccaaaacaaactatcaccgcgcaccaaaatccagctgcgatgaagctgcgaagtgattctgggaaagcagattagaccgaacctgcaatgtgaagagccggtcgtcgatctgcacctccttggtcaggaaatccgcgccgatcgtcgctttgtactgattgctgaacttcttgttcacgtacctgaacaacaaaaacaaaatcacccaaatcattcaacatcgcgaagtcccccttcaaacaacgcctaaaaaaaccctcaaatttgacgaatcggacaacgcaagattgcgcccccttgatcttactggttcatcagagacgtcttcccgaccctgccaacgagaaaaaaaaaagagacgcatcagcgatcagagaaacagaataaatttcgcccagaaagaatatcccccagtagaaattgaacgaaaaggtgggggattttttttgctttttcgcacccgctgtcaccgaggatgatgaccttgaggagcattcgcctgcgcgacgccatgggcgcggatctggaggcggcggacggatcgggcggagcacgaggagggagaagaggaggaggaggagaaggcgagaagcaaagagatgatctttgcgcttctctttgctttgggattggcgtctcttgtgtgctcaagaaaaaaaaaggcgtttttttttggagggatcttttgttcgtttgttgcttggatggtctggctaatttatttatgagatttatttcgtctaaagtgcgttttgaagtagtagatgattagtcacacgtggaatataaaggtaattaaaatatgattaattgagtattaatttagatagttgaaaagtaaattaatttgttttttaaaataataaaatttttccacaaaatacatcgttcagcagtttgaaaaacatgcctatagaaattgggaaaatggtcaaaaccgaaacgtagtgtatacttgtggatgctctatcaccctctaaattttgtggtggttggacaatggagtctgtgtatgtattttggtttctgtaataccctttcgcttacttcttggagaatggagatattgtttgtgg

SEQ ID NO: 17815 - DNA, 2274 bp, Oryza sativa
cggtatttgacgcgcatcccccattgatacggatcgattcgggacgaactcggtgggctgcgtttgctggctgctctctagattgccactgccaaatgccatcttcctgaatttcttcaggtcttcattgtaatggcccgtgtcgtactcgttgctgttgtatgatcccaagaatcggctatggccaggacgaacaccttcgttcagatcatccaatgacacatcgccttccaaggcccgaacaacctgttgttcattgcatcaatcaaacggtagttaggacttcagagactagataaaaatgatatgctgccttcctgtaattacacagatgaatcaattttgtcattggaagtgaaactagtgtagctgatagtccactgtaagtaatatattttgcactgaaatttcttgtcttgtatgaatctgtgctgatgaaaactgatgaaagaaaagaacaggaaccttgaagtacaagaaggtacctggctcatccgtgggcgtcggcgtgcagaatggcgtacacaagcagctgcacaagcaatcatcctcgccatctcgttaccattgtactcctgtcctagccgtggatccactaaagcatcataattgccatcatctgatgctcgcatcattaaaggccttgcctgcaggtaggaggaacaaaatcaattgattgtacacaagattttcaaagaacataacacatgttcaggaataggcatgaggaactcgttatctagactgtagaatttcacaggatgatgaacggtacaagaaactaaagtatagaaagatgtacacgaaggccaaaagtaaacataaaggacaaagtacttcactgaatctggatactagattcgcggaaagtaatgtatagaatgtagttacttaaattttcaaatatggacctcaagatatgattgggttgtattcataaaattaattacaacggatcatcatgtaaaatcaacgataagtatatatactgaaagaaattgcataacctctgaaagtattgcttttctttttacgaaacctctgaaagtattgtggacaataaagttaattagtttcgagaaataacttacccaatcaaccaagctgtcatccatctgtgattggttcgatctcacaggacggcggccagttattagctcaagaagcattactccgaaagaaaagacatctgatttctcagttagctggccagaagacgcatactctggtgcaaggtacctaagggcaggaaaagtattacaagggaactgattttgatacggctgatgctgtaatgcactagcttaaaaaatgattctttattatagattttgattaatcctttttttcgaaaatatgaactgatgcttgctacacaagtagatagaacatacccaaatgtgcccattactctggttgaaacatgagtgttattatcagaagtcaattttgcaagtccgaaatctgccacctgtaaaagagttttacatagcaaattacacattaaactatttggtagtatgcgtatcaactctataactgtaattatgattggatatatgccaactactatttctctgaatttacttatcaggtagacagaaaagtttagcctatatcaaaattgtgtacgccttcaggcagattaccagttgaccatagtacatcagaacagtcaaaaccaccttgccaatgaatggaaggcactgtttgctcacaaaatgtgctttaagtctaatcaaaagttcgcaatgtaaatattgatttgtaaaatctttgatgactgtaattaccaatcagtatgcacttctaaaacagaaaggaaacaaaacacaaaatgtatagcgcacctttgcctcaaatctcgcgtcaagaagaatatttgctgactttatgtcacggtgaatgatcttaggatggcctgtaaagtgtgtgagagaaaatcagtatataataggcatgtatacctataagaagtggaaaatggaaccaaaagaaaaacgagtgatatgggtgttcgctcacaatcttcatgaagatatgccaatcccttcgcagcacccaaagcaatgcgtaatcttgtaggccattccatggttggtcggcctctccctgaaagaggtgaaaatagccattaacaaatgctcaagagcagacaaaccaaatgtgtatacaacatggatttcatgacagattgacagctgtttcaaggcaagtttctggattttacataaaagggcatttgaagaacctagagagcattttctctttttt

SEQ ID NO: 17816 - DNA, 655 bp, Oryza sativa
ggacatctaaaccaatgcaaaaaggacagttaaaatctcagaaagtaactgaactgttttcgccatacttcaatgagatcactgaccacttgtaataggaagcttagcaggtgtataatatgttaggccctcatttcggtaaaactctatttggtaatcaattgatgcattgtcatacttgccagcagctttattagcttctgcttcttcaaatacatcaaagcgtttgtagtgccgagagatagcaaaagtagcattcttcctccacaaaaacctaatagccatgatatgacacagtcagactcaacacagtagtcaaatattgcaatattgcgatcttaaaataatgaaaagctggtaagttccaaattctaatgtcagcagaccaacaaggaaatacaaacaaaatactaagaaattgagtgagtagctgttataaataaagtgtcttgtgaaaaagccattgataatctttctagtctaatatcctcaacagacttaaatatgcagtaatccgttgatagaagtaatggcaaatggtggctgttgaaattgttgcaaagatgccaaggtgtagaacagcccaaattttaatttgacaaaactatagcacatgacaggtttctctccttaaagaaatagcatataataaacc

SEQ ID NO: 17817 - DNA, 3538 bp, Oryza sativa
ccatttggaataagcctatggagcagaagcttaggaatctgcacaaattagatgtttgttcaattaacaagcacaaaacaagggcaacatataacgtgggcctacacattaaagcaacaactttcagtttgggaacttcaatatcagtgacaaacatttgtttgcaacatactctcttcagtggccccgcccctacaacaagtttgcctagtgcccactcaaactgactgtatcacttttatacatttcttttctcatggattagtattttaatttatcctgaattgcacatgacatttcaacaattctctacttggacccaaaccacttaagcaatatagtaagaagcctcacgtaattatactatgttagcattcaagtatgaggtccatgaggtttgtttgtctcctgtaaatataccgagagctagtaatgcatcacaaggatataacgtcgacagaaattacaagtcataagaatggcaccttccccgtacgccttggatcttcgtatgggagatttcgaacgaccactagcctccataagccaactttgttgtttctgtacaatgagctagaattttttacataagcctctgtttcttcatctacaaacatataaaaacatgcatttgcctttgaaaattcgctggcattccttggatgttgaatcatatcataattccctggaaaacggtatcaaagtgtgagcagacaagcagaatgcaatcataattaatactattactgaacagtgatgttaccaaaaatagcagaagctacaaccagctcacggcatttctccatctctaacagatcatcatcattgatatcaaatccagaaccttggccaggtttctttcctctaacaaagctgataaaacagcacaaatcatttcattcagcatacacatttcagccattaagttttggcagaagttctggattaaatatgggtaagaagatgcaagtaacctacccacagtggacagtcatagactcactaatgtcaaaagatttatttctctgctccagagatggatgcccaccaaatacagagccctgatttgagaaatttgcagtgatgttgtcttcaaatacataacttaagttcttaaggacaggagatggtgaaggttgtggaggcataagagcgaacgcctggtctacaggcacgtagcaaacatcacatgctacagggaaaatgagaacatatcttacgattaatgacaagtcaaacacaaacaaacttgcaacgctaaccaaaaagatgtaaagaactaagcttacgtcgtggtccagtgcgtttcggatcaaccaggggaggggcaactgagaaaccttcacaaggatgatgtgtaaagtttgcaaatgaaagacgaagtcgatttggaagttcagttttgttgacgctactagcagagaattggtcgctggacgtcattagaggccttgtcatgctgggatacacagagttctgtatggtatttgcgacttcatagttatttgcaatgatcattgaagcattatcatctgaaacaagtcaccaaaccaacaagtcaatgactatgctttctaacaaaaacatatattatttttcattcaagaaacatcattttcttttgaattccttgaataaagtacatgtttgagaattccatagtaaaagcatatggcatgagcagctaacgtcccttgatagttaggattggcagacaatttatcatatctgaggctcccaagtaatataacaaattttagtactaagtgggagggtattcggtgatcaagacggaggccacacagctctgcaagattcaatctaccatttcaaatctaagagtgtgtagttcccttgaccttatgaaggtctctaaccatcaagaccacttgtatgcatcaaaacctggtttatagagaagtactctacctggaccaagatatacatgacactgccatcagaccagatcacagacaacaacatccaattagtctagctgatccgcaacaccacaaaactgagacatgtaaatgggaggcgatcacacgatcagcataggccagtatgtaaccagaatgaatgccgcgcgctattgattcccaatgtttagagcatcacaaagacataaactaatctggatttctgcaagcgtgaactgcgtgaccggaacaaactgctagtacaaatgcccatttcgctacgaacagcagctagggagggaagcgtgcggcgcgaattcagcgcaggcagccaattggcagcggcgagaaagaaaagggcagagcgcgtacaaacctttgacgacggcgaagatggagcagaagacggcggcggaggcagcggcgagcagcagcagcaccccggccctccggcggcccaccagccgcagcgcgcggtggagcagctgcagccgctccttctccccgccgcctcgccacccccaccccctgcccccgcccttcctcccgccgccggccgacgcgagggagccgtagctcccgcaccgcatccccagcgtcgccgccgagccactcatcgccaccgccgcagccgccgcctcccctctctcatcccaatcgccgaatcacacggcgccgcaatcccctccaccgaaacacgcgagatcccgcgagctgtggctggcaaccagatcagacaaggcgccgcccacgcggggattagaggatgcaggtggagcaccgacgcgcgcgcgcgcgcgggcggtgggtgggtgggtgggggttagaagcgcggcgcgggcgcggcgggcggcgagacggggaggattttttttgccggttcacggagctggaacctaccaccacaccagcagcagcagcggcagcagcagcatgtgagattcctgcgcgcgagcgcgcgtgacgactcactgacgagacggcgacgcggtggcctcgtcgtcgtcttcctcgcggctgacgagtcgcctggcgctcgcgtggagtgtagtgtgccgccccgtggtgacaagtcggggaggttaaaaagcggcccaagccgcttcggttaaacgccatcactactagtgatgatgacttgatgagtgatgggcaacgcgatcttcagtagtagggtaggtgcacgtcagagcttgctgctgatggacgaaaatattacactttttatttctcccttctttttaaaatatatagcaacctaataccctctctgttttttataaatgacattaatatttaatgtgaagtttgatcgtattattaaaaaattatataaatatcacttcttttattgtgacacgttttattattaaagaaacattaaatgtgtcttattctttagcacatttacactatttttctaataagatgaatgatcaaatactattttaaaaaacaaaaacattatctactaaagaaacagagttagtactgaattaactgccgaagaaatatgtgataatgattgatgccaaattgccatttggcagattgaaatacctggagagattctcaaaaggatttttttgaaaataaaaaatggaggggatgtgtgagaa

SEQ ID NO: 17818 - DNA, 3096 bp, Oryza sativa
agctacaagcatgtgtgattagtgtggttgtgtgcggtcttgccggctttgcccaagccaaaccgcgttgggtacagatcgtcggtgaccagtcgactatacgtgatcttgatgggtttgtggatcaaagattgacaacagattgggctctttatcttgcctttcgtgggcttttctgctttactattctttattgggctgggcctgatagcagcaaagacaaaccaattctttctttatttgaatcgcaatcggttctacttactacaacctattcatgtccaatccagcaaagttgtcagcatgggagactgagttaagatcaagaaattaacggattcactgaggtaattttacgtgataggaagaacaaggttacagagaaaattaaacgatagcgaaataaacatacaagctgtctcaattgcataacatcttgattattacagccatactcctctaccatataagcatcgtaaaccaatgcaaaaccagcactaactacgtaccacagcaactaattcatctccccatgcaagatcgagtcaatgaattaattagcctagccgatcgatttattcaggcccggtctctgatcttggcgacgacgacgatcgaacacaccaacatggatcaatggatcagtagcacttgttggggtatttgggggagaagacgaagttgccgacggagtagaggccctggaggccattgtcgcgcttgacgaactcctcgaacttgagcggcaggcccctcctgccgtggccggggacggcgcacgcgcgcgacggcgaccggggcacgtacaccctgcactcctggctcgtgaacgacgtcagctgcgacgtctcgatccggaagtagccgccgctcccggccacccccctgatcgacgccacccgccggtgcccgtgccggcaacgcaggtacgccaccgctcctgcacacacatatatacacgcacacgcacggccgccggcgagatggtacgttaaaacaaaacataaatattaggaaagtaccaaatattaaataaatagaagtgggtaaggctttgaacccaaataagctaacccacaatcttgtgaagctagccgaaaaacccctaacagtttctatgttacgtcgacaacgacaccgtgtaatcaagaatattgattttaccgttcttaaaaagatattgggaggtatcatattttttttagtgtaaatttggtgtctctagtattagaaggtacggaaatgcattaaaaaaattattacgtcttgggaggtactactctctcccagaaaaaagcaaatcttagctatgaatctagacatgcatatttccaggttatacgtgtctagtttcgtagctaggattggattattcttgggacggaggagataactctcgaaaactgtaaaatttctcaatggtgaaatgtatggtcggtctgatctgcgagcttacctgcgagcggggacgcgtccatggcggcgaggtagccggggtacctgcaggtcttgcaccacaccatgccctgcacgccgatgctgaagttcaccgtcggcggcggcgggggcaggcccatggcggaggcgccgccgccgccgtcgagagcgagcagcacggcggcgagcgagagtacaacgaacgacttgacgaacaacagtgccatcgcgatcgaattcgccattaattagtcaacgtaatccacacaagaatacgtaataactagctagaagacgacactaattcgctagctagctaagcaagatctagtctggtaagatatggtatagtatacagacagaattaaacacttgggttaactaggatacgttgcgaagacaagaagcgagagatgatggtgcaatttatagcgtgcgtgtgcgtacgtagaagtgcatagacgcatacagtgataataaataaatagtaagaaatttaagatggctcgtgattgctgttttggattctgattagaaggggatcagagagactgtatattcaagttgtgtggaaaatacgagggttcgttggggaatcgagggccaggaaatgatgaactcgcgtgtgggctggagtgcgctgcaagcgatcagtacttcgttaatagcattatctctgtttaattacttgattccaggtgtgttagaagttaaaatacatgacactatgtaccactgtatcgcactactgtggacacatcgtgtttttttaagacaatcacgtacatcggccgttttaattcgcctagtgatcggagtttagtagtgtacactccagtagatctatctaagtaccatgcatccttagtaaaatcacctggttaggcaaatcgaggatgcatgggatcgatgaacaagagtgcatatcttggacatcagaataactgcagtatacgtagcgttcaaggcatcggatctgtttcgatcgggaatgtaataagctgcttaactggtataatcgacgagcccaaagtctgaagtggagcaagtaaatactactctccccgttttatatattataagtccgctttatttttctcctaatcaaactttttataatttaaccaaatttataaaaaaaactagtaaattagtttcattaaattttaaattgaacatattttaatagtatagttattttatgttaaaaatactactgtgttttttcatgtatacttgattaaaattaaaaatgtttgactagaaaaaaatcatatcaatttataatatgattgatggacagtagtgacaatgccgcatatatagattccaaggttgagctattagacctaaaatcccttatattatgggatagagggagtagtcaagtagtagtactccaagtcaccaacgcaaacaaattttgatcgagcagtgtaaaaacagtagttttttctgattccagtacgtagtagctccttgtgttgttgatgtattgtatttgtatcgtatgcagatgcaactgccaactgaggttccgttcggcagttgcaagcgctggcaatctggtctgccttctcgagcgggccaaaaaagcccgttagcccattaaacctgagtcatttggcccaatactcccaagcgggggctgcaggaatt

SEQ ID NO: 17819 - DNA, 5640 bp, Oryza sativa
tgacgtagtccgcgacgtcgctcgcgaggaggcgctccgcgatcagccccgcgggcccttccccgaggttcgtccagtctctcctaaaataaaagacgagaaatcatcgtgttggattcggaaatataccggagggtaaactaatatatggccccgtcgattggattattcacggcatatttgcaaacgtaaaataatttataaataaaacttttatatatgcgttcttagcgatctgaaaagcaaaggcgggaaaataaactacaatgaaaagacctaaaattaactttaaaattaaagtttaaagtttaactaataagtataagtataagcgaaaagatgagactcgtagaattagagtggaggataaactttgtaccaattattaggctggatgaaggcactcgtttcacacccccccaaaaaaaaaaaacttggagggatctgcgatgaccaccagcgccgcggatcattttctgccgtactgatctggatctgggagcttggtgccgctggatcgtgacggttgtacggtagctttgccgggcgagaggctgccggaagaaaatttggtgagacggaggtcctacgctaacaagaaagacttcgtttccaagcgcgacatgtgtgggcaccaatcttaaagcaactccatcctcatcttcaacctcacgcctcacgaacgttctcccattccttgtttgcccagcggctcaccgctgcccccatgctcctaacgagcttgcaaagaggagcacgtgggagcttgcccttccttggtctgccgagcagctcacagcaggacattgggttggggagcagtggcgaactccagcggtctagatgaagaatttgtagcaagcttgactgcttgaatagttgagtacatcgagcacaaattgatgggcagttgagtctgaccgtagggtgaggagcttgctgacctctcgcaggccaccgcttcgcccccaccagtgtgaccttgctgcttcgctgaacaagaaggttgaatcgacgcgttgccctccatgtgtgcgagctcgtcaagatgccgaatgggagtaaggaatcgcctcccgccgatctcctgttctctatgagcgagagcttgccgccagactgagctggacggatcggaggaatcactcatgcgccgtttcatctgtgcaaacggaggaattatctgtgcagctgtaccgaaaggggagaactgagagattgctttgagatcggtagggaacacgtgtcacgttttgaaacaaaatctttctgataaacataagacttcagtcctaccaaattttcttccgaggctgcctggacttggcaggacgctctcctcttcgccccacaagaagagcgcctcggcatcttgcgcgtcggccggacacaaagatttgtaggtcccacatctctcaaggactgaaagcaccgaaggaaaactagtcggattggcccagccgcagcagcccatagttattcggctcgttactgtgtagtcgttggagaaggtatacgcatcggaaacgattttgcgactctttgtgtatttctatttcgggccgagtttagttccaaacttcttctttaaactttcaattttttcatcacatcaaaattttcctacacacataaactttcaactttttcgtcacatcgtttcaattttgatgttaactaaccacatcctcggtacttttccgagaaacaataaaaatgctccattttggatgcccctgaaattggcaacatatatatcccataatcttcgacaaatgcatgcgcatccctgaaattggcaacatatatatcccataatcttcgacaaatgcatgcgctaaacaaacgtcagatgattgaaaaaacattaaagttacaatgttcagtatcaaatatcaaatacgtacattggtcatttcaaggaaggcttttttctaaaaaaaaataaacattgcgcggaagccccatggttaaactccatagctgtattgaagggactgtatcttaataaataaaattatttatttgcttcgaaatacttcaacatgtatataaaactttctccacaaaagtgagaatcatggtaactatgtcgtggcttttttttttaaagaaaacacacaatataaatgcacatactcataatgggcgtacacacccctataaacacacacgtacatcgtatctctattagcacctttgaaaggttaggtatatcactgaaagaatgattagctataaatgcgattttgtagtagtacctaggaaataaacaattaagtggtgttttatatgagtagcgagattttgcagctagaagcggaggtctcatcgtgttcactgtcacgccataattattttaggaattaataaaatgtttgtagaatttatattaaagtgggagtaattaaacaagtgaagttaatatgagaagtaaaatagcctttagtaaattgtggcaatactttactttccccatgtcatacaatactctctggagtttctcagaattttcggagcctaagatttaattttaacaaaacaaacatcattcagtaattatttgaaatgaaaaacaccctctgatcttaggccaattctagcccgtttcccgcctagtgccaccagtccaggaccatttggcccaatagtacttactcacatctaccacccaacatgggccgcagtcggtgggcctatcgaggcagcgtcccccgctcgttgcttttctcctggcatgcaaaagatgaaaaagatttgaaaaacgcctctgaaacaacagcatgatcagatgcacaaactcatcataaatcgaccgaaaggatagacgtactcagataattttttttctcatgacattacactgacgagcgaactaaaaccactgcaaacctaagcgacgagctactacaaggttacaacaaatgctccatcgaccaaaagacgagctagctaatttctacccattattaattccaaataacgtgcacgaacttaattaaaccatgcatcatccaaccaaaccactaactaaattggcgatatgcgtgaacgcacatctcgaattctccatgtcaatatcgatcgtctcatcacatcatcggcacgccggcggcgtcggcggcggcggcggccgggcacttgccgccggtgccggggccgaacatgagcgtgctcttggggcggtacacgccgcggacgcccttgggcagcgacgccaccctctccctctccagcgtgagccccagccacttgttcgacgggatgaacggcgccgcgcacagcggcgacggcgacgagcccaggtagacccggcacctgctccgccggaacacgtccagcctgtacaccatcaccaggaagtagccgttcttgtccgtcgccgtgctcgtcatgttcagcaccttgtccccgtagcacaccagctgcgccgtcgcatctgcaaaatattatcatagagactatgttagtcatggaaaactgttttaatcgctcggatgattgttcacctgtttgatgcatatcatctaaatagctataaaaactttttaaaaaaaattaattacatatattgctccacaaacatacaagttaaaatttaactttaataaattgtaacaaaaataacaaacaaaacttaaattactatatatatctccaaagtgaagattaattaatttctacatatgtaatgaaaatggtttacatctccgacatttgcctacggcactggatactaacttggtaggggagacgcgtccatgtagcggttgtagccgctgaggttgcaggacttgcagtagattgtgccctggacgacgacgaccggctggatacggctcggcggcgaggtgcgcggcggcggaggaacaggaacaggagccggagccggagctacatacctccccgacgcatgagaaaccgggaggagaattgcaaggagcagcgcggccatggcgcagtggatcttggaggacaccatcgttgatcagtgtaccgcacttagctcgagtggaactgaaaaaatgagcagtactgatcgagtgtgagagcccttccagatatgagctaatttatagacggagatggctagggtttcctgccgtttggagtaatttggttggtttgcttcatttgcgatcaaacaactgatagctgctaattgagattccatttggatgcatcgcagttaatgctgttgttggcttatgacagtagagtccgttagggttctaaacaaatgcatcacactactccagtacgctgctgcaagcatgaaagcgtggacgtctttgacgcctgtagatagccaacgcaggatcgaattcgtgaactgccaactgttctttacctggcttcatctcctgcaatttgttgtcacctttgatctcagcatcatatccattctcagagtttttgcttactgcaaatatcggcagaagatactactacacctgaccaagtgactactgcgtttactttgacagagtctgagccttttatcggattcaatccttacaccaacttgacacttctttaccgtgctcagttggatttttcgtgttttttttttacccctgaaagttttagatcgagctaggcagatagctgaagaagaagctgtacatagcttttcggggcgttaaaagtttaatctgatttgtcattggagagcgtggccagtactgatgttcgcgctgaacggcgacgacctgtgtttgtactcttctacatgaacgaactatagagtagttttttgagctgggtatttgtgcggagttgcttctaaggcaggcaagcctccctcctgaatccttgatttctggttctgaattcgttcatcgatcgttactagtcagtactctttttttcccactcagaagatgatctagtcactcgatcaactacttgtcacgaaatggatgcttgtagcagaggaaacgtgaggatatacaagtgttcacgaacagataatgctatcaaattcaaatgtatgcatgaactagggaataaactatatgtctaattttttttcagtaagtttgcctcgactgcaccagttttcagtcgagacaaaatttgactcaggttgactcattgagtgggcatttgggcctgcaagcggaaggcgaaaaggcccatctcggtatctctctttcattaggcaacccaacacgagacgggggccaatttacagtgctattgctcctctattgggactccaattgtaatgcaaaagcccatgaggttctcttttcgctgggctgaaagctcatgtagtcttgcaggagggaaaggctctacatgcatgatgcaactacatcaggacacatcaaacctaaaagaaaaaagaaaaaaagatttggagggagagacgtcattctaaacatttttaagaaaaaaattatgagcgtgttagaaattaaacacggaactatcaagtgcatgtcaggagacatcaaacctgtttttcaactgaaactttgatgaggaggaggtaattgagaagatgcttttcgctggtgatatatattgagcttgcaattgacggtgacctagatttcttgattgagaatctgggagaaatcatgaaatcatcaggagtatgtgcgccgatggaagtacgcttccggttgctat

SEQ ID NO: 17820 - DNA, 7446 bp, Oryza sativa
aattcctgcagcccatttgttttttttaatgattttgataactgttcttattctctgagaaattggagtactagaatttcaggaagcaccgaaggacggccagtttgataggataccttgtcatttgctgaaattaatgaagtttagatagtttggtagctagcttattgagctatagcaagtagtagttcttgcgttcgcataggccggttcccatcccgaacagttggcacgaaaaacggagcggtccattagtacatgattaattaattatttgctattttttttttaaaaaaaaggatcaatatgattttttaaagcaacgttcgtatagaaactattttttgaaaaaacgcaacgtttaacagtttgaaaagcgtacgcgcggaaaagttggaaacttagagttccaaacacaccctaagtgtagtcgtcgaagcattccggtatcgtgaaatgttgcccatgtttctgtatgcgaaccagtaaatttattttttgcatgaagattgaattatctaaaatcacctagatacctgctaactactagtttagattcttgacccaatcaaagttttctgaatttgctagatggaaatttgttttacagagttacaataattcagcaactctgtagcatctggcattcatttttttcccctttcttttgttaatttcttatgtaatacatgtacatttattccacgagccagcaacttgcaatcctacagatgattaattaattaaacaaagagttattgcattccgcaaatatcttcagccttcaggcaagctgaaaatcttcaggtttcagtatatcctattcgcaatcaatcaatcaaccaatcaatcaataatcttaattctgtgttcatttctcgatgaatccggtcatctggaggacgaggttcctgacgttgcggaggtcccgccctttgagcgtcctccccttgccggcgcacatggagtacgccgccgtccttcctcggagcctcctccgatcaacaatggcgtgcggcggcgcgaccataactccattattcatcatcttcttcttcacagcgtcgtcgtcgtcgttggtctggtcgaacatgttgtactcggaagcccacgaccgagaccgccgcttccggcgagaggcggcgatctccaccggagcagacaacgacgacgactccggcgagcccacaggacgacgagccaccggagacggcgtcgtggtgacaaccaccgcgccgtcgtcggagttgtcctccgcgggctcgggccacaggatgtcagcctcttggaattcctccatggcgtcgccgtcgccgtcgccggccgtctcctggacgacggagagaggtcggcgaggagacggcgagggcgtatttatatacggtggtgtgcgctgcaaggaggaggagaagaggaagaagctggcgtgtcttggtgagcaagcacaattccttggggagacggcaatgagaggagcggagcggagtgtgtctgtacgctggaaggaaccgaacagggttgatgtggagtgcggtgcaccttatcgtcggctgccacgtggatagcacacgctaatacagttgcgttggtcatttttgtttttgaacatgtgggtcattttagtttttactgtgtggcacactctcgctataagcccttgtgtagttcccaaatttttttcccaaacacatcatatcgaatctttcacacatgcatgtagcattaaatatatatatataaactaattgtacaatttgcatgaaaatcgcgacacgaatattttgagcctaattagtccatgattagccataagtgttacagtaacccatatgtaattaggcttaataaattcgtctcgtggttttcagacgagttatgaaattattttttttcatttgtgtcagaaaaccccttccgacatctgatcaaacgtcctatgtgacacctaaaaattttcttttcacaaactaagcagacgctaaatccctgagaatgtggagagagtctgaaaatgaactacagttttgttcagactgttttgatttgtgctaatataaggatttgattttctttttaaaataaattatctgaaatattatagcatgggtttaattgggttgtactccctccatctcataaaaaatcaacttagtactacgaatctggacataggatgtctcatattcggttctagattcgtttttttatgggacggagggagtatatattagcgaggatgaacaagttcttttgtgcaccacagcaaaacggcaaaacggcaattttagagtggtgttatgatttctgccaagtttaatcctacgctctctctaactaggtcgcttactgtgtgcccacgtgttgattaacaacgtaacacacgaggtggtattaaactggggtagtccagtttcctggtaaacccaacttgataaatgacaattttcacacggcaagataggtatttacaatccacggcatcctcagtgtttgatcccttttgatatactgaagcatgacaaaatttcccggaacttatttgttcaagtaaaattaaagcaacgagaccaattcaaatcgagctcccaaatcatcttcttacattttaattcctcattcatgatacaaatccagtacttccatggatgcatatacagcttcaacttcataacctgtccttaaccctcaatggcagcagcgcatgcatcatcatccttcgatgaacccggtcatccgcagcaccgagttgcgcaggtggcgcaggtcgcgcgcccgcttgcacggccgcgtccccaacgacgacggcagcgtgcacggcgccgccgccatctcctcctcctcctcctcctccggccgccgcacgccgaacagcagcagcaggtgcggcggcacgatcaccaccttcccgacgacgctgccgtggccgtcctcctccatgctggcaccaccgtatctccagttccaccggtgtaagcgcgctcccctgcaggggacgtccaccggccgagagtgcttgacgcgcggcgtgggcgcgcgtgtctcgtatggctgcaccggcggcgcaggcgagatcgccggcggcggcgcgtcgtcgtcggcggcgtcggtgtcaggccacagcacctcgaactcgtcgagctcctccaccaccatcgccatggcaaggcgtggcaaccagctgccgagagaaagagagagagagctcgcagctcagctcagctcaaactgaggcgcgcgccgcggcgtcgagcgcgtctaaatataccggggcgcgcggcttgcctgcctgatgggattctaccgcgtctgatcggatcggatcgcgagagaaattctggggcgacggcgaccgctcggcgggcgagctccacacgcgtccgcgaaagagaagcggcggtggggaggtgtacgtgtggatgccgcggccgccatcgcgccgcgggctccggacgcggcgaacggaacacacgtttcctctcgccggcacgccgccctgttgcagcgttgcaagggaatcgacgcgagccacttagtacgtgactgatcgcagtgtgcatggtttgattttttttgtttggtgatgaatttattaagcatgggttgattaattgggcccggggtcgtaatcaaggctgtaatcagtgagcagttgggaattgggatcgacaaaatgcaactagggatataggaatatacagtatatgcttctgttctgctccagtgcactactacgccagtacgtagtagtagttgcgcccgtcaacatcctcactattcatcagcatggatccatcaatgatcaatccgtgtgaacagccaaacagggcaattttggctctggtttctgggtggatttaggctggacgtgtttagttacttttcacaaaaaaaaattagagtatacggacacacctttctttgaattattaaatgtagactaataacaaaataaattacagatttcgcatgtaaactacgagacgaatctattacgcctaattaatccatcactaacaaatgtttattgtatcaccatattatcaaatcatggcgtaattagcctcaaaagattcgtctcacaatttacatgcaaactgtgcgattgatttttttcgtccacatttaattgctatgtatgtgtccaaacatttgatgtgacggaatttttggaagtttgaaatgaactaaacatatccttagttcttatcttcactttcccaactcatctccctcgtttttcacacacacgcttttcaaactgataaatagtgtgtttttacaaaaattttctatatgaaagtaactttaaaaaaatatttttcaaatttattttggttaatacttgattaatcatgcactaaacactgctttgttttgtgtgctagggagtaaggttcccaaccctcactcccgaacacagccttatccgtcttcccaacgccggagaaatacccagggtattttagctagattctcatggtgatgggctagacaatctggatttaaagtttcaccccttctaattatttatattaggtccttctctaatattcgcgtatgtcttcccaacgctgcagcagggtgtgaagtcggcagacttgctacaggcctacagctagtgatctccacgactccacctaacctaggttgtgtttagttccacgtcaaaattggattgaaagttttttttaaaaaaagttaaaagtttatgtgtgtaggaaagttttgatgtgatggaaaagttaaaagtttgaagaaaaagttagaaactaaaccagcacctaaacttaggccctgtttgattcagcttataggattattataatctagattattaggagtaagctgaaacaaacaagtagattattatgctagattattataatctataagccagattagtataatccaataatcttttttagaggagtttttttccagattattaagtggctaaatactctctacccttaaatgtctccaataatcccaagaaataaacaactcacaacttattttatatcagattattataatctagcttagagtaatctgatttaataatctagattacaataatcttaaactgaaataccttaaacctgcacggaaatctcgccgggtcaaggacgacgatgagggcgccacggacgatggaccagacggaattggggcagcccggggctggggcggcggggggcggagcttccgtagttgtcaccaagaccatgcgagatcaggtgagtcgtgatgtggacgagtgtcacaactcacaaggatttgttctgaaaaaggacgtccacatcacataaatctcaccacaatcagagccgttcaatcttgatcgaacggcgcagcagacaacgagatgcacttggtcttgatagtgcctaagcacaattaaagccgttcaatcttgatctaacggcataatatacaatgggatacacttgacagtacaatagtaaaatgtgtattgttataaccctgagtttccgtattctatacccgacacgttcctccttccaaatcttcaatagacattttcacgaaccaaatctgctatggtgtaaaaggaaataatctatggttttgctattctctccgtttcatattagaagacgttttgattttttctaaagtcaaacttcttaaaagctttatcaaatttataaaaaaaatgtaacaatatttatagggattaattcgactaacataacatttatagtaggatgttatatagcaatttcctaattatagtattaaattagttttaataaatctaacattgaatatattttaatagtttgtttgttctatattaaacctgttgttgtattttttttctttataaatttgatcaaactaaataagtttgacttataaaaaaacaaattgacttataatatgaaacagaggcaggatctcatttgtaacagattttttactcatatcttttgatttttcttctgtataatcttacataaaagatttatatcctgtagatccaacttatagttgcacccagttatagagcactttatactttgttacttctatatagtaattacactcagctacaatacaataaaattatattttacaactatttttgtctttaaatttacgatttttgacatatttattctttttttatttcattcaaaacgggttgtatctattggttggtaattccataagatttgagcctctaagttctacctaaagatcattagtagtcccataatcaaaggctatcctgtggcgatacgtttcatcccctgcgctgacgtatcacatgctcaatccaagccgctcaaatgtgatcgaacgtctcacggagtcccggagcgggttgactggttggttcctcctcctcgccgagtcgccgttgccgacttgccgtcgtcatcgagttgccgcccgcccgccgccggctactgtacctcagtagttcgcgccggtgcgccgcctcctcgctgccctagacgattgcccgatgcggcagcctcagccgccgccgtccactggcactacggcggcggattcagttgccaccgtggccaaatcaaaggatggctactcatcagggcgcctccgccgccggccatggcaccctgccctgttgccctgaattatcactggcacggcaatgtccggcaacgctgcctccgatgtgcagcgggatgatcacggcgacggcagcatggagttacacatgccgacggcgacttcactgtcggctgtgcactctgcactagtccactactgcagaagttcagagccatatcatcctgatctcatgtttagtcagatcttgcaggccgcaggttatagccctctggtctgtgacctaggctgatcctgcggtgcaaaataatcgatcgaacctgttgattcagtgaagcagattgtgccttctctgctcgctcgtgtcaatttggccgggcacagtattgggatttgaggaaggcgtcaacattaagtttagtttggatcaaaaaattgctttccagtttctcttcttttctttttttttttacatcttcttgtcttgtcattctgtacataaactctttctatataggcgtgaattgtttatgattatttcgttatcaaacatgacaggaaacaaagcaacggttgcagcaaatgctatacaattcagacagacagcaccatcaaaagaacctccttttcaggcttgaaatctctgggaagtgatcagtagaatccttggaactcaattgtcaaataatctcaaccaaatctaatgcagaaattttatttgtacaaagttttaatgctgaaactttgcttttttgcagatgaatatatctttccccacagtatgtgcaaatgtgcaatcagcatctccattgcaacagttacagtatcttgagagttgagtgagttgccacccttgatttcctttccctagtccaa

SEQ ID NO: 17821 - DNA, 7722 bp, Oryza sativa
cacccccacccccctttccacataaactccccccaccccatctcctctcccccctgaataacatcggcgcctcccaaaagcgaaacctcgacgccacacgcgcgcgcgccatcatgcctgtagcctccgtcgtgctcctcctccacctcctctccatggcggcggcggctacggcggcgctggccatggaccccgccgagagggagacgctgctgctcgtcatggaggccgtctcctccgaccgcgagtggcgctccgtcggccctgacccgtgcggctccccgtggcccggcctcgagtgcaagcctgtgccggccgccgggaacgtgtcgtcggcggcgggaggctgcacgtcacgcggctggacttcggggtggcgccgaacccgacgtgcaaggacggcgcggcgttcccgcacctcgcgttcgcgcatgccgcacctccagtcgctgttcctcgtcgactgcttcaagaacccggcggccaccacggcgttcacgctgccgccgtcggccaacctcacctcctcccgcctgcagcagctcagcgtccggtccaacccgtcgctgtccggcacgctgccgccgcagctgtccagcatccggtcgctgcaggtgctgaccgtgtcccagaacgcgctcatccgcggcgaggtcccgcagggcatcggcgagctcaagagcctcgtgcacctcgacctcagctacaactcgctcaccggcacgatcccgagccgcatcggcgagctccggagcttggtcggcctcgacctcagctacaactccttctccggctccatcccgggccagctcggcgacctcgccatgcttcagaagctggacctgagctccaacaacctcaccggcggcgtcccggccaccatcaccgggctgacatctctcaccttcttggcattgagcaacaatggcctaagcggccacctcccggccggcctctccgacctccttgacctccagtacctgatcatggagaacaacccgatgggcgtcccgttgccgtcggagctcggcgacattgcgcggctgcaggagctccggctggccaactccggctactcggggtcgatcccggagacgctcggccggctggcgagcctgacgacgctgtcgctggagaacaacaacctcaccgggaggatccccgccgggctgagccggctcaagcggatgtaccacctcaacctgagcaagaacgggctggacggcgtcgtgccgttcgacggcgcgttcctcaggcgcctcggccggaacctcgacctcagcggcaacccggggctgtgcgtcgacggccgcgccgtcttgcaggccgacgtcggcgtcggcgtctgccgccgcgccggcgacggcggggacatcgcctccgtgtccgccgccaccgacgtactatcagttggcacattgttcaggcgagatggacaactctggctcgccggcggccgctggtcagcgctgctgctcatccggccggtcgccgtggcgctgtgctgcagctgctgccttctgctctgagctcgcggcacgcgcgcgcgtggtggtttgatctgtatgtaactctgctatgttagtggtagtataacttgtcacgttaattgcgagaattccgaggcaagggaaaagagtttggtagtgttggggtacttctacacttctacagtacttgggtgtggattggattggattggcacgttggtttcaaatcgtcgcgccggttgttgggttggggcccggatttgtgatcggtcaaagttagcgtccgggtcccaggggagttaggctgtgtttagattcaagtttagatccaaactttagtccttttttatcacatcaacctgtcatacatatataacttttcagtcatatcatctctaatttcaactaaaatttaaactttgcgctgaactaaacacagccttatggtaactggctgtgatttgtgcgtggccgatctggccataaatccggctgcgcctgcaatttgcaagcagttttcaggcactctgcagcctgagctctgccctgcttttcattgcttgccgctgtataatccaatgagtgttatgcccctcattgccttaagtaagggaaccagatgcagtggtcaggtgatcatgtactccagcgttgatgtctgaactgtttgtactaactgacagtatggcttgtctatagggatgcatgaacaaagtaggagtatgtgttaaccggactatttctcatctgcactggaattttatcatctctttggttctttctttaactataaccacggttcgggcttgatgtccgggaagatggaagagttttgaagtcctttgggaggtgctgagagttgcaacgttttttgagctagggagtactccacgtagtactccaagtagtactagtgcatcacattaccggctactggacttcaccgtaaagatctcaagcaaggcttggtttagtttccaactttttcttcaaacttctaatttttctatcacatcaaaactttcttatacacataaacttccaacttttccgtcacattattttaatttcaatcaaacttttaattttagcgtgaactaaacacacccgaagaaagaaaaccgtgtgacgagaaaatacggcagtactgtttgtactgtacggagtaagagtagtacagtactgtactcctaccaaggaggaaagagaagtcccgtgtcctgtgacgggaaaatacatgctgaggagtacctggcaatgtacaaaatcattggtgtctatgttcagcgtgcatggacatgaactgttgaaaaggacagtgataggataagtgattgacatgataaatgtacatcctgccggggctatacaacaagcttgcggtagctaggggcatggcgtaaacctgaaagattgttttttaaaaaaacaagagtaaacatcaaagcgatcgattgatcgaagtgataatatgaaaagaagaaagaaaatcggttccctgcaggcagtaggatcgatcctgaccatgttagcactactgccggctggatactcctagatcgatagataccctccatggctccatgtaccgaaagcgagcgagcgggagagagagagagagcagagagcagagagcagaaaccagttgtcattagctgaaaatgacgaggggaaaatggacgagtgattaacgcacaattaattactccctccatcccctaatatagtaaactagataggattccagataattatcctaggatgggtctagattgttatagtctggacgaagatagtagtaagtagtattaattattttaaattcagaaaataaatttatttgattgcttaagaaaactttgatataaaaagtctctaaaaagaacgtactaccgtatactccatccgtttcacaatgtaagtcattatagtatttctcatattcatattgatgttaattaatttagacatatatgtctagatttattaatattaatatgaatgtgggaatgtttataataattgacaagagttgctcccaaacagctcaaacaaaagtagcctaaaccgtcccattcttataaagtatgtacacatatcttaactactttaaaagtacgattgtttctcttcctcttcttaaaaaaaaaactgctccctttatttcgaataaaaatcactaaaattgtggtaaaaaaaaagccagtgcagccattctccttgttccctgaaaaacccactcaccatcataaaaaactccctatagaaaccggtaaaaaaactacccttaaaaaaaatctcataatcccgttactacttcaccgtaccgcatcgtatgtgtagcgtgtggcttggggcctctcctctcttacgccgtgtaacggtgtaagctcgctcgctcgctcgctcgggacatcgccggtgaaacatggcgtcgattgtagaatatgcatgcacggtgatgctacattctctactcgcgaaagaccaccactcacccatcgcccatcggcgcgcacacgcacacggcacacctggtgcgcccgtgcgggcgcgggtgagccgcacaggaaaagagagcagcagagcgcggcacagtgcctcactgtgccgcctgcgcgcggtgcgtgcgcgcgtgtcgtgcacttgtgctgtgccctggtcaaagcgccgcgccggggaacagcaacgcaagcaaagcgagcgagcgcgcggtggtgggcacaccaaggaaaggagtagtacgtactgtacgcgcgcggcggccgggccgtgcgcacgggcgcgcacctggctctggctggctggctggctggggttctctgcccgcctcacgtggggaggagtcgcgagcatgcagcgacgccctgtagcgatggatggatggccaggacggctcgtctctatccgagacctgggaaagggatggggtattggggtgtcgtcgtcttgttgtgtgtgccttttttgatgctacgcgccacgcatcttgcggtggttttgggagcctcggccggccggccctggcgcctggcggcctgggcttttgcaggaaatgggcggcacctgagtcgtcgtctcacctgccgctgttttggagtacatttgtgctacttgcacaagaaaattagccgtactattttgtgcacgtgatgtgtttgcgcgtgcccagtggctggcggtgaacgaactggtcacttgtacaggccactcaggcgaagttgcagagtacagtgagccattctacatctacctgtctactctcattgggcctaaaagatatcgcaacaagaaagagagcccacagcaaatcacgcctagtggaccttaggagttaggagcccgttcagcccagaggaggaagcagatcataacgcaccggggccttccaaaggtagcgactggctttccgtttgtcgttacaccatcgtcatgggccttatggcaatggcacagtactgtactccctctctcctctctgtctcttacaaatttaagatttgattttgctatatctcactcgaaagattttttcttatctctcactcgattttctcactcaaatttacagtgtattttcttgtaagttacagtgtaatttataaaacttatgctgtaacttttgtaagttacactgtaatttttgaatcttcgcatgtaaattttaaattttgtattggatttggtctttttcttgaggatatggtaatttagtgttcattatggtgtttcttaattgctttttgctttttattatatctatcggattttaatccaaatattaaaaatctgtgtgatacgatcataaaaatctttcgaaagatgtataggtactccctttaagattaacatgatatattctaatacaacgaatctggatatgtcaaattcattgtactgtagtactaaatcatattcagttatatattcattttcttagaatggaggaagtagtactactctgtccctaaaaaaataaactctagctaaaaatctgggcacgcatgtgtcatctgtccagattcataggtatgattttttttttgcgacagagggctacttctctagttttttttttatggttgtcctagcctattcttctctagaagatctgcgtgatctaaacaaggagtgcaaagacaagtgcaggtagactcagatcagacgtctttgcacgctggtacttgtagctggattgctggaagcttgctcagggcacccgcaattcgacccctacttgagtggcaactgagaaaccttgatctcagcttttcttgttaatattttcctgtacaatgcattttttgtggtggttagcagtgtagtattaatataagagagaaaaatcttggatttgtcaccttattaaggctgtgtttagttggggaaaagaaattttttgggtgtcacatcagacgtttgaccggatgtcggaaggggtttttggacacgaatgaaaaaactaatttcagaactcgcctggaaaccgcgagacgaatcttttgagtctacttaagccgtcattagcacatgtgggttactgtagcacttatggctaatcatggtctaattaggctcaaaagattcgtctcgcgatttatagctaaactgtgcaattggtttttctttttgtccacatttaatgctccatgcatgtgtccaaagattcgatgtgataggtgaaggggaaaatttttgggaactaaactagccctaaggtagtactactagcattgtaaagtgttttgatattattgaacgtgtgaaggatggatcttgctatagttctgcagccttttcccaacagtatatgcctgtgctgtccaatcatgggaagggaataattggggcgggacaagccgttggttttgcacgaggccaatcgcgttgctctccccgcccgttgaaagctcatcacggagaaaacttgcgagttactctcctctcgagctactcgcaacttgcaatgttgcaacagattgtgcgcgccggcaaagccatcagcccatgccccatgcccgttaccgtgccgtgtcaccaacaaatcaaaccgagcgccaggtgatagccagaggccgccgacctggcctgacaccggtgggtgggtgtgtgacagtgtgagaggaacaagaggaattcgcgtgaaacatcgccaaaaaacgcccaaatttctcgtgggattcgtgtgaaatccgagcaaaactcgcaaaaaccggtcgactcgtgcgtgcgtgccctaccccgtgtcggcgtgtctcgcggtgtcccaatgggaccatctctggtcgttgcctgtcgtccgtctctggttaccatgcgacgcgacgcgatgcgaagcgacggctcgcgtcgcgagtcgcgcgacccaccaccgacccggcccaccgcgagcgagcgcatctccgcgcgccacgaggccgccgctggcaggtgggacccacgtggcccaccaccaccacctcctcgtcctcttcctccacctccccccctctctctctctctctctccctctcctcctcctcctcctctcctctctcccgtcacgggcgcatctctctctctctctctctctctctctctctctccccgcacagccgcgccgcgccgccgtcgccttctcgggcgagggcgaagagcgagggctcctgctcgccgccgcccctccccctcgtccgcggcgcgccggaggtcaggtaggagccccccccccctccgccatccctctctcgcatacactctcactcctccctcctcttcatcatcctccaccacgttgccggcgcgaattggcccgagcgtttgggattggggacgtgggaattcctcccatcccgtcctgcttctcgtggagagagatttcgcctgcggatggattccgtacgggctctctctccgcgccgccagatccaggaggggagttcgtgcccgcgatacgctccagtgggcaatccggtttcgctttctgtaggttagctgggcaggcaattttcccatgaattgatttctgggattggggggcgagtttcagtcatctttttccgcgggataaattgatgtttgtttttgtgttcctaccgcagtaagttaaactatgcatcggtaactcgtcgagatccattgatgtgctgtaatatcgtacttaatactcctgatttgataatagctatgaagattttgtgtctcctaaagagcacaaaaatgttaatatgcttcgactgggacttaggtagaa

SEQ ID NO: 17822 - DNA, 9297 bp, Oryza sativa
tcaagatacttagattatttatgcacccacatatcattcgcctttatgaggtgatagacaccccagctgatatttatgttgttatggagtatgtcaaatctggagagttgtttgattacatcgttgagaagggaagactgcaagaggaagaagctcgacgctttttccagcaggtaggctttgtaccattttcctggattggtttttaaggaatacactcagtaatcccatctctagttagggtttgcacaagttctaaatgcagcaagtcactgtcaatttttcattttctgttgttgcttccgcattacagatttggtaattttttatatgcattgtactgatatgcttcagttagcatccgaggataattttcttttgtttgatctttgaattagatcatatctggtgttgaatattgccatagaaacatggtggttcatcgtgatcttaagccagagaaccttcttttggactccaaatgcaatgttaagattgcagactttggcttgagtaatgttatgcgtgatggtcactttctgaagacaagttgtggtagcccaaattatgcagcacctgaggtatttatcttgaatgatttgcattattactccttcttcatgattgcataattgcttctatctttctttacctttttcaattccttttccatttgactaggtgatatctggtaaactatatgctggccctgaagttgatgtgtggagttgtggtgttattctttatgctcttctttgtggtacccttccatttgatgacgagaatattcccaacctttttaagaaaataaaggttagcaaagatgtgatatatcctactgataaaggtgctgcctcatctccttttatatgttaaagtaaaactctgtccgttttgatgttctagggtggcatatatacccttcccagtcatttgtcacctttggcaagggatttgattcccagaatgcttgttgttgatcccatgaagaggatcaccatacgtgaaatccgtgaacatcagtggttcacagttggtcttccgcgttatttagctgtgccacctcctgacactgcacaacaggttaaaaaggtaacatgctgccattatgcatctaactatttaaagccgtattctgcttttgaaactttcagtgtttgatttgatcaatgtgagttttgtagctcgacgatgaaactctgaatgatgttatcaatatggggtttgacaagaatcagctaatcgaatcacttcacaagagactgcaaaacgaggtgtttgcttcactccattgctcctctttgttgtttcttggggaatgcatgacaaagtttctgaataatgtgcaggcgacagttgcctactatttactattggacaataggctgcgcacaaccagtggctaccttggagctgagttccatgaatctatggtatgtcaactcatctctctctctcatttattgctttctattgattccaaattcctggcaaatgtgctgttccctgtagcactacaaagtttatgataatttggtgctttgctttctgtgatccaggaatcttctctcgctcaagtaactccagctgagacaccaaactcagccactgatcatcggcagcatgggcatatggaatctcctgggtttggcttgaggcatcatttcgcagctgacaggaaatgggcccttggtcttcaggttttatgctgttactataaggttcttatttattcactttatttattataagttatcctaattcatttgtctgtatttatttaacagtctcgagcacatccacgagaaataataactgaagttcttaaagctctgcaagagctaaatgtttgctggaagaagattggacattataacatgaaatgcagatggagtcctagttttcccagtcatgagagtatgatgcataacaaccatggctttggtgcagaatctgctataattgaaactgatgacagtgagaaatcaacccacactgtgaaatttgaaattcaggtatcattttgaacttgacatatgattattaaccctgggatcatgtatcggttagaacctttgaaatgtagatctgtgcacgatctagttaagtcttacatagttacgcatgcctttactctatatgtgatgattaagctgcagagtatttatgaactgttaccatattcatattccttaaggctatttatgattgaggaagtccatataccgcatctttttttgacgtgtaaagtgtaatgtttggaatattcaatttatgctgatatacttctaattgctgcagctttacaaaacaagggatgaaaaataccttcttgacttgcaaagggtcagtggaccacagcttctctttctggacctgtgctctgcctttctaactcagctgagagtcctttaattatgccgttgtctgcttcccaactgaacttcctgcagcataccgtggattgtcacgtttcatttaagatatgtacataatgaccataatcctccagtagataatatttcctggagtgtgtagacgttagaggctgccagtgatgtattttgacggtaattggccaaaccagaggtaacaggcaggaggcaaacctttctctgtttttttatttgccgttgttgttgttatatgacggtttagacttatctagagtccttgaaccactttgcttgtttacggtgatctttactagcctgattgcccagcctgagaatcacctctgtcgttatgaaagttgagcagttggcatactattgttgatcctgcattccttgacagatgaccgttggatacatgcagagctgttatctttttttttttcacatcataattactcagattggttacccatttgcttctgtatgtgttgactggaatgttaaataagaatagttccctcttgattatactagactgtgcaacggttcatctgagatctgtgctaccattcataaatcaagctggaaatcagatcatgaaatagtcaggtgttaagttattgagaaattcgagcatagatctgagattttaacgaggaatcttagaagggcaatggagtacaaaaatggatatggtctactaaaaaaaatttatgcacagtagtcagcggatagaacagaatcataaattgtgaaagacctattgtaatctaataaaaggttgaaatctgtaaagtaacacgcaagcctctaatccgatctaagctataatttacatcttcgctaatttacacacgaactatgaatccgcgcaaatggtattactgcatcaggtatgcagagtctgctcggctgaagcaaggtgccccatttgctcggtgatctgatcaaccttctcccggtgatggaagccattgcagcctaattctgcttttacatcgtccttgggagactcttgtctttctgactcatccaaacatgaccgtggagtctctgtgaggaaccgctcccaaaacacatcgttggtcggtccatgcgaagcttcagtttctgacgtgccatcttgtgaagtatcagtggaggaggcaatctcagaatttacatcagcttgtgttgggtatcttgtcacatggatatcttcacgaatctctgccattggcagctctggactctgcacaaaacctggagactctgtgagttcagtggataaatggagatgggcattccctgtgttgggtgagctgggatggaggctagctggtaactgaagatcgatgcctgtctccattggagcagtgttcatctcttcaggacatatagcagtgctgggttcagtaccaccatgaccatgggagtacatttcttcagcagctgtgcaagcatcatttgctctctggaagagtttctccagggagaccaggctcagctcaaccctgtcaaaagcctcaccattggtcacaggaagcacgggaggcatggccggtgcatccgtcccaattccctggaactggaacaccttctgttcttcgcccgccgcgcaatcgtcgacgaagagatccatcttcgggaccctcctcttcttgctgaaatggtcggactccagcagcgagctcgacacggcgccaccgcgtctctgcagcatctcgcacagggaggccacgatgttcttctgccgttgctccatcgccactagcctgccttccatcgcctgcatctgccagttgatcacgtactgctgctggttctgcctctggaggtccgcgacgaggatgctcttctcgtacttgagccggttgatctcttcttcgagctcgcgcctctccgattcggcgagtggtccgtttatctggttctggagggagtggctgtgcacgggcttgcgtcgatggatgttcttcagaaggtgcgtgtgccctcttatgaaatcctcgtttgcgaactcccatctctcaggatcgatttttcggaaaccctgaaaggaagatgccaattgaagtcaaaattcagctacggtcaaaccaaccaagaataaagaactattttacagaaaatcaaataggctatataaaaccggctgctgtgtcaatggtaaaatcatccaaacaaaccaagaacaaggaactactaatttacaagcaaacagtagcacatgattgttgcaatgtttgtttcgtttcaagaagcaaaggggattgtgtttgtgactcacgtaggtgttgagctgcctgatgaagctggagaagttgttgtgcttgaagtacttgggcaacaggtcacgggagaagtcgagcgggttccacacgacgaagctggcgccgccggggccccacgacacgacgtggttggtcgccgcgtcctccaccatctcgtacgtcttgatcaagaacggcggcggcccaccgccgccgcctccgccgccgccgccgcccaggttggaactctccatgtcaaccgcgcctctcaattctcaaaccagcagctgctctgcacgatgcaagaacggagcccggtcttaacgcgcgcagcttcgctctcccacgaacaagtcttaaccacctgaatggactcggcgccaaatccaactcgccacgggccaaaatttttcacattgaaccgcggcgcaaattctcaccgagtcgccaaaagacagcgactttccgatcgaacgccaactagttctgcaaaaagaaatgaccagagcatcacatacaagcacgtgtatacacaaaggcgccgcctgaacagttcaagcaaccatagccgtcgaagcaaagaatgcaaagaaattaagaaaaagaaagcccagtgtatgttttttcattatctcctgatacaatcttgcctgccatgccaaggcgcgccggcacgatcgaatcaaccagacaaccacgcgaaaactcacaacctttctcaattctcacctgatcagccacggccacggagacggcagcagctcgcccgacgacgcgcgccctgcacgagcgggagacgcgagaggaggcggcgcggcggagaaggcggtggtggtggcaacgggtgcagggcgtgcagccgtgctagtgcagtggcgcgcgcgcgtcggcgataatatagaggagagaacgggaggcgtgcgctgcgcgccagcgcgagcgagcgtgcggatttctcctctctccggggcgtttggtcgctgcgtgagacggttgactgaccggggaacgaacgagagagagagagagagagagagagagcgcaatcaggagcgcgagggcttctagaaatggaccggcagcgcagcgcgcggttcgctcggcgcggccgcccggcgcgacagtggtacaccggtggtggtccggtccgaccggaatcgatcgtcgctggtgtgcctggctggcaggctggcatcagaccggtactggtagtatttgattcaaccattcaaataccgcaacaggatttcgggatactgtgcgtgttttcctgcatgctttttccatggccatagttaactcatagtagtactaagtaattaataacgttagtacctggtacctatcaaaagctactactaccttcgtcccaaaataagtgcagccatgagtttcagcacccaattttgatcgtccgtcttatttaatttttttttataattagcaattttgttgttataagatgataaaacatgaatactactttacttgtgacttatgtttttaatttttttcaaataagatgagtggtcaaagttgggcatggaaaactatagctgcacttattttgggacggagggagtagtactccatttatcccataatataagggatcttgagtttttatttgcactgtttgaccaatcgtcttattaaaaaaatttaaaattattatttatcttttttgacttactttattatctaaagtactttaagcacaacttttcgttttttatatttgcacaaattctttgaataagacgagtggtcaaacagtacaagcaaaaactcaaaatcacttatattatgggacgaagtactagtttttctgtcctaagatataataaattttaaagaaggtccaacgaatattattgatgagcgccgaatttaaaaaaataccatcgacaagagcaagtttcatgaaatactattatacatgtgactttgtcctaaaaatactgtcatcgttatggttgctaaggagggttctgttagcaacccctccgttaagtggtataggatggaaactttatttaacatcacggaataaggtgaatcctaacgataatagcatttctgggataaagtcgtttatacgagagtatttttggaactcgcactcatcaatgacatttcttaaggttggacgtttgtcaagatattttttagattttctctaaattttacttatgaatattgataaatggggtagtagcttgtactactaggttttgttcgtctattacttttcccaactcatctctctcgtttttccgcatgcacgtttttcaaactactaaacggtttattttttttaaaaaatacgaaagttgctttaaaaaatcatattaatctatttataaaaaagataatacttaattaatcatgtgctaatgagtcgctccgttttacgtacgccgaacattaggtcccaactactccctccgtcacacaaaaaatccattcttagcatccgaaggtggaattaatagatagtgagaatgactaaaatatccttaatcattgaaaaaagtaataagagtgataggtaggtaaaagggtattgcaggaataaaacttctcgttttatgtgttgatggtaggtaagatggtagtgttgatgaaaaaatcgaacacaccggcctgggagatctgcttaactccagtgcaggtccaaaggttggtgagatgcgggcgtgccagtcagtttgatcctgcaactgacaaaatatgcaaataatagataaaacagccgatcggctgacaagctgatggagtagttccagccgatagccgataatagccgatgccgataacagcggatagcgatagggtttaaacaatcggctatatgtccaatgtagataatgatataaaggcaatcggctgatgatgatgtaatatagaaatataatctagtagaaaccaatcggctagcattgatatgatagaattagcattaatccgaaggttaaagcatacatcggctggaggtccgatgtcatgaaatccacaagattagattaaacagtgaaacctttgttgtcatcggctaaatccaatttatatgtatgtgcaatccttatgagccgatgcaacgtccagataactcaccggctgaaaccccgataaaaccctaattggcaatcaagaagcaggctagagattatggttctaagcacgacttagtagatcaaacttaactaatgcagcactaagtatgaaaagaaacatgatatctagacaatcaagctattgactgagttttcagggtggtagatgtctaagataatctaatctagcaacacgatttagccgataccggcagaaaccctaaaacgagaagcagccgatagagctaaattgatatgctaaaactagattaacagagacatatgataaataggtaggcaaatatatcatccaaactagagcaatgcaagaggtcgaatgtactgatgcagccttgaacaacgccgacgtaaacgatacaattgcctggccggcggaacattggacttaccccttagccggagatcgaacaccgatgcagccccgtgtcaggtgccaagttccgccggacgataaaataaagtagaaaaggtaaaaggtggcgatgcgctgaattgtattgatcatgaagatagattacatagaccccgggtgtacatatttatacccatgggttgatacaagtccttgttagacaagaaagaaacttttctaaagataaaaggaaaagataaagttcttatagaacactaaacacactttcctaaagataaaaagaaactaacaaactattcctaattaatagataactttccatgccgcattctctttgaactcggtctcttctgtataagcttcctttagtagatcaatttccttaactgaatatagaaagaatccgacaactgacgacttgataactctcatcggctaatctcaggacttcgaaaccgatgtttactctaagccgatgactactctgagcttatgttgttttttagacaaaattcaaattctggaagttgatttttttttttttgcacgaagggagtgcatactacatacgaactcagcctagcagtactacgatgcacttgacaccgtgtcttgctcttgtatctccaccatttccacacgggaaaaaaactactactccagccgtttcaagttataaggctttttatcttggttaaagttaaactttttcaagtttaactatgtttataaaaaaatatagtaatatttataatactaaattagttccatcaaatcaataattgaatatattttcataataaatttgtcttggactgaaaatgttactacttttttttataaacttgatcaaacttaaagcggtttgatattgaccaaagtcaagacgtcttataacctgaaatggatggagtatttcacaaatcttattatttcatactgcttctaaaaaccaacagcagtgcacagctaggcagactggcaattagcatgtgcctcttcggctcatccttcttttttttcccccatagagaagatatgaaactactgaccgctgaataatgtcagtgttcatggattggaaaaataactttccccctagcatgcaagtaggctgattatgccctccctgcaacctg

SEQ ID NO: 17823 - DNA, 4811 bp, Oryza sativa
  unsure (1)..(4811): unsure at all n locations
cgcggcgtggaaccatggagatctccttcgacgcgtgggtcggggtgcagcggcacgggcaggacctcgcggaccgcctcgcgcagggcttctcgggcctcctcctccacgcgcacccgccgcagctccactggtccgcccccgcgctgccggccaagctgatacccttcgagatcgacctccccgtcgtccccttcgtcgtcggagggaggcgggccgggggcgggaggggcgccgccgacctccccgccgcggccgtcgcgtcgttcgtcgagatcggcgggcggctcggccaggcggggtccgagctcggggcgtgcgtcgggggcgccgtgcagcagctggcgcggcagatccttgtcccgttcctggcggagagcgcgcggggccggaagtgggaggcgattccgccgcagcctgctgctgcggcggcggcggcggcgacggtgaatgagggggaggtggctctcgcggtggagagagctgaggataaggggctcgcatcggagagggtcggagacagagggcctctcgaggtagctgctgcagcggccgcggcagccactggaagtgccactgcgactagcgttggtggtgcggaaggtggtttggatgaggaagatgatgggttcggatgcgatattgggactattggtaacttcaagaaggctaaggtacacattaccgatttgctgatcaaatgttgcgtcgtaattaccacttacctgttacacaattctgcaactgtaattggaagcaagttcaatcggatactcagaatgtgcttaggagtgacatttgtataggttctaggtttatttggggtgtaaaactgtgtatcttgtctgaatgctgaggtagtgagattttagagggctttggtgcttggaactcattgatttaatatgcttggaatcttcttttgcatgctcatagaaagattctgtccatatgcttctagaatagccatgcatatagttcaaaaattatttttctaatatcagaatttaagtataagcatacaggatcggtactaaatgtaaaggttcaaattttgtagtggctggtgcatacatttggttaaatctaatgatagctggagtgcagtgtgaattccatttgctgaagtacatattattatgctgaacatgatgcagggaaccataaatatctcagcaacatacgagaccaggcaccatgactttgagacttcagttgttgcacgtggggacctttggaggttggagtcgtcgcgtggtggttcaaattctggcgatgaaaatgctccgcttttccttgttcagctgggacctttattatttgttcgtgactctacacttcttttgcctattcatctgtcaaagcagcaccttctttggtatggctatgatcgcaaggtacttttcttcccagctacccaggtcttgatctgaaatcttacatgccataaactttttgcatcatagtgttttagaatctcaatgatataattatggtgcaaataatgcctatcaacgtgcattggcttgtattttgttgcatacccatactaatagtctaaaacttgtgtgtttattttagaacaaaatgcactccttatgtccagctatctggtcaaaacatagaagatggatggtgatgtcaatgatgtgcctcaatcctgtaacctgtgtaagtatgcatgttccttctttgtctttttctttcctcaattccccctgtttcctagttgctatcaggtatcagttatttttatacttcagtatgatggactggttttgcaaatcatcacttttcatgctacgggcatgcaaatccagtaacaatgtttaacatactttactgttacattttgtcacgtgtattcgtgctatcaaatgatacatgtacttatcgtgttctttgtagaaagtttcctatattgatgattactttctgatgcaattggctgtgcagtgacttgatttggactcggatgtagaatcttgtataacaagaatatcaaacctactcataactttttgcaacagtctcatttctaccctcattgttaacttggctatttgtttcagtctttcatggatgtgcagttcccaaatggacagctaacatacgttgctggagaagggataacagcaagtggatttttcccattctttggtggtttgcttcaagctcatggaaaatgtcctggggaaacaagattaagcttctccttcaaggttagtgtctgcataataagccaactgtagctccacttcatccttccaagacctgttcctaattatttcacctgccatgcttatttcctgttgctttgcttttgaagagcaaacaaggcacaaggttcacccctatgtttcaatggcctgacaattctctttcatttggagttgcacaagccttagcgtggaaaagatctggccttatggtgaggcccagcattcaagtcaggtagttagatataaacacttctgcaactcanagccacgttagtcaggcccagcacaaggttactcgactatatttttntgggtcccacatttattttccacttctgatttccttgatggaactacatgcatcagtgtttgccccacatttggaggaagcgatcctgggatacgggcagagtttgtccattcattgaaggaggaactcaatgtaatgtgtggtttctcttgtgccagacatccctcggccttcacagctgtttctgtaagctctcagatcatgttacgcttctgtttataatcaagcacacgctttactttactgctaactgatgtccttgtgtgttgctatgcatccgcagctcgggcgatccaagtggaatggacaagtcggcagttcaggactagtaatcaccttggaaacaccgctggacaacttggctagaccatctttatctgttcaattgaatggaggttttgagttatgacgtctattcctgtaagctgtacatatcgctgtatatattgcacggtgtccatactttcatgtttctggagagagctgccaacctataaattgtattatgtggacgttggttgaatctccttttagtgccccttattataggttttagcccagcaccaaagtcgcaattcaataggtaaggaagtaagtagctggagctgttgcaggtgcgaatatgttgcgtccattttgtcgtcatcgcttgtaagtagaatgtatgtattgctgtagcacaccataatatgggttcctgttgccattgttggtcaatggtctggtcgacattgtagccctcgttgtcacactgttttctgcgagggaaatgattttgtacttttgtcctctggagtttgaactgtacttttgtcaagttacccttatgtaaccaaaatgcccttgacaaatgcttacatagtgtttgtttgactctttagcgcgctgattttacttatatgcaataaactaacaattgcaagtatcacatttttcaaagaaagttatgattcgggaaaaaaaaatgcttgattaatactgttggtctaaaaaataatccaccatatttgtgagttctaaaatcctcttgcaaatttaatactctagttctttctccgtggaacaaggagtttacataggaaattcgtaggattgaaatccgaatttttcatatcaatctcttaggtttggaagattaggctagaaaatcattaaaggaatccttcctttcgttcactttttagaggatttcaatcataaacttattaacctcatagtttcattatctttgagaagtccaatgtaccatctttctttatctctcctctgaacttataaacctcttaagaattttctatggagtatccaaacggcttatttgacaagttcttgtattttccattcctgtaacttgcctattatatggtacacccacatttcaaaaaaaaaaaactgattttgggacagaggatgtatgcaagttgtagatatctaaactactcccttcgttaaaaaaacaaaactagatggaaatacaacagtaccaaatacaacaaatttggacggtcaactgtttatattcgttgtactagattgtgttacatccccacattgggtttttttggacggagcgagaatgttaggccttgtttagttggggaaattttttgggtttggttgtcacatcggatatacagacacacatttaaagtattaaacgtagtctaataacaaaccaaattacagattccgccaaaaaactgcgagacgaatttattaagcctaatccgtcattagcaaatgtttactgtagcacaacattatcaaatcatggcgcaattaggcttaaaagattcatctcgcaatttacacaaactgtttaattggtttttttcttgtacacatttaatactccatacatgtgtccaaacattcgatgtgatgggtgaaaagtttttgttttgggaactaaacaaggccttagggcctgcttagtttgcaaaaaaaaaaaaaaaattggttgtcacatcagatgtttgacaggatgtcagaaggggtttttggacacgaatgaaaaaactaatttcataactcgcctggaaaccgcgagacgaatcttttgagcctaattaatccgtcattagcacatgtggatacccggccgctacacgctacgccggtcccactcacgaccgtactcgcatcggccaccggacgcgccatggacgtgagggtcgcgccgtcctggctaccacccgccggccgttgaggccacaaccgaatgggcgcgccaccgcgcctgcaccaggccgggcgcactcccctgcgtccgcgccatc

SEQ ID NO: 17824 - DNA, 9553 bp, Oryza sativa
catcagatgtctgacaggatgtcagaggggtttttggacacgaatgaaaaaactaatttcataactcgcctggaaaccgcgagacgaatcttttgagcctaattaatccgtcattagcacatgtggattactgtagcacttatggctaatcgtgtagtactaattaggcttaaaagattcgtctcgcgatttcctgcataactgtgcaattattttttaaatctatatttaatgctctatgcatgtgtccaaagattcaatgtgatgtttttgagaaaaaaatttgggaaactaaactaggccttagtattccttttcatttggaacagtggcaactaccaagttgtccttctagtcaaaacggtttaattgtgttgttttgtgaaacttcaagactataatatctggttgtatatcaagttatcaaccaatgtggaccttgacgtttagtttccttaaactggatgtttatttactgcaaaagaaatcatttacatcagccttacaacgtagaccctgtttagttccccaaaaactttttaaaaaatatcacatcgaatctttggacgcatgtatggagcattaaaccgtttgcactgtttgcatgtaaatcgcgagacgaatcttttgagactaattagtccataattagccataagtgctacagtaacccacatgtgctaatgatggtttaattaggcttaaaagatttgtctcgcggtttccagacgagttatgatattagtttttttatttgtgtcggaaaaccccttccaacattcggttaaacgtcctatctgacacccaaaaattttcttatcaacaactgggtgtgtttagttcacgcaaaaattaaaaatttggttgaaattagaacgatgcgatgaaacagttgaaagtttatgtgtgtaggaaagttttgatgtgatggaaaagttgaaagtttggaaataaataaggcctaacggcccgtagcaaaacaaggcagcacatgcagcaaagtatgcagctggccgaaacatcacaagagaagattacgtgtatggaacagaacaccatttccctcaacaacaaaaaagaaaaagaaaaacaggagtgcaccaaaacacctgaaagaatgcaactgacatgacaggggaacaaaacaacgaccctcaaccctgaacctgaaccccggtgtttttccttttttttttttttggcgatgaagtgagtgcaccatgattgcattgcgcagtgcacaaacggcatattatttccagccagttcatccacagattgtgccggatccatcttcatttgaaaaaggaccattttatgctctaattcgatctaaagtgaaaaggttaattgcaagcagaggaatcaagaaacggcaacagagttctcctacaatggtgtccatgtcagaaagtccagaaccagaagaagctagtgcccaacaccaggagtcggcactggtcgcattaaccgctcggctctgccgccgctcgccgagaatcccctcggcctcggcggcggcggcggcgccagacggctaccctgagctccaagccgccctcgaagtgcatcacctcatcaccgcctcgctcctccgccgccagcataagcttccgcccttcgcaccgcgagcagcggagcaggagcacgacgaggaacgcggcgaggcacgcctccgcgaacctagtgacaccgtagccgcccatggtttggatggtcgagctgcttgatgctactctgctcagtgagtgacagagtgagcgagtgagtgaagctgcttgctcgagttagctaacgaagacgagagggtttctattgctctatttatagcgatcggcaagacgattgattcctcgtggccggcttagagctcttcatgcaaactacagacaagaacagcatagtggaaatgtatacgtgcgacggcataaatacttgattactcagtgatttagtcatagattgttctcaagaaaccggctgactaatccgttgtttagacaagaaaccggggctgtttttagctttacagtacctgcttaatttgttatgtcaagcgtctcgagaaaagaacatttggcagcataaagcatgtttcactgcaaatttcgtttcttctatcttcttattccatctccttccgcaaccgtcggccgatgcggtggcgatggcgcggacgcaggggagtgcgcgcggcctggtgcaggcgcggtggcgcggccatgcggttgtggcctcaacggccggcgggtggtagccaggacggcgcgaccctcgcggccatggcgcggccggtggccgatgcgagtacggtcgtggctggggccggcgtcgtgcgtagcggctggtggtgtaactccatcaaccggcgttcaccggcgactcccagtcggcagcgacggaatccaacaaaaacaacaaaaacggaatcgggaggatgcgaggaattctttttcgcaattcaatgtccaagatgcaaaaggattcaagagatttctctaccttcttctttttcggtctccgttagaacatcgtgctgataacgtattatgtaactcctttgctacatccgtagtctagaggggttgcataatgtaaagtgaagatacaagatataagggtgtggcttattctcatttattcttctagcaccaaatgtacaatatgagcatccatctccttcttatacagccttccttcatatatggaaggtttggaatggacccaattagtgtatatgggctgggtcttcataggcccaagcccataggtttcctaatagttttgtgaaacttcaagacaataatgatccctccgtttctaaatgtttgacaccgttgactttttagtatatgtttgatcgttcgtcttattcaaaaaaaattgtgaaatatataaaactatatgtatacataaaagtatatttaacaatgattcaaatgataggaaaatcattaataattacttattttttttaataagatgaatggttaaacatgtttaaaaaatttaacggcgtcaaatatttagaaacggagaggtagctggttatatatcaaccaatgtggaccttgacgtttagtttccttaaactggatgtttatttactgcaaaagaaatcatttgcatcagcattacaatgtagcaaaacaaggctttcatttgccgaaacatcacaagagaagattacgtgtatggaacagaacaccatttccctcaccaacaaaaaagaaaaagaaaaacaggagtgcaccaaaacacctgaaagaatgcaactgacatgacaggggaacaaaacaacgaccctgaacctgaaccccggtgtttttcctttttattttggcgatgaagtgagtgcactacggttgcattgcgcagtgcacaaactgcatattatttccagccagttcatccacagattgtgcccgatccatcttcatttttttgaacgaatagatccatcttcatttgaaaaaggatcattttatgctctaattcgatctaaagtgaaacaagcagaggaatcaagaaacggcaccagagtcctcctgcaatgctgtccatgtcagaaagtccagaaccagaagaagcatatatagcctgttcactttgatgtcattttcaagcttatcaaattttagtaaaattgctaaaaaagtggctatatttagtttgctgctaaatttttgtaactatataagaaatcatgccaaaattttagcttgccaaaatatggtaaggttttttttttgacatcaaagtgaacaggcttttagtgcccaacaccaggactcggcactgatcgcattaaccgctcggttctgccgccgctcgccgagaatccccgcggcctcggcggaggcaacactgccacgccgctgccaccgccgcggcggcggcgccagacggctaccctgagctccaagccgccctcgaagtgcataacctcatcaccgcctcgctcctccgccgccagcataagcttacgcccttcgcaccacgagcagcggagcaggagcacgacgaggctcgcggcgaggcacgccgccacgaacctagtgacaccgtagccgcccatggttaggatcgagggtgcaagcgactacccgcgaaaacccacttatagacttatctaaactacgaaatcgtttattttgatctataagtgggtttgcgggtgacccacttgcacccctagttaggatggtcgagctgcttgctgctactctgctcggtgagtgagtgagagaagctgcttgctcgagttagctgacactgctctattgactatttatagcgatcggcaagatgattgattcctcgtgatcggcttagagctcttcatgcaaactgccggcttgaaaagcgtatctttttttctgaaatagcagtacaggttttgttccgttgttctctttgaaaggactagcagaagcagaatgtctatattgtatacaagagcggcatagtggaaatgtatacgtgtgacggcataaatacttgatttcccagtgatttagttatagattgttctcaagaacatgtcaaccagctgactaatccgttgtttagacaagaaaccggggctgtttttagctttacagtacctgcttaatttgttatgtcaagcgtctcgagaaaagaacatttggcagcataaagcatgtttcactgcaaatttcaaacctccttgatgaagttgaacgaatcataaattaagtattctactggcttctcctaatcgagaggctttatatagtatattaaattgtataaaaatcgtagcatggcgcgtcatcatcctggccataggggcttcttgacctatcagaaattcagaattaactgtttcagcatccgaatgtcggcctggtagtggttagccgctggtttagagtctgaaaacgaaaagaatcaatggcggaaacggtcggtcttcagatgggggagctttggacgaacggctaagagccaaagggaggctaaatctgactcgagaacgcattgcagccggccaggatctcaacatctggtgaaagctgcgtcgcggaaagtttatgtttctttctgaaccatttctttctcccatcttctcgcgtcgtttcttcatgcagccaatcaggttagcttgtcaaaattggcatattcgtcgcttcaccggctaagaaaaactactacctataagagtatatcacgattgaaaaaaaaaactgccctttcttttaactgaagaatgtctatgaacatgcaaatattcagagttatcatggccgaccatgatagttttgcaaaaggggacggcaaaaaactactagcacacagaatgtttgcagagaggcctttctgtgttgtaggttaggtctttaaataattccgtaaactacaaggatgatgacataaactgctctgcggagaatatgcttaggagataaacacactcagttatactcgatcaagatcccctgctcgctgctttctgaaagcataactccaaactgaaatagagctctacgtagcaactttgtcagtggagaatgtagcccatcatttcaagtactggacagcaaatatgatactgaacagcagcatgattcttcgggtttctttctttgattagcgagacccaaaccacgtccattatccacaaaaccaagtgctccatcggtttgactactactatttccaatttttaatagatgataccattgattttgaaaatatgtttgatcattcatctaaaaataattacataaatattatttattttattgtgacttacttatcattaagtgtaatttaaaagtaataacttacattctttttatatttatacaaaatattttataagacgaatgataaaatgtatatatacaaaatatcttcgtgaatctcaagatatataggttaggatgtatatatgtgtgttataggtgagtgtaacgcatgtttatatgatctcctcctccgttccaaaaaaaaaaacttaatcctagatttgaacctgaacacccaagtttggttttttttttatggagagagtaagcgcttaaaaaaaaaaggaagtatacatcccacggacaccgcagtggctccaatgctccatcaacgccgtccatccgcaacagtcggctcatcccagccaccggagagctgaacggcggagaagacgaccaacccagccgtacgccgtcgtcgtcgtccttgtcaccgtcacccccagcttgcatccgcccactgtcaccgtgtcagcgtcgcgcgcgtcgctgccagctcgtgggcgaaaaggcctcgtgccgcacagcacagcgcgcgattggacgtacggtttcgacgagcaaagtagacgcgcgcggcgacggcggagaggagcggagctccctcgcgcgacgtggcgcagcgcgtggaggagaggagtcgcccgcgttttcactcctccgcctttgtagcgttcgcggggatggggacagaaacgaaggacgatacggatcccatcccatgccgcaatcgccgtcgccttcgatcttctcagaggaaaggaaggaggaaagaaggagacgatctccctgcgtgattggatccaaccaaaaacataagacataatatacgtcctaggttgtgattggatctagtgtgctcgcgtgttcttgttctgattagggggcgtgatgtgactacgaatttgattgagttttgattattattaaatttttttcattttctttctttagatgagtacatcaggatccgagagcgattcggtggccgcaaagcgatccatgaagcccaagtgtacgtgcccattcttgcccctgtctctttaattgttctctgattttcttttgtttggtttggttacatgtctaagatgaaatgtcgcaatgtgtttggaaattgatgagagtttcagttcagggttctttctttgtttcttttttctttctcctgcagattctaagttcacgcagcaggagcttccggcatggaaaccactatatactcctggaattgtatttactcccaatctctacattctgttcttaatttcttcctgcgctatcaaattatttttatcccaaaaatggagtgctagattttagcaatctctgaataatgtaacctggctccatgaataggtcatcggggccttctcgctcatcggcatcatcttcataccgatagggctcgtttcaattgcagcatcacaggaggtaattgcacagatatgcaacatgtattcttgaattctgattatttgactattccggcactacgtgaaatacatttctgcttatatttattaactagctaaatgtctgtactttgctacggttaaatgaaaatgtattaatgtggtgtccatctttttctatagagaatattcatcttaatctcaatttttatgtatctatctatttagatttgattttttaataatattaagaagtttaagggataacttaataaaatttacaatggaagtaggtggggtggctgattcacggccaccaccattaacttcttttaatggtaatttttatcattcttaagaaaatactggcaagtactttttcaaagacaatagaatttctcttcttttaaagaagtatagaagtatagatagtctggcttgcaacggtgggttaaatttgtatttaaactcatttcttttaatacagtgacgttgcaaagttcttacgcgtttgtcaaaaagaataatctggcttgccatgcaggttgttgaattggtggataaatatgatggggagtgtgtgacggctaacgacaaggtcgggttcattcaggacaccaagactgacaaagcgtgcaccagaacgattactgtaagtttatgcccgttcgtttccttgtttgacagttgcaacttccttgtttttcattaacttacatcttaatactaaacgtgtgttttttatagtagaagtttctttagaaaatcaataaatatatatttcaagtttataatcatttaatttcaattaactatgcattaatggcttgcctcgttttacgtcaagagaaaaactaacagctactatggtggtgtttggatccagggacttaactttagtctatgtatttagacactaatttagagtattaaatatagactacttacaaaactaattacataaatgaaagctaatttgcgagataaatttttttaagcctaattaatccataattagataatgtttactgtagcatcacataggctaatcatggattaattaggcttaatagattcatctcgcgaattagtccaagattatggatgagttttattaatagtctacgtttaatatttataattagtgtccaaacatccgatgtgatagggacttaaagttttagtcccatctaaacaggtctatgttcactagaattgagccttagatgacacaactacacaacatggttgcccttagctcttaccagatttatagtatccagtaaataatgatttttctttactcatttttcaggtgccaaaacctatgaaaggccccatacaagtttactaccagctggaaaacttctaccaaaaccatcggcggtatatatacgctagacctggatgagtgatttcaacttaattaactggccattgtggtaccgaaatgaacactaacgtacaacaatcttaattcttagatatgtcaagagccggagcgataaacagctgcggtccaaggagttctcaagtgtgataaaaacttgtgatcctgaagccatcagtgaaggcggagcccctattgttccgtgtggcctcatagcatggagcctgttcaatgacaccttcacattttctgtcaacaagaagactgtccaagtgaacaagaagaacatagcttggagcagtgacaggaccattaagtttggcagtgatgttttccccgaaaatttccagaagggtgggctcataggtggtggtcagctaaatgagaaattaccagtaagtgcagtcaaatcaatcatctttatcacactagactgctcttttcgtgctaacgcgaatattagggaataacataatatcgaataattagaaggagtgaggcttcgaactcaggtcgcctagcccaccaccttattgagctagccggaaaacccctaggcgtttctcgtgctttcttttttcttgaactgaattgtcctccatattcagttgagcaagctttctctgcagttaaataggtggctctccattgttcgctcttcatcttatcggtcatagctaaaatttaaattttcaaacttaattttaaagtttattaaaaattttttatcgtagtttattttctatattgattttttaagtcgctaaacacacataaggaaaagttttgccctataaattatatttttatcgttaataagcattatggcctataatcggctgctggaagtaaatttagttacagctttatcacactagactggtcattttcatcattctttttttttctgaattctccttcatgtttcagttgagtgagcaagaggatctcattgtctggatgagaacagctgc

SEQ ID NO: 17825 - DNA, 5939 bp, Oryza sativa
attcctgcagccctttgcctccctctatttttgtgggccgaattcctttccctcggcccatccctcctctcagcccgtttcccctccccttcgcacgtgctgagcacgcgcgtcgtgcccgagccaagagagagcaccgccctctctctctctcgccctctctgcttcctctctccccggcgccgattcccgccgccgccttttgaacccgccaccgcctttagttcccgcgcacgcgccggtcgtggccgaccgcccggtcgccgccgcagtcagcgcctgcgtcgtgctaccgctcggccccgctgcctgccgcgagctctgcagcgcgtgcccaagccgctccacccgcgtccatccaaatcctggaggcagagcactccctctcccacctccttctcccaaaccggcatggtaaagcccccctttccaccgtcctctcttctctttttccctcccaagcaacgacaccatgcctccactccttggccgctagtgctcggaggcagagacgcagacgccagcgccagctcgccgcccccaccttgaccgcgccagcccgcgctaatcctcccgctcccgcaatttgattctcgccgtccgatccaccgccttcaccgcgcccttgcatccacgccatcgctgtgttcgcaccgcccacgaactgcctttgttgctcgtcagccaagcgccaaccagctcgcccatgcctcccaaaccgacctcgctccactataaaaacccgagcccctcccatctccctcgttgtctcgcctcctctccccaccacaccattgccgccttgaccgccgttgtcgtcgtcgcgcgtgccgtgggagccggcgagtgagaggagccaaagaggagctccgggccgccccatcttcgcactccctctcatcttccctgacgcactcgccccgacgccgcgccgcctcggtgtcatccgccgtgcgccgcctctcggtcgcgtgccgccatcggccttccatccctttccatcctcaaatcgccgccgataccgtttccgcacgccgatgagctccttgcccaaattcttgccatttgcatcatcttggataagccccgagccgttcggttgctcgctcgtccccctaaacatgccgccccgccgttgctctacttcgccgccgccgccgcgcccgcctgtgcaccgccgtgggccccctcgccaatccctcgcgccaccaccgtccttgagctccctaggacctccccaaaccattccctagcgtcgtcgccgcccggcacggcctcgccgccattgccgcacgctcccggagaccgcctctcgtcgccggacctccacggcgcctccccatcccatccgacgccacaaacgagttccctgagtcctagagatgctcccacccctttgagtcaaaccctcatcgtctcatcgtgttgtccccttttgctcgccgccggtggccgccgtcgaaatccgccaccgacgggctcctcccggtgaatccgagctgacgaatcgctccctctcgcccctaccatcggtccggtgtgctccccttgagctgtagtcgctgcgccatgtcccggtgaagccgccgccgccagccgttcgtcctccggccggccttcttcctcctctcgccgcccacgtggccgccacataggcgccacgtcggcttgacccggtcaagccggtcagccatcccctcctccccgtgcgcgtggtccactgtgagccgagcggctgcacgtgggcccgccgctctcccgtccacccggtgcccccccgcatgagccgcatccaccgatccgctccgccgctctcgcgtgcacctcgctcacggtgagccgagccgccgacaagcgggtcccactcaggaccgcgcgaggtgagcccggtccacccggctccccttccccccctctctccccgcgcccctctcttgggccgcctccccgtagcccatgccagcccaataagctcggccgagccgcgcagatcctctcgggccacgccaagccgctcgggaaagtctgatttctctccctcgtccattttctttccaaaaagggtttaataaattattaaatcctttctcctttgattagaaaatccttagaccttagaaaatccatatcttcccaaccgctcatccgattgacgccgttctacttccagtaattccctaaaattgagatctatttaatggcactattaattgtgtaaataggatctttcttttggtcttttgtttaggtttttgattatttgcgtatagttgcggtaaccgagatattagtcaatcgtggttttctcgaagattcgtgaagctccgtgaagaccttgagcaaggcaagtcaccctttgatcaattgcccctataactggaaaatcattattattttgtttgcaacttgcattagtagaatcacacttaacttgcttggcctcggtttgcacgccaaaccgacggacctacccagtagtcgcactaattcctgtaggatgtactaccctgattccttgtcgctccacccttgtggtacttcggtatccgtgctctttgagcgtgtataccaattatcccacatacaccgttgattgtcgaaaattgggaaatgggtttgagaagccttgaaaacccgacctgaggtgtcggtgtgtttaaaaataaaatgaattgtgaaaactcgcgatgcgggagccgtgcctacgtggcgctgtcccgtattcgcatataagggccgattcctgtgggaaactcatcgagcataatcaaagtacaaccacaaggtggaatgggacaccctggctaagtaactagttggttcagggaaacctcgcatgccaatagttgggaacgccggggcggggtcggacaaaccgggttcctggtaaggcaaggacgagaagcttgcttacttaccgatcaaggtggttggagttgatttgtgaatgcctaaaatggcttatgtttatgtgaggatttgatccttctatgtggcatgaggtaaccctgggtcggcttgggaaaggctttgtcgcgcgcctctgacaccggccagtgtctggagtaagttcgtgtcttgtgggtaaagtgtacccctctgcagaggttaactaactgttcgaacagtcgtgcccacggtcatgggcggatgtgaggtagttcccgttgcgtagatttgtttaccagtgctttgtgaaaagttgttgtggtgtgggaatcgtaaccagaatcagcctatgtggcagatggatgacctgagtggtcagaaacgaatctgtgtgattcgggatatctgcgggcatcatagactaggcttcccgaggggaagcggattgctttgctgctgggcagctggactctgggagtccgagaaaatgaaaaaggctctgggagccgcctaatcaagtgaaatggctctgggagccgataagtaatgatctgacccgggaggtcggtacattaccattcgagttgttgaaaagcatctcttaaagtcgaatcaagacgcaagtctcttttcgacccaaacttaaaaaaaaaggaggtaaatcacttagtgattccaaaatgctttcaaacaaaagatttgcaaaacaaccttacctctcttccaagcttgcattaaacacctaaattcccgtgacttgctgagtacgaaagtactcacccttgctctatataaatatatatagttcctctgccttgaagtgaagatgaagtgaagtgaagattagggtttcgtcctggttcccagccgtcgcctgtggtgttgggtgttagttcgttggttccgctgccgctgttgctgttggtgtttcctcgtccgcgtcgtcggttgcattctcgggccgttctaagctgcaacctaagttaaggtaaataagtcctctatttattttaaggattgcaatgattcatatttgtcaccatgggtaccagcactatgtcctgggactggtactgagatcacggtttcgtaggaagcggttcacgtcgtttttcctacgacacgctcctgtcaggtgccgttgtacggcggtgccggattggggtgtgacaagaacactttcggttcaattggatcgataaatttctaagaaagataataatgcccctaaaaccacatgcttcaaactgcatgatgctatagtaaaaatttagaaattatacaactctaaatttaccatcacattatattccatcttagctctagtttcagctcaaaatattttgaccatagaggcatccttgtttttttgaaaaatttctctctccaattgagtcgaaagtgtcatccaacaaattatcaatttttaagtatcttttagccgtgacatgtttttataatgtctactagtaaattgtacattttttaagtgtctgtagcaaattttgccataaaattatgtattgtatcgggacgaaagacatagagagagtagtgtgttagcaagctctgttgctgtctgatttactatgtttttcattttgctttttctgtcacccttagtgattatgtataatttctctggtacttaaaataaaaccagcaacgtttggcttaggtttaaaaatacttgtaaatcaattctaaaaccttaatttagctatgtcttatatgtcaacgagaagctagccaagccaggcaaagcatgtctctctcttttattttttggaatttccatggtagaatttattaagaatccctaatattgaaatatgaatagccgcaagtcccagcgtgtaaaaacagcttagttaggcagcctgaaccagaagaattagtggtgccccgacttaaaacgacgtagaccgccaagaaacgaaccaaccggcaaccgccgccgccgccgccttcgattcgattccgatcgagttggagaaggccgccgctgcccaatggctccgctaccctcgccaccgctgctggccgaatcgctcgcgacgctgcgcacagcctcgccgtcgccgcccatcccctgctctcctcgccgcacccggccgttggtttcagctaggttcgcaagaacggccggccgccggagccggagcacggggggaaggagagaccttaggagctgtgcctatgcggcggaagctgagtacggcagcgcggaggatgaggtcgccgacgacttctactccgttcttggcgtcgtgagtgttctggaacattctgttgaacaattcctttgcaataatttcggtttacagtttattaggttagtagggaagaactgtgcattttagactggaatcattagagatcaatttcttctctgtaaaaaaaaaaatcctacttttggtgagggaggaaagatgcttctttttttcagagtggactcagacaattgttctgaacttctgatgagtgatgagtgatactctgatagtggttttcctttgagacgacggatttgctgctaataatgacccctgatttttgcatctccagatgccagatgcaacccctgaggaaatcaagaaagcatactacagttgcatgaaagcgtgccatcccgacctcagtggggacaaccccgaagtaacaaacttctgcatgttcatcaacgaggtttacacggtaaaacccttcaatgaaaccttgggtccttgtgattgcatatggcaattgtcttggaagatgtgttttgcattgaattcttttttgttcaaaacgctaacatgaggtgttgaagagcaggtgctgagtgatccggtgcagcgtgcagtgtatgatgaaatccatgggtatacagcaaccgcgaccaaccctttcttcgatgacagtgcacccaaggatcaggtgttcgttgatgagtttacctgcataggtactgacattttttggtatgaatagagctataaaagatgctatttggttcttcataaagagatttgatatatttcaccttgttgatgtggggctgcaggaat

SEQ ID NO: 17826 - DNA, 2005 bp, Oryza sativa
  unsure (1)..(2005): unsure at all n locations
atgctctgaaacccaacccagcataatactaggactgtttatctgttcataacagattactgaatgtgttattcatgtgtgttatatttccatgtccagcccagtcaactgtattcactggacttctgctgcacagctttctctccttgagaatgaaatgcggagaatagagcgggtgaatgtaagtaatccttctttcagttatttagatgtacggtatatttttgtggtcatataaatctccagttctttggtttgattattaggagtttaggaccttatggttaacttctataacatagatgtaatcacaaaaactcctagttaaaataaacggtgcacaagaaagtttcttatatccctgttcctttctttctgttagcatttttctggaactcaagtgatattttacaggtgatattatcttgttttctcctaatagcctagtagtacactaaagggaatttcaattttgaacaggttgggctgatgagtgctgggatgggagtttcagttgatgtattccgattggtaaatttgtatgtctttattatgtaaatttggcatgtactatctaaatttctctgtttgcatatcctcaagattctttcttccatgtctatgttaaggctaatagagtatagataaagcatacttttgtttaagcatacagattatattatgcataatacttctctatgttgttaattttacttgttcttaagatattttctatttaacaggctagcgtgcgttgggaaaagagacagtcaaaagttttggtatggttccttcccccttcgtcatctttgtgtttctcatagagttagatgtttttaaggatttcgttatcatttacctatttgtatctttgcaaatgggtcattgttttgtaaactaaacattttatgtaaacctttattttgttacaggaaaaaattaggacacggatgacaaacaaaaagtattcagatataagtagttcttggactgatatctggggatccccaactcgataccaaggaaatggtaagctaaaacaaataacacagtttgttagaaataccttgcatggtaaccatgcagaccagcatgtattgtgtaaatataattgttgttaccaaaaatataattattgctcattcttgtatttctgaatccgattgagatttgctgatgatatcagaagaagaaggaacagagagagcgaagagagcagctgctgctgctaggagatggcgagaatactcgagaaaaggcgcagacaggccaccggagtacaaacttccagaggcagcgggcaataaagagtaatagcagaacaaagaaatatttctatcctgcttacgttatctgatagcatttcgtcacctgtacatatagccttattgtttgaagagagctgacatgtagattgctctctcccaattcctcatttttcatttgtaatatatagctgataacaataacctgtagaatacaaacgtcaatagttaaacattcggaatgtaaaagatgaatatgtgcacattctccttcaacaatggtatacatcctgaagatccatcttttcttgtgtgtgtttgtgcagatgaattccggggcaaatttcctttggcagtagtctggtaacccccaggcatcgatgatgaactgcaacatctgccaaaggacaacttgcccagcaatgcagctgcacatctcatggtctcaacctatttctatccgtgtgccacatttagtttcatgtgtagagcgcacagttcactgatcattgtgcagtgatatttatactcgctcctgcatggtgaaaggnnnnnnnnnnnnnnnnnnnnnnnnggcctttctctgctcctcctgcaaaggcacacggaggctgataggatatactgtaggacaatgcctgctctctagattgtgcccacttacaggaacaaagtctgaaatggagagatcattgtagtgcatatatctccaatctttttaggtcatggggctacttccc

SEQ ID NO: 17827 - DNA, 1915 bp, Oryza sativa
agaaaacaggattagcatattatcatcaattgatcagcaacaaatgttatatgccatataacatacagcagctgttcttttagtactaaactgagtattgctaaagaatacccttttacaaagtacttttgtttctatttggcatatgtttattagcattacctttcgtctagtagtgcttgaagccttccaacaaagtaaactcgacttaggctccaatctcctgcaaatagatcaataatccaaaatcatacccaagcttcttatataatgtggatgaatcctatttgatagctctattcatgtggaaaatttctaggataaaataagactttgcagctctaaaaatttttcataaactactgaatatgtgcagtgctgtatcaagtgcttgttttagtgcaatattatttttttttaatttgggtatcatctgttcccctccagagtatctgctgaaaaaagtactcctctagtacaagagagtagcatagaactacttacaaattctcttgctctagcttctctgcaatcgacatagctttttgtctagaccaacctccttgttgtgaacaagtttctgccttgttaatgacatgagcaagagataccttgccccttactatgctgttttgtcggccatgctcattattcacaacttctcgtccttgaagaactatgttttcttttctgacaccggcgctgttatttggttcactatgccagtccacttgagaaggtcctacttctataatttcaccttcagtcaatatatgtggatctgattgcacccatcgtgtctgatttgaattagcaccatggaccacgttgtctttttgaagtctcctaattaagttttcacctctggaagaagcggaactatgtctagtgaaagacctccttaatgccacattggaagtgctatcctcaggatacggtgaaatagctggaacatgacctgcccttgcatcatcctttggttcgtaccggatttcaagtgttatagcagaagcaaggacagactcaaatgcatgtagaacttgttcccttgacctctcagctttggatttattcacacgagagctgaacattagttgcacagttggtgctggaggaaaagaactaagtgttagaagcaagatatattggaaaatggaaacagtgtagctattatttcgccaacacaatattcttaaaacaaaacatattacacgttttcaaggaatctggcatgcttagttttttggggggctatgtgtgtcttaataacatcaacaaagttttaaacttgctctcatcaattctagcatgaaaatttagtcaccatgtggagatgcatattattttatttacatgagatattttatggtccttgggaggtatgcggtattgagaaatgagaggtagatatatcttatagtatagaaaacatgtactattacatggcctaggcaccaagattgacgcatattacttgaacaaagcgatttatggtgtttggagggtactagaggtatcaggcacctttacttcaataaatttcaacggttgagatgtttacaggcacacatagcaagccattctatcttattgcttgattacttatgaaacagcatatttatccatcgcattacttaaaacaataataggtcatccttggatgtattctgcaatgaaatttagacatgatataactagtaatatacagagaatgagcaagaaggaatatcttgcctgtgcctaggctgacagaaatcagtcgtgcttctttagccagcatctttctcactgaatctgatcggatatgctctagtacagcctgccaaatcatctcattgtcactttttctgtatctagataaattcactctagtagcacgcgctaataatacatggttgtctggtgtatgttcacc

SEQ ID NO: 17828 - DNA, 12707 bp, Oryza sativa
gcgacattgagattctctgcccaagcaagctcagctgatccaaagtcatctctgcatccctcagtgacccatctgaccgggaagcaataagtttcagggcatctctatcaacatctagtccttcgctagtagaaatccactgtaaagtgttgacaatgtcacactccttcagtttgggaaagaagaacttttggcacctcgacacgattatatgtgggagatcaagattggggctgatgaggataaaaaccacacgccgaggtgcacgttcgatgaccttcgatatgacactccacgtatcaggtggcaatgtgttgcaatcatctactataaacaccctgtgctgagttggtacaggtgaaagcatcacattatcaaggatatccacaatgctgtcaaggtcaatgttaccaacaggcccaatctccactaagctcctactcttgcccagattgtgtgcgatacaagacgcacatgaatcacagggcctcgggtgctcaggagaatggcaattcaacgcctttgcgaacacccgagcgcatgatgtcttgcctgtgccgtgcggcccgtagaacacatacaccaacccaattttcctcttcaggatggcattggagagagcctgcaccaccaagctctgcccaatcatgtccttgaaagtcttgggcgaatacttctgcgtgaggctctggtgccggcctcgatgcgagccccgtgacctctgccccgaccgtgcctctgatgcgaggtcagaatcaagctcactggtctgattcgagaatatcccgagctcccccgagaagctcctggcaatgccaccgatgccattgcgcacgccgtcgacgagcagaggcaacgagtctgagtccgaactggtcgaggtcagcctcgccgtgaccgggaaatgcggatgcgaacgcgagccgtccatgtgaccgcacgagcctgcggaggtggcggcaatggacctccgcgccgccgacgccgacttggggtcggagaggccgcacgagaagctccggccggccatgtcgaggaaggatttgccgcggtggtggatgcgtgaccaattccaggggatgccgcacacattgcgcgagtcctgcgacgcctgcggcctctgcagctccaccccgcactcgtcgtcgtcgtcgtcgtcgcctccgacgacgccgaagaggtacttgttgccgcagacggcctcctgcgagctggagttcaccgagacggcggcggcgccgtccacgccgcgatctagagcgccgccggtggcggacgcgggagcggcgcgccggcccgcgccgcccttgaaccggcgccgcgggccgcgagacggcttgggctgcgggttctccgcgagctggtcgagcagcgtcttgagcgcgccgccggggcgggagctgtcgtcgtggaggtcgtccccgagcccgagcccgaccccctggggctcggcggcgaccctcgacgacgagtccaccgagcggcgggtggacgggtcccgcagcgagcgcgagcgctgcagcgcgagcaggtcccgcatcagcgcggccgacgccgacgcggacgaccccgtcgggctccgcctccgccccgacgacgcgctcccggcgccgagcccgtgcgcgtggtggtgccgcaggtggatgcagttggtcaggtgcgcgtgtccccgcatgtggtgctcgccgctgccgccgccgccgccgccactccccatccccgcggccgctgtcgccgccggcgccggcattgcgggcgatcgatccggactcctcgcctaaatcatcgcgtcgcgtcgcgtcgcgtcgcgtttcgcggcgagcgaggccaagaggagggtggtgggttggggggcgtggcctcgggtggcgtccccgaagtggccgtgctttcgacgtcgcgtcgcgtccgcgaccgcggcgtggggtggggggagtcgtagggttcgagcctgccgtttggccgttggatgcatctgcagatctgcaccctcacgcccgcgtgtgattactgtgccggttcggtaagtttcggggagctgagaatggccagatgatagtcagtttttaacaatataaaaaaactggattttctagtttctatttttattttattttctaaattttataactatatcttctcataatatgtaccaaaagctaaatttttttggaagaagcttctgatcttgagagaagctgcggtagctagaagattcccaaacaggctcgaatatatttgagagcataagattataagaatatggaaaagctgaagtcctaatttctgatttccaattcattttgtgaattctataactaaagatttttaaaatttgggtgaaaatctagattgtttggcttatgccagctgaatattttaggagaaaatgtagttggcagaaactccccaaaatagacaaaagctcttctagacaatttaaatttctgtttagattctaaaaaattatagatgtaaaatcgtaaaaatgaattgaaagtcagcaactagaaaacacaacttctacagatttttagaaactagctatcagctacttcttgtttcttaaaattttgaactccattgaacaagtctgagaccgtctgtgacacgagattattacccttgtgctaaagttgagtggtctaccgctaacagtggcaaaatggcgctaatagagctgcttgtttatgctttcttttcgaggctatgtattgaggctaaaaaaaggaaaggtgctaaactgctgattgcacgttgtgtcgtgctacattttagtttagataggtaagttgttggtttattaaggtgagctaggatgccattcggtgggagaatctctctacgagactcgacacgctgctgattatcttttggttcagagcttttccttttgttgacttcacgttgcctacttggtctatgctttggcaccgtaccacgaacgtgcatatgaatatgtgatactggccgacagcgtcggtaattacttattactgtacctaacaagttaaccggagtaacgtaccagtaggtaatgttaatgtcaaatcatgagaaattatcgtgccaagtacacgacagagtcatcgacccgtatgagagtagtaccgcggtatagccatggtgggtccgtaatctagcagtagctgcggtactctagctgtgggcctgcatgtgttatctgtttttttttttgttcacagtgatacactagtacatccatccaaaatgtagagtaatatttctaacatattacgttgtctcgaaataaagttatttctccgcctatcttctctcaaccaatcacaactattcttcttcatctactttctcttttcaaccaatcacatattttctccaatcattctcatctacagtattttcttaatacacgtgctaaccatttaagttatcgctatcctatggtttggtgattattgcacgaaaccacgtaattatcgtgatatatatagtaattttaaaaattgaaaatatcatgatagccgcactgttttataaattgtgatggtgacagggattggggaggggtgtacagcccacgcggcagtggcgagcactgggcagcacggcccgggctacgagtagactctacggccccttataatcataggaatgaaaaaaacgaaggaatagcaaaaagattctgacaggaatacaagtgtaaaacagaggattataaaacacagcaaaaacatagaaataaccgtttgattgagccgcagaaaaaacactgaaatttgaggagagataaagactcagaggattcttaacatgaggtaaaacctcatgctaaatttcctccaaaacttacatgggaagaggcattccataggaattttatgggattacataggattcattcttttgattcaaatggctatataggaaaaattcctataggaataaaatcctttaaaattactatgaattttctttgaatcaaacgggcctacgagtgaaattgctaggcccagaaaatactccgttcgatctgatcttcctgcattcttcatcagccagatagcactgtagtttgtgcggatgaattcacgcgaattctgagggtttattttcggtgcacaacaccagcaatccagccaaaaattgaaaacagcatatcacaatacaccgggaaacgtttttgaaagagagggctcctacccccaatgggcgcggaaatcgaggcgaatcattgtgttctctcgtccaactgcagctctcggaacagaacgaaaacgaggagaccgaggagaagatgagtgcatcgtagtacactcgcaccactggaactccttcctgtgctcctggcgcagtagcttcagttcgccgcgagtcaaaatctgaaacctctgatgacaccctcaccagtactgcaaactgacatatgggcccccacagaccctcgggcccatatgtcagcgagcagtacggcagaggatctagattgctgatgaagcgtgtgcctcacccgatcttcaggtaaccagtgtgtatcgttacatggtacaaaagtatgctcaagccctctttgtttagatttataagctaacttataagtcgaatagtctaaacctaaacaaacaagtatctttttcgtttggattttttgaagccataagccactctaacactattaagccaaaagctaggttggataagttttttttggcttatgtgaggtagatgtattacttaaccactaaatttagtacattaaatccactggcttataaatcatataagccaataagctgacttaaaagtctaggccaataagtctaagcctaaacaaagagggcctcaagctgccgggcaatattatcttttttgacgctgacttatttattttctttactctgaatgtactccctccgtttcacaatataagtcattctagcatttcccacattcatattgatattaatgaatctagatatatatatttatctagattcattaacattaatatgaatgtggaaaaagttagaatgacttatattgtgaaacggaggaagtagtatattatcttcagtcttacttcaccttgcaccgtccacacagtaaccctgactgaagcacagatcatacagtacatgatacgtgtagtaccatttttactgtatcagggtccaatatggagtagtcctagactctgatgagaagttgacaaaacatgccctggtgctctggtgagaaattgctacaatactctctctttacatgtgggctgcttcacacacagcacggcagcatgtagccggaatactgcctaaccctatgaggacatagacaaagtagcaatctgtcacaaaattgatcagtgaagctataagccagctaaatactgaggtggagaagagaagagaggagagagagaggagaagtgggctgtaaacttacagctggcttggacataagaaccaagaaactctatgagagagataagtgtgccatgtattaattatgaagagctaactatttgttaggaacctaattgggctgtatatgggccaagctagccaagtcaaagcgaggcccaagcaagcagaagggggcagcatacaaaagcagcagcagcagcattgttggaaggcatcgaacagaatagaacccggcacggcggctcagcaacggcggcgacttggttcgggcttgaaccttatcgatctccttcttcctccctacttctgctagtaacttgtatcccctattcaatcccatttccaccacaaagcttgagttgtagtaatacaattgcagctcaaaaccacctcgaccttcattgcttgtactgtatattggttcattgagatttagatattgggttgctaacaatctggtatcagagccgttcggttcactgggattcttgtcatggaggagtttgggaggcagccatgcaagagggagcaggaattaggttgggaaagttttcatccaagcagcgcccaccatctgttcgatgaaatgtcaagcccattggaggtgtttgaggaacacgttcttcttgtcatgagtgaggagaacatcacatgggatgaagcactccatctgttacaagaggaactgaaggatgcccaatgtagatttgatgagaagctagatcgttttttggaggtgttcggcttgatgggagacaagagcaatcaatctgagggagacaaaaggagcaatgaatttaaggaattcagtgcctccatcaaggagctcacccccaccaccgaggctgctgcatttcaatcaccccaagcatcaccttcttcagcgcccaccaagtgttcgatgatttgctttggcctcgacaccatgtccgacctcaacatggcagcagcggttgtgtgcgccaccacttctctagcctccgtggagttagtggctagagggaacgcaacctgtgaaccctacgtcaacacccctggtcatcccaaggagacgcacaccaagtgttcgatggttggctttgaggtcaagggtggcaccgaccacaccaaggtcacatgccataccatgatgggtgtgcctgatggcgttctagtacctgaagcatcattccatgaagcgtccaagtatccaatcctgtagcccatcacagttggatacgctgtgacagattggcgtgctcacccccgccgatcggaagatttatttataagagcaggtacaataacaagctataagccaactataaatatattttaaagagataaaggaagagagagaagaacagcgagctagagatctgtagccaactgcagcacggactccaaaagcaatgcgtgtatgacaggtgggaccaggtattcatagtatagtaagtaactattgtacacatttgctattacattggctatagataatttagagttagtagtgtgctatactattaaacttgctctaaacaggccagatccgacaacggcaatctatcagcagcgattccagaggagaaatcatgaacaacgatggtccctgttatggcgtctgcttgcttcatcatttcgtttaggctaataaatcaaaattttaaatttaatttaaaagtttagatcgcacaccgtactgtttgtttgcaccattactgtagcaccgaatctggacaattgatcggaaaagccaaaattatatgcagtcgttaacttgaagttcctaatataactgctgattcgtactcgtagtactttgttcatcctgagtgtctctctctctgtcgttttggctgatatgtctgtctgcactcagccgcttgtcccactcccaagtcccaaccgcataacattgtgcttcaaccttcagatgtgttctctgcatactagaacaatgtaagatgctcattcgtgctgctggactcgttagttcccatcacaagtcacaaccccagcatgttgcagcagtgcaacatcctgtatatgggtttatatatgtaatgaggtcgtacaagtaacaagtgtacaactctagcgcaagcaagttcagagacaatgctgcacagaaaaagcctaattatagagtaactgcagaactacgaaagtaacttaaacttcatttatgttctgagaaatacagtcctgagtcagcgatcaatgaacgatttacatcatttacaggatctgtttttctattcacataacataaatcttcactcaaccatcacggttcacggatcaaatttgttggctcactcaaaacgtacttgggcagttcatacttggcacctgcagcagagttttaaaggttgttattagtcttgcgtgatatagtggagcaaaacagtataggtggtgaagaaacagcgagaattcccaacgaagatctgctcacctctctcgtcataacaaagcgtcatgtcagaatttgaaacaacaatcccagcactgttcactatggtttgtgcaagaggtaattcagcttcagcagcagccctaagtgcatcccaaatctctgtaaagatacaacgagctaccagttatttaactaaggcgatatttgtcagagcacactgttaaaattaagcaattgtgttcaaattttaagccatgctacagttgtaaaataaactccaatgccaatatgaatgatttctacaaactttcttaaattcgaacataacagggcttgttgtattgccaaaccaaataaagattattcagaagagggcatagataaagatggaccttagcaacttagctgcgaaatatgatttaacagtatacaaacattcaattgattttgtttgacatacataatagataaatgtcatagatggaactatggaagagcgttttcccaatcagccttgaaaaatcagctaaatacctttctggcctccatagtgtggagccgtgtcccagaattcttcacgcatctttgagagttgtgttggtgttattgcctgagtgtgcttccaaggttttggctttttgagcttcttactgttctctgcattaaagaagaaggttcaacattacttattcattctaactcatgtcaaagaaatctaataaaaccttgctaggatataaatgcatatcaagcaggattctagttccaggaactgttctgcaataaggccttgttacaacacgacttatttataaacctacattcatctactgtgaatagatgtatcataattttctgaacaaaaaaagcagattcatctttggctcttcactaacttggcctgtatttaaagtagcaataccaggcaatccaactttcgaaagaagtataaccagtgctaaaaaaaattgaagtttcattagcgagcagacaaatatcccaagtgtgaggctgaaatttcacagatgagtgtgtctttctgtaatgttccacctaataaagtatctataactagataaggtgttagaaattgatcttttcgataagcaagacaagatttagcaattggtgaaggcaaagtgcttaatctgaacaaacttttgattattctacttcgagaataatctgtcactttatttctctcatcatagacaaatgctacttttgcaacatacaaacaaaatagcttttctcctttaagaaaatgatataaccaccaatgctcttggcattcagaatactggtagcgttatctctccactaaccaaatgtgacctccatgacgtaggaatttgcactactcactctacttgtatcagataccatccccacatttcgatacattaattccatgagagcactgtcaatcctgcaacataccattactagcagcagatttgatacactacatcacagtaatgagtaatctacaggtgatactaagtttcatccaagtcaacagttctactgcagctggatacttgcaagacgcttaaatcgacagctcaaagtactatcggattatcagttccggtcacaattcgatcaataaacgagaagactaatcaacaatagaacgaacaacctactcctagctaacaacagctctggaaacaattgatctcggatctcagaatctgagcagaaaacaagaacaaagacagacaaacgaatcgaagcatcaaggaagagagagtaagagtaccatcaactttgggagtggatccagcgcagcccatggcgacgacggccgatcgatcagacgctcatgtgggggggacgcccttccagaagcttccggaagcggagccggatctcgcggcgggagaggcggggtgtagtagtgggagacgaggaagaggacggtggatttaataagggttaataaagtggacgagtaggagtaggagacggcaaagcatcagcagcagcagcaaattcagcggcatacgagcggcaaagccagtggaaaaagagaaaaaaaaaaaagaaggcaactgctgctcaggtgacgtcacctacgcaggtgaggtgtcccgccacgtcacctgccgccgcgggcccacgtatcctcccccgcctagacctgttccacgtcgcgacggggcacagatgtcgctgccgagtgggccccacgccggtccacgcacggggatcgcgcctccctccgcttcccgctcttcgtggtcccggttcagtggaccaacggaggctgacatgtgggccctacatcccagccggtccacgtcggttcacagcaccggctcccccttcccgtcccttcccgtcgtggtgccctgcacgcatcctctccgccatttttccgccgcatctggagctctaaaacccaaaccctagccactgcgccgccgccgtcgccttcgccgccggcccgccgccgccgcttcagccatgaacgcctttcggttcctcggggacatgacccacctcttctcggtcctcgtcctcctgctcaagatctacgccacgaaatcctgctcaggtgagcccgagccgtacagtgggggtagggtttcggccgcttggttgggggtgggggggattctccgctcacggatctgtgtgttggcgcaggggtgtcgaggaagacgcaggagctgtacatgctggtgttcgtggcgaggtacatggacctgttcacggactacatctcgctctacaactcggtgatgaaggtggttttcatcaccagctcggcggcgatcgtgtggtgcatgcggcgccacccacaggtgcggcgcacgtacgacaaggatcaggacaccttccgccatgtggtgctcgtcgccgctgccttcgtgctcgcattgctcttcaacgagcggttcaccttccgcgaggtgatgtggtctgaccttactttgcttgttcaccgcactgttgaattgatgctgcaatgggacgcccgataaagtggttaattctgctgaacctatgtgcattaagaaatatgatatatctgcttaatatgttttcccatgctacatttcgttgctaggaaccgtaattaaaattcgtgtacaaggctgctagtgctgtgcaatgtaaccttaacaaatttatctcagtatgagccaccctagcaatctgagttcacagtttgcactgacttgaacaagactataggcacaatcatcgttttgttcagtgcagtgaagaattgtggataccctattaataaaatcctacttaagtaaggcaatgcagactgccgacagatgtttgttgatctatatgctatttgctgatgttgtattgttgttagacttcaatagtggtcaaatgccagacaatttctcagacctcattctagttgttttcaaagaacactgctacagtaggagactcatctgaaggtagcatatccatagaatgtaacaaaaggttaggtgaataacacctatacctattgaattaatttagaattttagaaacctatgtattatttgctcagtatacatcatcctgcactaatcaggatttcttccctttgggtaaatagaatctaatcccatttttctgtagtttcaattgtatggtacagattatattcttcgaagtggccactttttttttctagagcacacatacttcttcctcttgtttctactggaaccaattagtcagaatgatgcatagtaaagtagcacattagtaaaacacggtcatgttgcatttacatttgttagtatgatacacaaattaacataatttcaccgttcagatctgctgggcattttcgatttacttggaggcagtggcaattctccctcagttagttttgctgcagagaagtagaaatgtggacaacttgactggacaatatgtattcttcctagggtatgagttttaccacacaagctttttaccataacatatttatacatgattcctgtattacaagagaatgaaacatgtttgcttttcatgcttcaacggcttctgttgcagtctccaagtttatgatggaaacatgaaatatatgcatgcattaactatttagtttttgtttggtccttaggcttgagaatattgaatatgcatgtatttttttttctttatggacatatgacatgtcacatgttccttctgtccatttatattgctggtcataaattttggcacatgaaatgcatcccatctattctttttttgacgtaagaaggtagagctggctctaccttatagccatttccttaatagaaatgaggtagtacaaagttttagtgaaggaaggaaacgaagaagaaacggaggggactttacattagttttggtatttacagatttaaggttctatctgcagtagctgcatcccatctattcttagttctctttcgtcgatcttccatttttcctggttagttctaggcttgattaattaagcctacatttttttaatatacattgtgtccagattcggattagggcatgctttaaatagtgaacgatcgacatgcttctaggttcccagttggtctctttcaagtctcacaatacttgttttgcagggcctaccgtgcattttacatcctaaactggatttaccgttacttcactgagggtcaccacagcagatggatccgtaagcgcctgcccctcgtatgcttgtgtttcatatcccatgttctatatatgaaaagaagttctgacgatctgtttcttccagcttggattgctggtttggtccaaacagctctttatgcggatttcttctactactatttcttaaggtaaactggatactgttgtcaaacctcatttgcagactctctgggtactgacaattccatgtcggttgttgcagttggaagaacaatgtg

SEQ ID NO: 17829 - DNA, 651 bp, Oryza sativa
atttgataatagagtacaaataaatagcaatttaatactcgcaaataagtattattacagaggtagatagttcctctcaaagaataacattctacgcagcggaaatataaaacgataacaaactacggaacagctatggcgactccactccacaggcatcttaaccaagaacaagcctaatcctccagatcatcaccttcactgagatactcctcttctggtgaatgaatattgcaagaatgagcatatgacatactcaacaagtcacacagcaaatatgcaagtgcacgggataacaaaggatggcataatatagctcatttgcagaaacagcatttaataaatatttaagagaatagtaaaaacagttgaataattaatcaatattaaataaacaccatacaacatacccatgttgcataggcccaacctcatttgaacaaccaaccccagttgaacaaattaaacctccaaaccaggaattatccattccaaaccaggagtcaaattaattatcacattattaacattaatgagtagtgtgagactaatcacgaaaaacattgctcaactcacccataatcgcgggtacggctattcgaatagtttaaactctgatcagaggtgtaccactgtacgggctgcaggaat

SEQ ID NO: 17830 - DNA, 799 bp, Oryza sativa
ggcagaacatattgtttatcaggagcaagttgaagcagagcagctgtaagccacgtcatcttatcattagagaccctcaactgtttttcagcttcagagagtgttttcaaggcctggcgtagtttttccatgtcatcttttgatactgtaatccatatattaagatgttagattgtgtggaagaagaatgtttaggtaacatgaatgctactaaaaaaggagagatcagcgatccacgtactactagcccagtcaacaatgtattctttctataaaggaaaggcgtaaataaaatatgtactagtatagccagatctataaaaggataacaatacattggtgagaaaaaaatgctagagcatgacttttacaatacatgactcatggatggatcaacccaactataaatccatctgaagagagtgataaaaagggagtgatattgcttacaggttggacatttgaagaattttcttcgaaccctttcctgcgtgaatgcataggtgccagcaaggatgtcagtaattattgtggcaagctgagacatcagggccaaaggctcaacacctgtttcagtaatatctcttaaagttttcacggtgttcacagtgtcagcagacagtgccaaatcaagcaaatcaaccaatttatcatcagaaaccaagccgacctgtccaaagcaaacaatgtccagttgttattgtcaggtaaatttttaaatgaagtatttttatccaataatataatagcaggttattttattgctactgttagaatttatacaatgtttagtaaacaa

SEQ ID NO: 17831 - DNA, 697 bp, Oryza sativa
aattcctgcagcccaattttgttacgctgcgagtacgtattgaacgagcgagtacgtatgtaacgctgtgacttgttatagctaatagcttattcatataatagttacctgtaagcatatagagaagagaagcaaattttgttacgctgcgagtacgtatggaacgagcgagtacgtatgcaacgctacgacttgttagagcagggccaatagtgttgataggtactaacttcaatttatacatagccaatctaatagctcattcatataataggtatatgtacgctcatcctgaataaatgatatcagattatttgactggccattgagggaccgcggggtacacatacgtaaaacaatgttacacggattatattacatgagccggatgagaggagcaactgctgatcaaggagtgtatcatatgtgatataaaactcgagaacctgaagccatcattgaagggggagcccctattgtgccgtgtggactcatagcatggagcctgttcagtgacaccttcacattttttgtcaacaagatgactgagcgagtgaacaagaagaacatagctgggagcagtgacaggaccattaagtttggcagtgatgtgtgtccccgaaaatttgcaagaaggtgggctcataggtggtggtcagctaaatgagaaattaccagttagtgcagtcaaatcaat

SEQ ID NO: 17832 - DNA, 1905 bp, Oryza sativa
agcaaatctacaggttatgtaacgatgcagccttttatgctcgtactgagctgccatccagcatgccaaatcttgaaaggcttcttatacattctgacactgaggtatacgctcttaataagattttaaaacgaccaactcgtgatgcatacgcttataaccaataattgtcttacagtgaaacctagtagtatttgaatctgcagatggtcaatacacagatgctgcctagcaaattctatcacctcaagtacttaaatattgctcttggtggaggaacctatgattatctctctcaggtttccttctttgatacttctcctttcttggagactttcaacttgaatgtaataaaggtataaagtaaatgtggtggaattgctgctaattaatttgggttttttgttcactgttaggcactctgagtccgagaacgaaaggaatgtgtctcaggctgtgtttagttctatgggtgaaaagttttaacgtgtcacatcggatatacggacacacatttgaagtattaaatgtagcctaattaatccgtcattagcaaatgtttactataacaccatattatcaaatcatagagcaattaggtttaaaagattcgtcttgtaatttacatgtaatctgcgtaattagtttttttatctatatttaatactcaatacatgtgtctaaatatctgacgtgacaggatgaaaagtttttgcgtggcaactaaatggtttttttaggacccttcaggtctgagggtgatgccagagcaccgccgtcatgacaaactcaatttcttttctgcaaagagtttggttgagctaacatgtcacattgttgaatcggcgacatcactcggaaaaaagtgtctttacgctggacacaaccaatttttcctccgcattatctgttatccgttgcctctcactggccggtgggccactagtccaagttgtggctctttggtagtactggtgcaaattgacaaatacaacgcttcctgcgcgggcagagaaacgccgcgcccttcttctcagatgagactcccgagtgctgggcaggctcactgcctatccacggttccacacacaactactactgtagcaattgttacacgtaaaccgcaccaagagagatgcaatgcaaccaaacacagtaatcaatccatagggcagcccaaccattttaggttgcaaacgtatcatcatagctcatcagtagtaatccatatcgccctatgcgtatcattaccagtgctgataaaatgtttcgactctcttataatcacgagtactactgacaaccaccctccttcctcgcgtagttgcgctcctaagcctcgcttttgccggtggttggaatctccacacctgcaagcatgagacacattttatcagcattgctgggcaaactatccacaaaagaacaagaccctcaacagcgcagcgaacctggacgctcagcctgctgctgcaaaaccccgaagactgcggcggtgactcccaacagcaagacactatttttcaagcactccttctgagaattttcgtgaagacccctaaagaattcaatcaatttgtcagagaaaagccttagaatttcaattgcttggaatgcttatagttatgaacaaaggaagtagtacctcattgtggccacgacggtttccatctttgccactttcaagtccagctctgatttcgtaaacttctgcagcgcctcgaattcatgccttatgaaacgctgttcgtccttcagcgcttggagctacaatatgattcgacagaaaatagggtcccaaattagttacatatttaatacactactgaaattgaatacaattctcattacatgaacaactactacaatggtacaactatgttctaaattaactcaatccttaca

SEQ ID NO: 17833 - DNA, 2173 bp, Oryza sativa
atttctttgaaactcatgcaaaaaaaatttgtataggaattagttgaatttctttagagttcattaaaaaaaattgtacattctaataaatcgttccaatttaacataacaatttgagaaaatcgtcaatttactctttgtttccatctatgctattcaaagttcctttgtctgtctaaaattgtaattaaattgtcaactaatgaaaaatagatgttcataattttttaaaaaattaaaagtgttcaagttttttttttcaagaagctacaaaatttcttcctatgtcataacaatttcttttgtacgatgattcattaaatagagtaggaaaaaagtacaaagctaacaccctgcaagacaatagccaggaaagtaaaaaacccaccatcacgcaccgacacagaacccaggagaattgacaacctatgccacattatcaaaatcaatagagttacaaatttattcctatgacataacaaattgcaaatatattgtagaattgatagtatataaacaacatcataccgaccagcatcactattacaaagattggacccatgtaaaaatcgataggaagatctacttctcaatttgtacaaatattaatcagtacaatattacaaggattggtataaggtgatcacccaacatcttgaactctgccaaatgttggatgcattttctgtctgcgcaaaggcctctcgagaccatcatattgcctttggattgataagcactgcacccggcatggctaggacagtaaagaacctacaggttcatggaggttgtcataatggtattaaacttctaggcaagatttacgagaggtgcataattgcaaagctggcaaatgaactatatataactatttctaaaatgaaaacacattcttattgtcgatgtgtcatttgcatttctaaaaaaaatgtcatcgacttattgcacttaaagctcatttttttgcatgatcaagtagtcaagcctcttgaaatcttactaaaccatggtttgcattaatcagtatagagaacttatttctccctcatctaccgcctaccccaaacacacgttcccaccaccgatcattccgtgctgataattccttcagcctcaatagcatggttcacctgagcaactaatagcctgtagagaacagaaggtgcaaaggttttaagtcatacaccatattgctgaaaattgcagctgcactcagtacctagcatctagcgactatctaaatatttgtatagttattgacttattgggcaatatctaccttgaccaatcaactacattatcacagaatggaaactttgagctcagtaaccatgaacaaacaaatatagaggtgatctggacctttaattcgaagatattaataatacatactataggaccagcaagcaaggaagttccagagtccacaatagcagcgcagccttttgcatagaagccagttgagtggccatcaataaggagatcccccgtgtttaactgctagtagccttaacgagaaactgggacataggcgtgatccctcttatagtgctttggatccatgccaccaaaatacaggctcacctcaccaccagaggatgcaccaggtctcggttcagccaaaatgataaaatcacctgttgacatactgcagctgtgagtgcctactgatgcaagaaatttctagccttcacaaatccgtgctaactctgcactttgtttgtttattgctataacatttgattttaactgggcaagtgtaaatcgtctgtactaatggaaaatagcagtagctggtacctaacttcatgtttcagtacaggttacagtaacccaatgcaattcagcttagactagaaaatctgttaccaagcaattaggctcatatcaaagcctttgcaggttagtcaggttatggtgcaacattgcagcctgcgaactactatattttcatttgcaacaaagcaaaccacatttggctcataatcttgtaaataggccatgcaagccattttacccaaatgaatggcaagagcaatgtaagtcttcctcacaactaatgatggccatgcaagtcattttacccaaatgaatgtgccatcttcatccgcatggcaacccatccagtcatgtacatactgatgtagcatacatagtacttcctccgtttcac

SEQ ID NO: 17834 - DNA, 7049 bp, Oryza sativa
catacaaccgggcatatgctagtaacgacaatatatactacatgtcaatattgtacgtacctttgactcgttgtgctatgtacaggctcttgactactcccaactgagcttagcagtggtcaacattaggttaacattacatttttacaatttgcacgttgtcacttgtcaggttagttcacattatttaatcattgaaagctcaatctgttacatttgcaggtacacttgattagttgattacctgtcctaattcacaaaaggaccgagtttggcagcagacaagagatgtaccaccagctcaatccacgactccacgtgtaactgaacctgggcccgtttagttcctcaaaaaattttcccaaaaatatcatatcgaatctttggacacatgcataaagcattaaatatagataaaaagaaaaactaattgcatagttatgagggaaatcgcgagacgaatcttttaagcctaattagttcgtgattagccataagtgccacagtaacccatatgtgctaatgacggcttaattagtctcaaaagattcgtctcgcggtttccacgcgagttctaaaattagttttttcattcgtgtccgaaaacccctcccgacatccggtcaaacgttcgatgtaacacccaaaaatttactcttcctcaactaaacacacccctagtgtactagtgtcctgcccaaaagtattaacatttcacatgataaaaataacaaaaggctataaatagagcatagctgcagacgtacgtgcgtggtgcacaagtatacacgttagctaagatagtactcatattatgtttcagaatataaaacgtttctactttggtcaaagtcaaactgctttatatttgactaagtttatagaaaaaaatagtaacattttcaaccaagacaaatttattatgaaaatatatttaattatcgatttgatgaaactaatttagtattataaatattactatatttatctataaacttagtcaaactgaaaatagtttaactttgccaaagtcaaaatatcttgtaacttgaaacggagggagtacatatataaaaaaaataatgtgaaaatttcttgagcagcctagctctcctggaaagaaaacaaaacaaaatcttaagcaaaaaatgattaaatcgatcgatcaggttaattaagaaataagcacggaataagacaagcatataaacatcaactgtatagtggtggcagaagtattttaacacacaacgcacgcgcaccaatctcatttctagtttactccaaattaaagaccagtcagaattttcgcctttgcaaaactcctctcatttcatttcctcccaagagtcaagctagcccttcttgcttgctccgttcaacgcctcttccccagcttcacagtactccatgtctggacctggaggaggaggtcatggcctctacgaggatcatcctgcagccgccggcttcctccccttcgaccacgacgacgacgtggtggccagcttcttctttggcagatcggcggcgtccggaggaggagccggcgccggcgccggcgctggagacgatgatggtgttgggctcatcacgccctactccagcatcacggattatctgcaaggcttcctgcaggaccccgtgtacgcgtcgtccccgttgggcggcgatgctgccgtgaagcacgaaacggtggtggatcatcccagtcaggccggcggcgtggcggcggcgccggccacgccgaactcgtcggtgctgtcgtcgtccagcgaggcggctggaggggacgatctgcgccggtgcaagaaaggtcgtcggccggaggacgaggaggaggaggagattgacgatgagggatcggccgttcagagttgcaagtaagttcagtattaatttgatcttgttttgtagctagatccatgctgaatttatgtctgatcgatttatcacacgtgcatggctagatagatcttggatgaattaattaatttggcttcggtgtgtacatgcatctacctacctagtttttaattcatcgatcggtacaaattaattaactttacgggtctgaatacgaagattccgtgtgtgtatataccgcgtgtgaagtgttaacgtcggaatttagggtttgttccctcccttcttttcacaataatttgttgaaaccgatcttttcacaataattaacaatatatatatatatgaattaatgattaactgacgagactagcgatcgatgattaacaaatgattcacgagacagtagcaatcatgcaccggctgatatatatgcgcaagaggccaatatctcaactgagacagcatatgtcgatctcgatcgatcgatctggtgcgtgcaggacgaacaaaatgaagaataaaaaaggggcgaagaaggagcgtgagccacgtgtggcgttcatgaccaagagcgaggtcgaccacctcgaggacggctaccggtggcgcaagtacggccagaaagccgtcaagaacagctcctacccaaggtcagctagccaaattttcacttgcatatgcattattctccatcataattggcatgcatatatttgacagaagcagctaccacagcattagcaacaagctaagcacacattggcattggtctgagttttttttttctcagaatatctcgatggatccatatgttagaagtatatatctacgatggacagttcttcacctaatacctgcgtcttcttctgtgtcgtcacttgactcttctctattccaacgaatgcaggagctactaccggtgcacggcgccgcggtgcggggtgaagaagcgggtggagaggtcggagcaggacccgtccatggtgatcaccacatacgaagggcagcacacgcacccgagccccgtgagctaccacatgcacaggcagcaggggctcatgcatgtgagcgcgcgcggtgtcatgcccggcgccgccggcgcctaccagttcggcgcgccgccgccgccgctccttggcttcgacgaagccctcgccgctcgggtgcgaatgacgatgaaccagcagcagcagcagcagcagttaggcttcgtgccgagcatacacgccgccgccgcccggccgacgatgcctcctcttcatctctacaccgcgcagcaagacctcttccttccgtgacaggcagtcaccacggctattgatattagatctttcttatttacggtttacagaatgcatgctgctcgagataaatttgtgcgcggctatatatatatggttacgttaccgatgaccaagtgaagtgtgggatgcatgttttgtgtcctcgtttttttggttggtctacaaaacatgtttgtttgagttgcattgctaagtgcctagctagctatataaacactgtctttaattccaaactgtagatcatgaggaatttgggtcttgttattgatttgaattctgatgtgtcacgccccgaactagtaccgaccggaactagtctgtgacgctccaatttaacctgttaatcaataccagtcccaggacacagtgctggtatcacaggaagacagattatcacagcaacagaggtctctttattatagagtagatgtacagtcatgttgggctgcggacagatcccgagctcacaactgcattacaaaagggaaacggaagccgggacttggaccaaacaacacaggcgcgacttgggaactaggccgaaaccctaaaactcatcgtagccggcttgctcctggaagaactcctcatcagcaggatccgcttcgtcttcttcagcgactggggggggattatttatatagagcaagggtgagtacggggagtactcagcaagccaagggaaataagtgtttaatgcaggcttcaaggaaaggccgttgtttttgcaattgattttagttgaactcctttctgaaaacaactaagtgagtgcttctcaaacgacacggttgagacagtgcgtctcgtccggtcggagtatgtgtaatgtatcggtctttagacttgattcaaggttggcatccggccaacagcttttcaaacggccacccgggcctacaactttcaaacggccacccgggcctagctgatcccatcagctgcagatttttcaaacatcgaacccctttccacaatagcaatttcacaagcagtagtcaaacaaaactacgctaggaatcacctcacatccgcccatgaccgtgggcacggctgttcgaacagtttgttaacctctgcagaggggggtacactttacccacacgacattactaacccggatcacccagcccgtggggatcagccacgtcgggagacctccaagctttcatgacaaggcatttccaaagccgatacaggtttaccatatgccgacgagaggggtcccagaccaacaacaggttaggtcccagaccatactgtgccaggaagcccaggggtcctccccgacaccaccccagcgaatccacatgtctctcgacatcaaggctcccctgataagctagttactcagccaggggtgtcccattccacccatgtggtcgtacttgtcttatgtttagatgaaattccaaggaatcggttcttaagtgcgagagcgggaaaaccgtacacccggtacgttccccggtccgcggttttggaaattcatttagttcacaagcaccgacctaggtgtcgggttttccaagtcttttgtaaaactcaagttttacccaagaagttgctcagattttaaatttgaaggcgcccttcggtactcgcacagattgcatgatttccgaggcgcaactgggtggttacaagggcacatggtataacaattaacaaaggaaggatcaaatgcaacaaactaggtagatccgccaatctgccttgcagacgggacaacagattaagtgcgatcctatcaatgcataatattttgcaagcaacataattaaatttcaaatataggctcaagatgttcaaaggtggcttgccttgctcgagatctggagcttgatcctcgaaatcctcgcactgcgggtcttcgggctccggaactacacgcgaaacgggacaactcaacaaacggcgaaaatgaagccctaataatgacctctaagcgtgccattagatagatctcgagatttgaggaattttggaagttgaacggagtcaaacggatctacggttgggaagatattgaatttctaagattattggatttttggtctaaaggaaaaggatttaattaaatcctttttggaaaagaaaaagaaaagaaaagggaaagagggagggattatagacttctcctcgagcggctagggcgcggcccaagggaaaaggagcggactggccgagctaaatgggccggccggcccaaggcggcccaagtgcgcgcgggggaggggaggagagagagggccggtggaccgggctcaccgtgcgcggtcccgggtgggacccgcttgtcagcggctcggctcaccgtgcggagggagcacgcggcgcacgcgcgcgggcgggggagggacgcggtgcacgcgcgcggtctgcggaggaacggatgcggcgggcccacgcgcagcctcacggctcgcggtggaacgcgtgcacgggaggggctgaccggggtcggcccgtcccgacctcggctgagctggcgccgacgtggcgccgacgtggctgccacgcgggccggcgggaggtagacgacgacgccggtcggaacggatggcggacaacagcggcgagcggcggagcgaaccacggcgataccggcgaaagcgagcacaccgggtggttgcacgagacgaggggagacgagccaacggctcggattcgccggaggaagcttgacggcggcgaatcgcggcggcggcaaccggtggggagggaagagggaaacggcgacgaggtcacgaggggccgattcccggcggtgagagcatctacgcggccacgggaatccgatgctagcgtcggattgggcggagctacgccgagcgaggctggcaacgagcgggtgctacggagctcgagcggcgatggcagcgagcacacggcgggcgacggcaacggtcggggcggcgctggctagctacggggaggctactcgtgctaccaccgaaaactaagggggggagatggagcgaggaggaagaacggagggaggcatcaccgaggtgaggaggggcgctgtgacgagaggccgacggcgcgggagggatctctccggcctcgggccggggaagaggaggaagacgagcgcccggagtccccttccgcgtcctagtgcgcaccggctcctccggcacacacgcgacggctgcggtcggcgagagggacggcaatggcgcgggcgagaaacagggaagaatgggagaaaagggaagggagggcgcttgggtttatagggggcggcaatgtcggtttggaaaccgactttggcggtcaaggcgcgagctgtcgctccggctagcggccaaaacggcgacaggagggagggaggatgacgccggcgggaggaaaaggggaaaaaggagggagagaaaggggggctcgcccctttcttctttgggaaaattgggaggggagcgggggcgtcgcggcagagggaggagggctcggcctccgtcccttggcggcttgcgcgcggagtggcggggccgaggcgatgacgacggcgatgacggcggggcggtttggagcggcgcgacgacacgggcgacaggcgtgggctggcgcggcagagggtgacggcggcggcgaccagatggtcggccactcggcacgcgcgcgcggcttgcaatgggagggcgcggcggatggagaggcgcggctcgagcacgcgcgctggctgcggggccgagcggctgcatgcgcggcagggcagcggggccgggcggcgcaaacgcgaatgacgcgtggggagcggcagcgaaggggcggaaaggagggcttggctcggcgcgggcggctctcgcgctcgcgcgcggggcgcgcgggcggagcagagggagagggaggcgcgcggcgcggcggctc

SEQ ID NO: 17835 - DNA, 10323 bp, Oryza sativa
ccgggccacccccgggggagatgggccgagagggaattggcccatcgaccccgggggaggcaaaatagacttttgcggaggaaaaagatttggaagaatttggattcggaattgaactcaacgatagatcggggattgagatcttgagatggcacggacactagacgacaagcgaagaaacaaatttcgcaattagggtttttaagagataattttcccgctaggcgccacgacggaacgggcgctacatgatgctattaccttattgatctattatccagtggatctattaccttatctttttggctgtgtatccacggacaaaggccggagatataatttatttccattatcttaaaaaaaattgtccagtggatgggccgggcattggtcgatggagctaaaaacggggataaagacgaacaggcgtttttggcaacagctcctcgatccccaacagccggtgcagtgagactagtcgcgggagtacgtgcgcggccgtctaaacacacgatcgagacgtacgcgcatgcagtacgtcggcgcctggctgctcggctcgccaatgtgtctgctgcgccggtgggtcggtgggatcgacacagtacgtctcgatcaatcgtgcaacgcgcgtccatgctccatatatcggcacgaggtgcccgcgcgcgcgtagaccacgacgtccgatgcgagagcgctgcaagtggccggcgagctccttccttgccgatgggcagccacagcccacacggcgcgatccgcgtggagggagttcccactcaacctcccttctgcgtagggaatgagatcctctgcagtcactgcactttacctttgttactgacatatgggcccagactcatatgggcccacatgtcagtgacaaaaggtagaaagcagccaatgcgtgtccatgatccatacattgggtgatgagaaaaggctggaaggctggccttgtttggatgggcccaattcaggcctatccacgtgtgggacagcactaattctctttacttttgtttgctataaaatgagggggaaaagaaaaatatgagattacttggactgtaaaatatagcgttccggagtccgaagcagaggttcaccaacattcccgagcgaaaaaacgaggttctttgttttcgtgaaaattgtttgaaaatcattgattcccgataatatccgatcaaattttatcaattttttcccttaactagaacagaaaaccaatcggtttgtgttctcgagcagaccgaacatccggttttcgaaagaaaagaatttggctttttttggtttttgtaaaccctgctccggagtacaggagagcaaaataggcctttttctgatcgaaaattcgaaataaggagctccgtctttataagatttgtcttttgcttctaagtccttgttattgaatatactgcattggtagtttggtacaaagtgatccttcggtattgccctctgatcttggactgaacaaaaaacaaacctgaataagctgccttctagaggagataatcccaatgaaatcaggatagtttatcacgatgaattcaaccacaccagaagaaaaaattatagactcaaatgcttgtattcctcgatgtactctgctcgattctaaaatcagattagagtttgacaccgcaagagatgaggccacaggttggcctccgccggcgcccggagtgcggagtcaggccgcgcgcttcatcccgccgtggcgcccgaatagccccgcctgcaacacccaatcctcgatcatctcctgcgccgcgcggccgttgtccgccggcatgaggtgcccggcgccgtagacgacgacgtgggagagcgggccggagcgctgcacgtacccggcgagctcctcgccgatgcgccacacggcgcggtcggcgtcgaggaaggcgggcaggccgtcccactccagctcccgcatccacgcctccgtcgataccacgccgtccctgaggtcgcggatgccctggtacagcagcacgcgcgttccccgcagcagcgcctccacctccggcttcacgctcttcatcacgtccccgtgcatcgccgcgcccaccgcgtcgctgcactcctcccactccacgtcgccgcgcgcgcccagcgccgccttcacctccgcccggttcacgaacttccccacggggcccgtctcgtaggggcgcttcttcgccgcgtcgaacagcgtcgccaggcccgtcgcgttctccagccacgacagcacgagccccctcgcgtcggccgcctcgctccacctcgccgcgttcgtcagctccaccgccctcgcctgcagcgcctccagctcccgcttctgcttggcgttgatcaggcccatgaagtaggcggtgtccgcgtgcgtcgccacctgcgcgacggggtgcgtcagcccgttgccgatggccacgccgtggaggttaacccgcagccgcgtcggcagcgtggggttcacggccaggatgtacgacccagccgccgggatatacttgccggcgtagctctcgccggtgaggaagaaggggcgggagcgggagcccggctggagcgcgaagaacgactgcagcgcggcgaagaggtgcgcggcgacgacggactggttggtggggatggcggcgggggacggcgcggcgctgaagcccgtgccgagcgggttgtcgatgaagaggagaccaaaccggcgattccacgagaaggggttgggcgagagggagagcgcgtcgcggttgacgaagtaggggccgagctcgaagaaattgccggcgaggccggagcagccggggccgccctggagccagaggaggagcggcgtggaggccggcggcgtgagcgggtgcgtggcctcgtagtaggcgaagaagagcgaggcgttggttgtcgtgatggggaggtagccggagttggtcggcagggcttccttcgggaacaccgccgccgcttcagctgagggtgtgatggctctggcgctgacgaagccgatgagcaggagcgagacgaggagaagcggcggagccattggtgagtgaccgcagttgagatgggaacaggatgagcttgtcagtctgtggtttgtggcgttgaaatggcagtgaatgcaccgatcaatcagctcagctcatgccggtaataatcagatattcctctctgtcctagtaaaatataaaaaatataagcactttacttctaagcggtttccgaaatgctattttgttcaacaatatctagttttaaataaaaagagttacatattagtttgtttaataataaatctagtaataacaattttatatgattatttcttttcaattttttttattaatagtcaaagttacaaatatttaatttggtactatggccgagtttagttttaaaatttttctttaaactttcaacttttctatcacatcaaaacttttatacacacataaatttacaaatttttcataacatcgtttcaatttcaaccaaacgtttaattttagcgtgagctaaatatatcttatattaaaaatgtttatattttgggacgaggaatagagatagtacgacaagatgtttgtgtctcactgtgttttgtactgtgcggtgtgtctgtgactctgtgcctgcctgtttgtcattgacgagagatgactttggaaagtgacacgtcatggccggggtgtggttgtggtgtaagcggtgattacaacaagaaaatgacatctgaattatgatctgctcgtccgtctccgcgataaactgaagcggggatgatatattctttgccaactgctgcaatttttagttttaaaaagaactgctgcatttttttggtcgctggtttggtccgttcaagggcataaatcaaaccaaataaagcccctcaccaaccctctgccactgggccttgcgtcacttgatgaatccatcactcgttgccattgattgctctcgtcaattctttaccttccaaagctgccgcctgccggattgccggatgtgtgctggcgtgcaggatcagtaccgcgcgacgtcgccacgggtgcccagcacggccgtcacctcgtcgcctcgtcggtcctctgctgaagtgatccatcgtcagcgtacggtcccgtggattttgggcggcagccgatggtaacaacccatttcggcccatcagattttggatcgctgcgagatatccgatggtgcattctcactctctctactgctcacactgagggcccgagaagccttcgcggccggaacggaagagcgagaccgacattgaaacagcgatacgccgatacctgacgaataaaaattgaaaatatccttttttttttattaataatttacgtttatatacatacatgagatgaatttgcgaaaatatacctaacccgcgatgccggcatgtgggagcgacgggcaagcgcaggttggtcagagcgggacgaaggcccgagcggtcacgcagggcagggcggcggcaccggctcggtcccgcagggctgttgcgcggtaccggcccaatcccgtggagcagcggtgccgcatctccgccgcgcgggaccgctggcgacgccgcatggtcgaggcgcgggaacggctcgtcagagcactgatcaataaaaaaaaaaagcaaatcctcccggcactaaccacgtactgagcatgcttcaagccctaatcaatcaactcccggcactaaccacgtactgaatctattgcatgcttcaagcactaatcaatcaaaagaatagcaaatcctccggcactaaccacatataaaagaatctcttgcatgcttcagctgtatccaatggccaatggtgtacagggtgctgggggagggcgtcgccagcggtcccgcgtcacggagatgcggcaccgctgctccaagggattgggccggccggtgccgcgcaaccatccagcgggaccgagccggtgccgcgcttcggctctaaggaaccgagccggtaccgcgtggccctctcctgttccgcgggagcgcgccggttccgtttgtctaagccgcgggaccgacgctgtctaccccaccctgcgcgaccgctcgagcctccggtcccgcacatccaacctgcgcttgcccgtcgctcccgcatccggcgtcgcgtgttagttatattttcgcaaattcaccgcatgcatgtatataaacgcaaattattaataaaaaacggatattttcaaaattttttcgatacctgactgccaccgaatcaattagtgattaactatcctaattagcgattaattaattattaattaatcactaattattattagttaatagtaattatgtacttaatcaccaaataaatggagccggttgacactgtcgctgattgtttcaacgactttcgcccgcgcggtctcgcactttcctggcgtgataccgtctgcgacatctcgcttacgtaattttcgtataatggttgtacgagatcgacgatatattttcgtcaaaaattttgcatccggaatattcgtgaaaaaataaataaaaagtatattttcaaatctaattccacaaatatagctagcccctttattatttatttatttacttatatatgccttgaaatgatgttcaggttctagacggtgcccgcgctgaataatccctttctgaacacccaatcctcgatcatctcctgcgccacgcgcccctgagaatacggcacgaagtgcccggcaccatacacggccacatgcacgagcgcgtcatggcgctgcacgtacccggcgagcccgcctccgcttcgccacacggcgcggccggcgtcctggaacgcggcgaggccgtcccactccagctcccgcagccacgcctccgcgcacaccggcccgttccccacgtcgcggatcccctcgtacagcagcacgcgggtcggcgtcggcgtcgccgtcggcgacgccccgcggtgcagcagcgcctccacgtcacgcttcgcgctcttcatcacgtcctcctcctgcgccgcgcccaccgccgcggagcacgcctcccacgcgacgtcggggcgggcgcccaccgccgccttcacctcggcggtgctgaggaagtccgcgagccccgcggccatcaccgccaccgactgctgaacttccacgtcgagcagcgtcacgacgcccgtggcgttctccagccacgacatcagccgcgcacgcgcggcggacgcctcgcgccacctctcctccctcgtcagcgccactgcctccgcctgcatcgcctcggccgcgcgcttctgcttcgcgttgatcaggcccatgaagtaggcgatgtccgcgtgcgtcgtcacctccgcgacggggtgcgtcatgccgttgccgatggccacgccgcgcaggttaatcctcttctgctccggcaacgtcgggtttgttgctactatgagcgcgccggccgcggggatggtcttgccggcgtagctctcgccggtgaggtacagagggcgggcacggaagctcggttcgagagagagaaacgactggagcgcggcgaggacgtggtcggcgacgacggactggttggtggggatgttggcgggggaaggcgcgacgctgaagccggtgccaagcgggctgtcgatgaagaggagaccaaagcggcggttccacgcgaaggggttgggagacagtgagccgccggcgaaaaggtaagggccgatctggaggaagttgctgaggaagccggagcagccggggccgccctctagccagacgagaagcggcgtcgtggccagcggtgtcaccggctcggttgcctcgtagaaggcgaagtagagcgaagcgttcgccgccggtgggatggggaggtagcccgacttggtcggcagggctcctctgggcaataccgccgccgcggtggcagtggcagccgtggccgagagtgagacggccacaaatattacgacgtacacgaggtaaaacggccgggaaggaggtgccatggctggatggaatgatttgtacctatgggcagttcagttgtgcttgagaatggcactgtcacacacacaaagccttaagtaggagtatgtgtattgtcggaaattctccgaagcgtgtattgtcgtgtaatagctgagaattttctcaggtgcaagttcttggaagtgtacctgatgtgatatatgtaaggaaatacaaatgtttgaagctaaagtacattatcatcaagtagtcaattgagtatttgttccaagctgacatcgttacccacagcaagtcaaacaagtgactagtgagccaaaacgcggctgttttgcgcgtgacagatcaaagaaggccatacatatatggacagaacatatgttctccgtttcctggtcagaggagagcagcatttcttaatttcttatttggtcaggtcaaacaacagatgtcaagccccgcaaaaaaaaaaaatgtcaagagcctaaactgaatcactactagtcattagcaacacatactctttgtgacccatacatattgtttactgatataaaaaactttgcataatttttataggattagtatattcaatctccgctagattcctgcaataactatacatttaaaatgacctttaatttgacatatatattttatatctttgaaaattttcaattttctctcttgttttataacatacttattagaacttaattttgtacatgtacttctgtaaccctaagataaaatctatgtattatacttatgtaagtctagggggaaactattttgatccctcgaggagatatcccctcgttgtttatatgtcacttaaatggttatgaaaaaaattgagaagatgtattaacatgtgatatatcactcgactgtggaacgaaggctgattttatattaaaatttgaatagagtgtttgcattacaaatcggagataaattcgatgcggggttcaaagaagatctttcttctttgcaaacgttattttaaaagtcagcaacatcatttattaaaagccagagataacaacaaggtccatcaaatgtaccttgtaaaaaaatagagtaaattttaaaaaacagcaacttttactcatgctattataaaagttatagttttgtggtaatttctcatgctattgttgcagcaaactgaaatatgtcgctaatgttgtagcaaactaatagttttatcactaaagttgtagttttctgaaatttactctaaaaaatatagtgtcatatcacatagaaggatttctatttgaccaatcaggagctcatcaaggaaagtggaatccatttgtagcaatcgggagacttctagaactatagatggtcatatggcccgaggcccgtggcccgacccaaggcacgccattttggctcggcccgacggcacggtgggctggcccgacacggccacgattgaagaaaaatagtacagggatgcaaaatagacttaaataaccatataaggcaaggcccaaagagtagattaatacaaaatagacttatttccagctatacgacacaaccgctgagttgagggatgaaaaaatagatttattatgtggagaagtacgatgggctgtcgtgccttcgggctggcccggcatggcttgagtcgtattgggccgtgtatgtagctcgtgggctagcacagcacagcccggcgtgtcggtcaggccgtgccggcccaactaaccttggcccaagcacgatcgggcatgggtcgtgccgtgccgggcggcccatttggccaactatatctagaactcacgtgcctagtctttttaaaagtatatttggttgatgaatcggctaatcaaataaagaaaaaaaataaatgaatgtgtcaatcttgaatttataaggattattaacctctatgattaaggagagaaatgggagggagggaggagtccatgcggaccgggaggaagaaaggaggatagggtagcccgtttggacagtaacagttgggaattttcatgggagagtttgtgaaagaaatttaattattttggaattggtttaaattcaaactggattatttgataggagtatcaggcaatctttggtaaattttggaaggaaaaatctgatggacttggcattggatccaaggagatatatatttagtgaataatttcggtggaaaaattcgaattgtgaaattcaaccttcgaggttagaatttggatagaaattttgggattagatttttgggcctcaatgagggattttgagattcgttggcacttaggtccttttcaaaaccattctgacaaggaaaaactgtaattctactagctcccactgtaggttgactctaatttatcctcaagtgagtatatcgattcatccaactactaaaaccagttttgttacgccgagaagacattgctgccgagatcctacatggcatccagttccaagcgcggacttggggatgaactttgtgagctgaaatgatctagcatgtatactacaccaaggaacgatggaaagaggcaaggcgcattgatccaaaattttatttatttatttatttatcataggtgctgaaatgatctacgtataaactacagagcacaatacggtgtgtacggccgtggcagcggactaactacatattctctccgtttcataatgtaacactttctagacttacttcatatagatattaataaatatagatatatatatatatatgtatctagattcattaatatctatatagatattagcaatgctagaaagtcttacattatgaaacggagaaaatactccctactataaatgaagaaacattttgccttacgccttcccgccgctggcgccgaacaatcccttgccgaacacccaatcctcgatcatctcctgcgccgcgcgcccttgagaaaacggcacgaagtgccccgcgccatacaccgcaacgttcacgagcgcgccgtggcgctgcacgctcccggcgagctcgccgcctcggtgtcgccacacggcgcggtcggcgtcctggaacgcggcgaggccgtcccactccagctcccgaacccacgcctccgtggacaccggcccgtccttcacgtcgcggatcccgccgtacagcagcacgcgcgtcggcgtcgtcccacgccgcagcagcgcctccacctccggcttcacgctcttcatcacgtccttgtgctgcgccgcgcccaccgccgcgctgcacatcttccactccgcgtcgccccgcgcgcccagcgccgccttcgcctcggcgccgttcagcagcggcgcgagcgccgcggcctccgcctccagcgacgtcgtcacctccacgtcgaacagcgacggcacacc

SEQ ID NO: 17836 - DNA, 7457 bp, Oryza sativa
catgaagtaggcgatgtccgcgtgcgtggtcacctgcgtgaccgggtgcgtcatcccgttgccgatggccacgccgcgcaggttaatcctcttcttctccggcaacgtcgggtttgttgctactatgagcgcgccggccgcggggatggtcttgccggcgtagctctcgccggtgaggtacagagggcgggcacggaagctcggctcgagggagtacaaggactggagcgcggcgaggacgtggtcggcgacgacggactggttggtggggatggcggcgggggaaggcgcgacgctgaagccggtgccgagcgggctgtcgatgaagaggagaccaaagcggcggttccacgcgaaggggttgggagacagtgagccgccggcgagaaggtaagggccgatctggaggaagttgctgaggaagccggagcagccggggccgccctccagccagacgagaagcggcgtggtggcgggcggtgtcaccggctcggtggcctcgtagaaggcgaagtagagcgaagcgtttgccggcgggatggggaggtagcccgacttggtcgggatggctcctctgggcaataccgacgccggtgcggcggccgccgaggccgagagcgagacggccgcgaggacgacgaagacgagggacagcggcgaaggaggtgccactgccatggcgcgcccgcgtcggctgtcgcgggctcaacgtggcttatcggctgagtgatgtattgcaaatttgcaattttgcaaggaggtttcgattagtgttgacagctgatcgagccggtgtgcttgggaaatggaggcattcggagagccttaaataggttggcatttggtggtcttaattaaaaaattgtgtacgtaagtatgctccggtagaaattctcggaagcataccttgaacagacgtttcaaacgcatagacttcaattatcatcgacttgtcaaaaagtagtcgtcccaaatcacggcgtcacgtgctgtaaacattgaagccagatgtcttcagctgtgaggagaacgtacttgctttgcgcgtaaacatctctgttgttctagtctctactagtaataactacaagtagcaaggtggaagagtgaaatttctgctgacctgtgtgatgtagtatttgtaatttagcaagaaagagtatgtcgctgggtacatctctgttgtttgtctggtgcacagagaagaaagacaattgtacctagctgatcaggtgaaacaacaagtggaagaggtcaaactgaatcacctctaatagtcgtcctcatccatctgaccatcttccaggcaaacttctccgtttattactggtggctggtaaataattaggagccaatccagcaacgaaatccaatatatgccaatcaatttaggctgttagccactactaatacatccttgaggtgctgatgggtacagcaccaacctttctgttagtaccaacgcctgccgaagtcgcggcagcaacaataccgttaagagatcttgtgtatatgtcagtctgtgttaccattctatctaacgagccgttctttgatcctgctgaatgatggaacgtggatcctctcatgtccagagcaacatcagccgtgactttgctgttcggataagcataggcctgcgtctgtgactgtgaatgcattttataagcatccatggcttgtgattgttcaacacagttcatccttgcaggcacttgatgataaccatatgcttgtgagatttgttgctggggaggataccctgaactcatcactggtccccttggaccataaggatcattggtgcttccagtctcataaggaaatactgacccaacaggtctccctggtgccactgttaagaaggaaatatattagaaatataaacagaacatgtagatatactagtattaataaatgaaacacaagtgcacctggttttgccacttgtgaaacctgagaagaagtgggaatatttccagaaaatcctcccatgacccaggggtttttacaaggttcatcagagacaggcctgctgctcttcaatgaggccgcaagaggttgttccttgggaggaattggagtagagtgaacagtagtagaccttacaaaatgtagttgtagattagcaaaaaaactcaaggtttaactaaatcaaagggtataacattatgaatgcatgctaatcaattctcgtctaatgtcaaaatatctagactgcaaaattcttttgtaacatgactctaactaacgtgcgagttcctttcttcatcatatcatataccaagtcaaacggagaatttggccatctagatagcagttatatgcgccaactctacaacattgacagaaccacaaattcctagagaaatctccatccctgtgcttggtgcaagaccatgcacaagattttgacacacttcaggaataaagcagctgttttctttgaactcatgtgagccccagttacttcagtccaaagttttatataacccagtttgccatctggacaaggaacccctggcctgatctagatgtttctttcatcatttggcaccaaggttgccttgatattgagaaatcttaagatgaccttcaaagcacgcctcaaaaaaaaaaaacacgagatcagaatttgatgccatattacctaggaagcgatgcatgttttctttccattggaattgctgagccacttccattgctttcttcaagattagagaactgcttcttaaactgatcaaccgcactgtataatcatgacgacaagttatcaccgtcaatgagacttgatacagtaaaagaaacgtataaatacatggtacatgcatgtgcaaaagcaccatacgtgtgcaaatacagaaaagctaaaaccttgggtagagaaaggttgctctctctcttccatttctgtagttcttctgcaattgtggatgatattccaatatctcctggaatatcagctcccttatatcttccttagacaattttttctgctcaaattcaaactccagttttctgattggctggcatgatggttctctatcaatcttggaaaggcctttaaagtatggatcagtcaatgcctgacaagttttaagtatcaggagaatgccacaacaatacaaaatacttcacataccaaactaaagttgcaagcaaaatcttaacatataaaagaaattgacatatcagtttatcacagtgacaaaagacaccaaacagttacctcttcagcagttggacggtcctttggatcaaaggctaataaccgttgcaagagttttagtgccaaaggatctgcattaggaaacttttgagagaaggggactggatctttctttctcatgctgctcaagtaccgtcttgctttctcattccgaacctggaaaggaagagaacaataagacaaatgttgggggtcactgaagtctcctcccaggaggacctacaaaaaacttttacctaacagtattatcatacccgggaaattgtatccatggaaggtgttcctagaagatcagtcatcaagtctaactgatggacaacatttttaccaggaaacaaaggcttccctgtcaacacctcagcaaagatgcacccaatgctccaaatgtcaatagctggtgtatactgcagtgaaatgataatgcaaaacacattaagatgctgcatataaccacacccttgaaaaattatgataagcataaaagcagcacattagttcaccaggcatgtgaattttttttaaaaaagcttgtactgttctaagttgctttttttttacagtaatctgaattgttgtaaacgttgctattcagcaggatattggtccatatttgcgtaaaacatggaattgatgggaaataataataagtccttgaattaaaatacaaaacagaacaaaaaaatgatatcagaacaagattgaacggatataaatctagcaaaaatggataaacagtatcaaagaaacacaaagatgaattgtatatgctttataaaaacatataaaagagaaaataccaaataaaacataatatgacatcgtcaagtctaacaagcacattgtatttctgtcaggataaacatatgcatgaactgcaaagctcacctttgagaagaaggatccacagagctctggagccctgtaccatcttgttgctacataatcctgcagagcatacgtgttatgtccataaatcatggtggtacttcaaccaaatcagttggtgttgggtttgtgcttcgtactaacataccgtccagaagacagttgttggggtatcattgaatgcaactcgtgctagtccgaaatcacatattttcagtttgcagttagaatttgctaaaatgttcttgggcttcagatcacggtgataaacactagctacagttatataaactcagtgttagcacacattatggcaatagaaaaataaaagaataatatgcaattgagtcataagattttacacagggtgtcaataaggtagaaaaacaacagggcatggttgatgtgtttttagcagtggccagtggcaagtcaatacctatgacaattattggacaagaatcccctcaagcaatcagactgtgtccttatcagagtagatactacataaatgtaatgaggaaaatgacaagagtgctaaataagtcacaaagcttccatgaacttacagtcaggtcttataccttgactgttacaattaagtataatttactttcatggtaattttagaaggcgtgtgggctaaaagaaagctactagtttgaacaaactaaaaggacgcagactgatatgtaaatggatatgttaagtggacatattaaaatatagagggatagtaacaggtatcatggttggaccagctagcacaaagcaaggaaccagattaataataggtaaaattataatctacagaaatcatacacaaacccattggttaacttggttttacatcataaaggggaaagcccctgctgctaaattggtttgcaaaaatatggtgatttattatctgcatttgattgactgcactccaagcaacctttggtaaataaaaatattctcacattcactgtagattatctagacatggtcaccgaggaagccataactaccccattacttcactttcttttataattatactgaagcacaaacacatggggagagtggttgaagggcatgatgagtaggtgacttccctctatgcaatgaatatgcaatacatataagactaaccacagaatgctgcattgtgaaatgagatcaaagggggtaactaatatacagactacagatgcacactatctaaaagggggaaatggaactagagctgaaggagttaatgtttcctaccagtatgaatgtatttgagggcccggagtaattgataaaggaaaaattggtagtgctcttttgttaagtcatcattagcctttataacttggtggagatcagattccataagctcaaaaacaacataaatatctttgaagtcccttcttgacggaggtagcataatgtgcttgatctcaacaatgtccggatgccttaggagtctcagaagcttgatctcacggagaatacgcgcagcatccgagacatgctcaaaaatattgtgcaccttcttgatcgccaccttctgtctagtgtgcaaatcaatggcagagcacacaaccccatagcttcccttaccaatgacttcttggatcctgtaccggttcgcatcaccatactctgtaaaaaactcctccgcagagctctgaaaaaaaaaagaaatttcacacaccgaatcaacagcccatcactgaagattgcaatgaacttcatataatcaatctcataaaaaaaacggcaccatattgttgaggtcacaaaattattgcaattcgaaaccgaacattgagaagcttccatcttccaccagcattaaatcatggacacagcaacgaactgttgttttcgttttaccaccgagatgggtttgcttgtgggcattaccgaagccgggagccccacacgagtacacgaggtaagggaaaagctttttcccaccgacagggcaaagcagcagcatgcggcgttgtttagttcggcgcagaagcatctcgcagcgacacggtaatggtcaactttggcatgtgaaggatgagctgttcgtaactcaccgttcggtgcacatcgcatttggccttttcaaccacatactccagattgctagctggatcgcacatttcgtccatgatgaacaacgcaataactaaatccattagaacatgtaaaaaaaagtaaaaaaaaaatctcaaaaaagtttatgtaaaaatggcgatggggagttaaaaaactagcctatttgcaaatcgcgcgctagaactgaaatgaacagcaacaccagaacgccattagacaatccacaacttataaagaacaaaataacaagacaaaaacatcgaaggacaccgaggcgattcgcgcatcgcaccaacatcaacgggcacccatatacgttccagagagctacacagagaaacacgaggggggaagaggggcgagagatcgccggaacccgggaaacccaccttcttccgctgctcctgctgcattccgctcccttacagatctctccccccagaccaactcccacagcgcccccctcgaatccgcctcgcgacaaccccaaacgcgccgccactcgaatcccccctgccccccacaaatccacaccgcgcgagtcgcgagcaccgccgctgccggcgcgcggtcggtgatggtgaaggcgatggcgatggccgatggcctctcccgccgcgtccgcctcctcccgatctcgcggcgtccgcctgagaggagcacgagagagaggaaggggaaagaggaagaggaggagaggagtaacggggggaaaggctcgaaatcaaaaggaggggagcggattaatttcgcgagagatggtgtgtgtggattcgtggtgccgtaaatcaaatactgcaaggatggttttgtatgtgcgctccgggccacatgcggcgggtgggatgcggacctcagcaataccctgctggattgctcttcgccgtccgatccgcatcttgacggccatccttctttggaacgtatcaacctcccacaccctccttttattacagttttttttactttttttttaagtgtgaaattgggtggagtacagtaaaaacatattattcatgtatcatatttcgtatttttcttccaagtcagacccgggtgcgggtgcagctagtgccgacaatatatcactcatcatgtaccaaaatttttctttctcagaattagattcaaaacggatatctagttgtgtccctaatccataaataaatatcaaagtaagggatacaattcaattaaagtgttaaaaaaagttcaataatatatatatatatatatatatatatatatatatata

SEQ ID NO: 17837 - DNA, 2596 bp, Oryza sativa
cttttgtaatgtaaaagaaaattgttcttcattgcctacctgccaaaaaaacatcaccttccttcctgcatcaagcagcctaatcttttaataagatgtactacaaagcgacagctccacatcacatgttaggattacaggagacgcgtccatcgatcttacggcacgcaccgacacacacggtgcctcctctgccacaattaattaacaagtaaaacatgctttgacactagtagtgaactcctgcatgatgggagagtttctgtgcgttacaatgtccatctcgctattcatatcgcattagatgtgtccattgactagcgtcatcacaagttgttccaggacactgtccatgctctgaaaattagtgatagcgatcactgattacaggcttacagtaccattcaagtgcacagacggagacatgatggaatctcgtagcagtatcacgttattccagaatctaaatgctgttttccaataatcgataggtgcccatgtgactcgcagtgtgctggctataaagtataatcatgttaattaattcatagtcgttctccaatgacaaatgaaatggcagaaaggggaggggaaaaaaatactatttcgtgtatcaagaagctgaaactactatgaaatatacactatgcttccttagttcctttatctgccttgtagttacataaactgcaaaataggatgctatgatacatgttggtggtggatccacaacaaaaagttgctgcttgtaatcatcttcccaagatcgacattattctagcaagatgaacttctttgggagctactaacccacatgggtgcgagcatcttatattcagagaaatcaagtgattcagaggaatcaagtgaatccatcagtcaatcctctgaagattatatttcaccacgttctcaagggtacttctgaactggctcttgggaaggcactgcaaattttggagagccaagtcacctttctcctttgcaagctcctgcgcccttcttattccaccacttctgtgaaccaagtcgattgcagtagccaatgaatcactttcactgaactcagaatcgattatctcccttagtttgggttcatcttgcaaagcgaatatgactggagctgtcaggtttccctttgctaagtcactccctgctggtttcccaagttgctcagctgattgggtaaagtcaagaatatcatctactacctggaacgagagcccgagattcctgccgtattcatacatttgttcgcatatagtggtgcttacaccactgaatattgcagcagatcttgtgcttgaggcgagcaacgaagcggttttataatagctcttgagcaagtaatcatcaagggtgacgtcgcagtcaaaaagagtagatgcttgttttatctcaccactggcaaagtccttgatcacctgtgaacacatcatctataagcaaacaatgcaggagcacagtcttaatgaagagatggaagtttgctcttcattcattacctggctgatgagcttaataacttcgatgttttctaagttcgctaggaaccaagaagattgtgcaaacataaaatcaccagcaagtacggccacccgtgttccatatagctgatgaatagtttctttccctgaatataatcagatgcgtttcagaataaattggtcaattggttcttaccaatgtccaaagtacatgaaccacccaaaaaggcaaaaagcaaaagaaacccacacattctgccaggcataaagaatatgtataaattgtttctaagaagctatgaaccaaaatgaaaaggaaagaaacagcgatatttattgacagcgacttgtttgtaatagaatgatatgtacctctcctcatgccactatcatctatgacatcatcatgtattaaacttgctgtgtgaatcatctctatgatctctgccaggcgttgatgctctgtagtaagctccctgaattgcaaaaaaaacaaaaggattgagtgcataattgcaaaacacctaattataagtagtagagctgcaacacgagtaacttacaacaaaccagctaattcagcagttgctctggacaccagaaaaactaatgctggtcttaacctttttccaccagcaccgaaaatttgttctgccgcagaaactaaaactggattttctgcaccaacaagctattaaaattatgtcagctagttgctgcggtagcctggtaggtaggaaaaacacaaagaactagcctagcaaatttttctctactcaagtgctcacacactatatgaagcaaattagtgaagatatatgtattcaatatgtaatgctctgaagtatgctctcttaattatacaaaaaaatgatgatctgtggatggagtacaaacaagaaactgttgtagtttttgagggagaatcgtgtgttgtgcagaaccacaaaaaatatgtatattttggtcggagtaggaagactagtagcaaactagcaattcaacaacacgcgagccattcaaaagtattatggagcctacagatataggaaataagagccagaaaaatctgtccgcgtactcctggtgatgctaagtccaagtcatca

SEQ ID NO: 17838 - DNA, 42566 bp, Oryza sativa
  unsure (1)..(42566): unsure at all n locations
atattttccttacaactaaatgaaccaagcatagtagcttaagttgttactcatgatactgaactgatcgaactatagtctgtgagcggctttggtatataaggcgcaagtgccaagtatttactagctatcaagatgctggttctgccagtttaagaatcgaaatgagttaactctgatcatagcttcttcctgattagattcttaaatcttaagtagacttgactctccccatgaccgctcagcgggtcacagttgtaaaagttttttcttctgctaatatatcggcatgcaaggctcttgcgcattcgaagaaaaaaaaaaactagacttaactcatttcaaccatgataatgtatcagacgaattcacagaaagagaaactattgagtaagaaatgtatagcctacatgaatgcatctctatttaacgcaattctgagtaaatcaaacaaaagatgtggccttcagaagaagctcaccgatttcagattattgttgagtttcagcaggtcgtcggagacaacctccaaaagtgaagaaacagaaattcgctcagggatcattgttgttgttctcgcactagaaatcgcctctgctggcacatcaactgcagcaaggcctgcgcaaatacgctaagtcgttagctcagctcactccaaaacacagcggctcaacagaccaataggaacaagagctgcaggatgaagaacctggctggctcggtgaggccacgaaacaaacacatggcatgcgccgcctcggcgccacccgcatgccggaccggccagcccaacggcaccggcaggaggccagctgaccgaaatccagcgccttcctgctcatgtacactctcgggcagctcacagacaacatctcccacaatcagtaccgccaatccaagaacccaaagaaccaagaaatgaagctacagcaacttggagctccctagaaccgacaaattctttggacaccaagaacctcttccccggacaatagcagccaagaaattaaacgaatgctagcttgtgattggtttcgtgtgagaatcttgctcaatttggtggctatagattttttttcccctcttcctttttggaaggaaggaagtggcggctccggatggagggacggagggtgtgggggatttaaatatggagcatgcggaggaggagaaagggggatttgtggatccatgagggccatagaacgaaggcgattgtgtgagctcaggagcaaagcagcgtgtgagctagtcagtctatcactttggagtttggactggctctagaagttcatgtaccttttgctctttggtcccgcacatttggctctaattgcagtttaggactattaggacttgtgaacttttttgtaatacgccttggatttctttatctttgttgtattataagaagagagtttgtatattgcattcacatatattgaaaggagaaaaaaaagacaaaatagcaaataataaattccgttaacgtcagaatttggtactgttctttcctggattcggttaaaggaaaaaacggattagatggaaatgtatttagattagggtgagttcaaagagaatcataataccagggcaaggaaatttcatattttcttagtatatcttctaaataggtaggattatttatttttatttttaggaaatcttattcatgttagagtataaatatgtacacccgagatctttgtaagacatctcctcgtattgatacaattgtatttcggcacatcaccaccctagttgtagtttatgtggttcatattctcgagcggggctgtatcggttaaattcgatatttggcgaatggggtaagtcatgtcaccccgtcaattgtactggtatagttaggactttttcgggttccgctcaatattttgactaggctttatggtcatcaatttatcttgttgtaccggcttcgactaaggctgcatcgttttgatttcttagttagatctggtatatccatcacgtttatatagatctattggctaaatagatttttcttattatcttcaatcttatattgttttggttaggttccaatctattagattattgctaataagtttaattctactaagtgtataggtttttatgcagcgtatgttagagttctagctgatgagttatcattactctaaacttcagttatatgatgtattggttagttagcccgtagatatatctacattggacctccagccaatggcggaaatagggaaagggcagctaggacggctgctctactcctaagcataaatattcatgcatttcaaaaactcataacatgaaagataaaggtaaattataatagttactccacttcctttagccgatgtatattttaaccatcggatctgtatctactacactatatattagtcgattggttcatggtttgattatttttatcatcattgttagttgcaggaacaaactaaccggcacattctgaacctgatttttggcatgtcgtgaacccgatttctaggacctgcactagagctaattagtaaactctcaaaccttcgtgtattggataaatttggtgataacatacatagggctatctcttgcgacatactacctccgtttttttaatagatgacgccgntgacttttaaacatatgtttgaccattcgtcttattcaaaaaaaatttatgtaaatgtatagatataaatcatgcttaaaatactttgggtgataaaacaactcacaacaaaataaattataattacgtaaattttttgaataagacgaatggttaatcgtgtgataaaaagtcaacggcgtcatctattaaaaaacggaggtagtagtttataatgtatcgacgcggtggattgttatcctaacttgacggttaacactccagctaaatgcatgaacgcggccttctctgcagcatggcaagtgatattgttgtagcttctgctttggttgttgaaaagacgatggttcccattcttctctttccaaaatggaatcacgctgcgagaattattacggtgtcgaagcctcgtcaatatggcctgttgattaatttgtttccggacacggtttcaccgccaaaagaagtgtaaaatcaaaggtgttgacggagcgtggggctcctcaccgggagaccgcgcaggcccccctttgccggttcggccgggggcgctaagtgaggttcttcgccctcgatctgaggaacgtcagcgagagaggaaatgcacaagacacgggcgacgtagacaggttcgggccgctgagaagcgtaacaccctactcctgtgttttggtggatctgtgtgtgaaggaatacagagagccggagagcgagagagagttcaggctctagaacccattcgccagagtcccaacccctctgcttcctcttcctcttttctctttttctctttttctaggcctgggcctcctttttatctgttccggggtcaccacatgagcctcctgctgcctaagaaaggaaacatgctttttacaatgagggctagtctacagccggaagtgacctctgacaagcagagcacacgcctcctgccccgctcgcccgcttttccggtggacgcccatttcaaccttcatttaatggccagcgacttccttgccatacttgcgctgaagcctggaatggatctgaccgggactgacataccaactccaggagttagcacgccggctccggctagggacgagagccaggaagctctcatcattccgacgggacggggcgaggcatgtgacaggccgcctgttgccacctaacccgcgatctctgaccggtcacacaccgcgaccggtcacggaccggataagcgtgcgctgcgccgcattaaatgcggcgtggcgcgctcgtccaacctgctataaatgcggttaggtgagcccggtgggctcacctaacccacacacgtggcgccaaaaccacagggggtcggggcgccccagccctcggggccgaaacgggagcggcccgacccttcggggagacagagggaggggtggccacgtcaccctcgggcccgacccccctgagggggtcaggccacgtgggtgaccgcggctacccaagcctctagtcacgataccctcggccccatgtcaccgacagtagcccctggcgttacgccagggcgatcgccccccttgagggaagcgctcgggcgtgacgccactccttaggcccggtgacaggtggggccggtccctacaggcgggcagaaacccagcggtcgcaaatcgcgcgcatcggcaagggaaaaccggccgacaataatgagcggcctcttcaagaccgctacattactcgagcagcgcgcgaatcgggacgagccggttcgtttcgccagggaggtggaggaggagcgggagactgccctcatcgccaccgccgtgctcgacgaggcgcgggacgacctccgcctccaatacgggagccgggcggcggagctagaggagaagctcgacgccgcccgggaagtccttgacgccgccgctgcccgggaacggcgggcggcggagaacgaggcggcgtcccggcagcgcgaagaggcccttgaggctcgcgccacggcgctggaggagcgcccccacgccctggacgcgaaggagagagacctggcggaccgcgaggccgccgtcgccacccgggaggcaacactggcgacgcacgaggccgcctgcgccgaagaggagtccgcactccgcctccgcgaggacgcgctcaccgagcgggggcgagctctcgaggaggccgaggccgcgacgcagcggctggcggacagcctgttcctccgcgaggcagcgcgggaggagcaggcacgccgcaatctggaaggcgcccgcgccgagagggccgcactggatcagcgggccactgagctcgaggcgcgggcgaaggagctggacgcgagagcgcacagtggcggggcggccgcgggccacggcgacctagccgcccgcctcgcagccgccgaacacaccatcgccgagctgcagggcgcgctggactcgtccgccggggaggtcgaggccctccgcttggcgagcgaggtagggcctggcatgcttcgggacgccgtctcccgtctagaccgcgccgggcggcaggcgggcctctggggcgggcggtacgcgaagtacgccgccaaccaggggggcctcgcccagcgcctctcagagatggccggggccctcgagcggctccccgaggagctcgaggagacgatcaagtcatcctcgagggacctcgcccggggtgcagtggagctcgtactggcaagctaccaggccagggaccctgacttctccccgtgggcagcgctggaagagttccctctcggaaccgaggacggcgcgcgcgcgcaggtccgggacgccgccgaccacatcgtccacagcttcgagggtacggcccctcggctcgcgttcgcgctcgactccgacgaggagggcggtgacgacggtgcggacgacagcgacgacgaggccgacgacccgggcgcgtcggagtgagcccccaggcccccgccaatcttaataacttttccttcttcttccgaggccttcgggcccccttcttgtatagactgatttaatctgcaatcaagtaaagaggaaatttctgcgtcagttctgtttgttgtgtgtatgagacgaggatggtctgtgccgcggtccttctgtgtcttggcttgaacaagggctcgtgcccaggtcccagcctcaaacggcgcgggtcggggcctgcgttaccccgatacgctgatacggatacggatacgcgatacggtgttaccgggatacaccgtcttcctaaaaacatggatacggggatacgcgaatatatacatatatacaatttaaaaatacaaaaaaactaagtgtgaaatatggacttaaaaaataggaatcacaacacatgtgttcttcaaatagatggtagataaaattgttcacatagtagataaatcaacagtagagcatcaccacagcgctaaactaattagaattaattaacttgtccttgacttcaaattcaactcaataactagattgcaagactagataaattgattgttgatttcatccattggaaccgaagtggatgaaggcccgttatcgccttgtatgtccaatgcaccaagatcttccagtagtctctcaaggtcaggctcatcaagtgtcagttcagcttgttgaagaaaatcagcaccaccatcaaacaactcatatctatctcctgcaacatcccacattattgatgggccactgtagtattcttcagatctcctagaaagaagacgcatattttggtgcacaaacaccaaatcctcagcacgtgcaggcctaagactaaaaaaaatgcaattgtgttaatttcatgcattactaacatacaggaaactaaataagtaagagaaggaactaaacttgtttctcattgaactatggatgaaaccataagtgctccagtttctttcggcacaagaagatgatgttggctgtccgtaattttagtgccaactttttaagctcaggtgcagagttaccatagattccccaccattgctttgcattcatatgggctctatcctcaattgagtcaaaggaattaaacccactgccaaacaatgagaaatatgcaaattgttgtttgatctttctcaagtcatccccagagaaatatcttctaaaacacttatttctcatatctgaaatctcctcatccatatgaggggcttggcggtttggagcctcctccaaccaagtctcatagtagtacctacatgttgtaaaaaagattattgagctgctagcaacaattataaattatgcacataaaaattgaaaagaggtagaacatcattactttgggtttagtgaatgtgctaagcaatgcaagggggtagtactttttgcccatcggaagtgtaagatctcattcacatgaaagaaaaaagaacattgctcatctagttctttcccttcatgacgatagatgattttttttcaccttatctatcatggaatcccacatctcatagatcaaatggaggcatggtttgtcagtgtcagcagcacgaatcatagagtagataggctcacagaaatcaatgatatatttcactttatcccaccataaatcatttaaaatcttctccttgacatgttgtgcttgaacttgattgtcctccctataggcattccatttttcactagccaccatcaagattaagttctctttgatagcacgaaacctcttaagcatcacaatagtagatgcaaatctagtatcagcaatggcaagaaatttcagcttactaaaatcattgaacatggagagcctcattgagtgattcataatgaaattctttatggcagatgcatctgcagccacttcactaatccattggaattctagaaaagcatccccactagagtttttggcagcacatatactcttcaaggctaagttcaaagtatggacaacacatggtgtccagaaaatgtggctgtacttttgttcaaccatcaatccagcagccctacaattagatgcattatcagtaataacttgcacgacattatttgggccaacctcttcaatgatggcaaacattttctcagcaatatattccttcctcttgatttctccttcagtatagattgcttttaaaaacattggtccatcttctgtcactgcaagaaaattcaagattggtcgcctttgagcatcagaccatccatcagatacaatactcacacctttcgtagaccatgttgacttgacagcattcagcaagcgctcaacatttgtcctctcttgaacaagaagtgttgttcttaatttgttgaaatttggaggggtataaccaccaagttggttgttgcaagcaaactggaaagccttcctgaaatatggatttcttgcaacattgaaaggaatacctgcaaaccaaatgcacacatataattagttgcacgtcataaacaaaacaaaattgataatgttagaactgaaaaaaaaacatgctatattctgacctgatgtatagaacatcctcgcaatcaaagcatcaagcttggcacgagcatctaaattgaagcttgactcaatagctgaaacagcccttctcttccccctactcacactctctgttggtagtgggatgtccttaggcaaattccttgcagagattgcttcagctctagtcatttcatcttgaagttgcccaagtatatctactgtcacctttttgcatgtagccacaccaattgttccaattttcaagagatgtgctttaactcttgagtaactcccatggataacttggttacaaaactgcatctgaaccttgcattccctccttgacctttccctgtcttttccagcagctcaacatacctccacaagggcttcttttcatcatcattgggtggaatcacacgagcagcattcaaaatgctccttgcatgccctcccattgttgaaccactcccactagatggtctcgatgcatcaaaaccagtattaccactaggattgctagcactaccactatcatttgagcttccacttctaaaatccattgaatctaccaaagatgacagcaattatactaagaaaaattgaaccggaacactacgcacagtgcagatcaaacttggaggggatattcacttacctaaggatcctcagcgtcgtcggaggccgggatcgaaggaagccaacacggtgctgggcgccggttggaggcttggagcgggcggcgcggcaccttgtggaggaggagtcgcggaggagagcgcagaggagggggcgctgtgccggccgtaggcggcagcgcggcgcctgccgctggcggcggcgaggcggcgcagcgacggcgtaggcggcggcgctgagatggggatcggggaagcgaggagagaggggcagcgtgagttgtgacttgtgagagcgaggggcggcgcgggtggaggaggagagcatgttttgttcctgtgcgatgcgatttagggttaccccgtatcaggtccgtatcccaccgtatcgggagaatatccatatttattttaattatctaaaaataagaaaaatgagggatacgtatgggatacgtatccggacgtatcccgcacgtatccgtatccggaggcgtatcagatactgatacgacggtaatctaccgtatcagggtaacgtaggtcggggctagtgcctggggagatcctcgtgtcgagactggccaggccgggagcgcggtgaccgagggttatggatgacccgattgtgggcctttgccgattcccccccggagttcaccacgccccggggcacggctcggttctgggccccgtttggcgattttagccggcccaggccactgagggcagggtcgagcacgagcgtgctaattcaagccaagattcttcaaaaggaaacgatggcacagacacagtcctcaggaaatcgaaaatgcttttattgaaatacggaagagaaaaaaaggtaagtatatgcatgtggtagcccccggccaaccctgcacgcccggggggggtgcggggttggcccgagcccgagacatgacacccgacccccactaggggtagaagcggcaaaggtgttcgatgttccacgggttaggcagctctgtgccgtcgcccgtggccagccgaacggagcccggtcgggggacgccgatcactcgatacggaccctcccacattggtgagagcttgctcagtccagcacgcgtttggacgcggcgtaggacgaggtcgtcgacgcagagtgatcgggcccggacgtggcgctgatggtagcgccgcaggctctgctggtagcgcgcggctcggagggccgcgcgccgccttcgctcttccaaatagtcgaggtcgtctcggcgaagctgatcttgatcagcctcgcaatacatggtgacccgaggggacctcagggtgagctcagatgggaggaccgcctccgcgccgtagacgaggaagaaaggcgtttccccggttgctcggcttggcgtggttcggttcgcccagagcaccgctggcagctcctcgatccacgagtcgccgtgcttcttgaggatgttgaaggtcttggttttgaggcccttgaggatttccgcgttggcgcgctccacttggccattgcttctggggtgggtgggggaggcgaagcagagcttgatgcccatgtcttcgcagtagtcaccgaagagctcactagtgaactgggtgccgttatccgtaatgatacggttaggcaccccaaaccgagcagtgatgcccctgatgaatttaagcgcggagtgcttatcgatcttgatgaccggataagcctcgggccacttagtgaacttgtcgacagcgacatacagatactcgaacccacccggggcccgcctgaacggacccaaggatatcgagcccccagacagcaaacggccacgaaagaggtatggtctgcagggcctgggccggctgatgggtttgcctggcgtggaactggcacgccctgcaccgccggaccagatcgaccgcatcgttgagagccgtcggccaatagaaaccctggcgaaaggccttgccaaccaaggtgcgtgagacggagtgggctccgcactcaccttcatggacatcggcgagaagctcgacgccttgttcccgaggaatgcacttcaggaggactccgttagccgcgcgccgatagagggtcccttccaccagcacgtagcgcttggagatgcgccggacgcgttcactcccttcgcggtcctcgggtagagtcttatctgcgaggtacgcctggatctcagtgatccaagcaatcaatctaggggagctggaagcgctcccctcgggtcccgaggcctagactccgacgggcctcgggggccgttcaggcgcgtccgtctctcctagggggtcgggtcgcgccgacggctgggcaagcctttcttcaaaggcgcccggtggggtctgggctcgcgaggaagcaagccttgagagttcgtcggcgaccgcgttatcccgtctgggcacgtgccgaagctctatcctgtcgaaatggcgctccatacgccgcacctggcgcacgtaagcgtccatctgcgggtcagagcactggtactccttacagacctggttaacgaccaactgggagtcgcctaacaccaggaggcggcggatccccagtccagctgccactctgagtcccgcaaggagtccctcgtactccgccatattgttggtcgcccgaaagtcgaggcggaccaggtatctgaggacgtctccgctcggcgaggtcaacgtgacccccgcaccggcgccctgaagagacagggagccatcgaactgcatcacccagtaggcggtgtgaggcagctgcgtggggcccgagctggcctcgggggcggagacgggctcgggagctggggtccactccgccacaaagtcggcgagggcctggctcttgatcgcgtggcgtggttcaaagcgcaaatcgaattcagagagttcgattgcccatctcaccacccgtccagtaccctctcggttatgcaagatttggccgagggggtaagacgtaactaccgtgacccgatgcgcctggaaataatggcgtaacttcctcgaagccatcagaatagcgtaaagcatcttctgggcctgagggtatcgggtcttggcgtcccggagggcctcgctaacgaagtagacaggccgctgcacctttcggcggggccgatcctcttcgccaggggccgcatttccagggcgctcttcgcccgagaggccacacggggcgcactcggcttctgtgccgacgacctcggggtcagagagcgacaggcgcggccttcccgcagtggccctggggccgtcctgggggtcggggacgcctggcaccgtcggacaagcaggcggagggccagctccggccgtcgggggccttgggccgccgttcggctcgggggcctctcctccctgctctctcccgggtcgagtcgacacagggtggggatgcgcggagtgagggttgtcctcgtcgcgctccacgaccaacgccgctttgaggtcgccatggacggtgatggggccaccggggcccggcatcttcatctggagataggcgtagtggaccgccgccatgaacttcaccaacgcgggcctccccaggaccgcgttgtagggcagactgaggtccgccacatcgaagtccacccgctctgtgcggaagttggcggaaccaccgaaggtgaccgggaggtcgatatgacccagcggccaggtgtgccccggcgtcacaccgatgatcggctgggacggccggagcaccatccccggggccttgatggcgtcaaaggctgcgggggaaaggatgttgagggctgctcccccgtctatgaggacacgccccaacttcacattgcaaacggtgggggaaaccaccatcgcgatctgtcctccccgggcaacgcacgacgggtggtcggtctggtcgaaggtgagggcaacctccgaccaccgcgcccgccgcgtcgcctcatgggtaggggccgcggccagaagctctcgcttcatggccttgaggctccggcgagaagcgtgagcgcacgctcccccatcgacggtggcgacggtggcctcaggctcctggaaccccaggtcatcgtcgccatcgtcgatgtcctcggcggtggccttctgcttggcctcacctcgccggttgccggcgggagccgccggggtcttgccctcacggcgctcctgcctcttctcctcctcccacttcctcgtccgctcagccaaacttttgaccgcgcggcagtccacgagatcgtggagggaggtgttgtgcacggtacaccacttgccggtcgggcgctccctgctgggagcgccggcctccttctttttgtcgctcgcaggcctcccctttcggggagcccgcgaagcgccctcgacggcgaggacatgaccctcgtcgtcggaacgggccgatcccttcttcctcctcctgtcccgccgccctgaccgagcggcggacccgggggcagccggagctgccacaccagaaccggaggagttccaggtccaggcctcctctttgtgagccacacggtccgcgagctcaaaaagctgcgcggtggtctgggactccttggaggcgatcttctcgagcatgcggttgtgccgcacgccccccctgaacgcgtagatcaccgcgtgtgcggggatgcacggtatggtgttgcggacttgacagaaccgctgaatgtacgagcgaagagactcatcgtcccttcgctataccacatgcaagtccgcttcttcgcctgggtgcggatatatgccctggaagttcgtggtgaactgctggcacaaatcctcccaagagtggaccgacgcgggtggcaagttcattagccaaccccgcgcctgacccttcagggccatggggaagaaattcgccatgaccctgtcgtcacccccggcggcctcgatcccggtcgtgtagatctggagaaactcggcggggttgacgcttccgtcgtattttttggtgatggtgggccggaaccttgggggccaacggacgttccgaaggctcgccacaaaggctcgacagccggcaccgccaaccggggacacggggggccggcccccgtgcccggaccgaagtggcgctccggacgaggaagcgccctccgttgcgtaggcggcgcgacgagtgtcgtgccggcgctcgatatcgaggcgggcatccggccccccacgcacatcttcttgggttggaggcgttgacgagggaatggcagacgaacggcgggtaacggccgccgctcgccgcgccctccgcctcgacgacatggagccggtggcggcagcgccagaggcctcggtggcggaggaccgcccgccggcgcctaggcgctgctgcgccgtcatgaccaagtcggccacgtcatccagccaacgtcgggctggagtctctggatcggggacgacgggcgggtgacgcaggagcgcgcccgcagcctggagcgcgccctggggcgtgccgccatcgccgtagacgaggcggcgacgcgccccgtcccgccgtcctcccccgtcgcccgcgggcggcgaagtcgcggatccttcgacctccccgagcgcctccccccgcccaagatttcggtgagagggggacggtggggtgcgagcccgacggcgcgggttctgctccccgtcgtcaccactagcgttcggagggaggctgtgcgccactgcccgttcggccattgggctgagcgggagaagcttggcgcacacgaaagaggacgagggcttcgaaagacacgcgcgccctctacctggcgcgccagatgacggagcgtggggctcctcaccgggagaccgcgcaggcccccctttgccggttcggccgggggcgctaagtgaggttcttcgccctcgatctgaggaacgtcagcgagagaggaaatgcacaagatacgggcgacgtatacaggttcgggccgctgagaagcgtaacaccctactcctgtgttctggtggatctgtgtgtgaaggaatacagagagccggagagcgagagagagttcaggctctagaacccattcgccagagtcccaacccctctgcttcctcttcctcttttctctttttctctttttctaggcctgggcctcctttttatctgttccggggtcaccacatgggcctcctgctgcctaagaaaggaaacatgctttttacaatgagggctagtctacagccggaagtgacctctgacaagcagagcacacgcctcctgccccgctcgcccgcttttccggtggacgcccatttcaaccttcatttaatggccaaagacttccttgccatacttgcgctgaagcctggaatggatctgaccgggactgacataccaactccaggagttagcacgccggctccggctagggacgagagccaggaagctctcatcattccgacgggacggggcgaggcatgtgacaggccgcctgttgccacctaacccgcaatctgaccggtctgtgaccggtcacacaccgcgaccggtcacggaccggataagcatgcgctgcgccgcattaaatgcggcgtggcgcgctcgtccaacctgctataaatgcggttaggtgagcccgctgtgctcacctaacccacacacgtggcgccaaaaccacagggggtcggggcgccccagccctcggggccgaaacgggagcggcccgacccttcggggagacagagggaggggtggccacgtcaccctcgggcccgacccccccgagggggtcaggccacgtgggtgaccgcggctacccaagcctctagtcacgatacccccagccccatgtcaccgacaggtgtttttgattattattctatgataaataattgggcattggagattattggttttgttatttagattttattcacgaagtggttttggagatgatcggatttacaggtgatcgcaggatctatcattttatgtggactggtcagaccgggctctggtagccggtcagaccggtgtgtatcgcgcggtcagaccggcgcagcccgcggtctgaccggccgacactgtgtcggtttcggtttcgggttgtttatttggatatccgagtttatttcatgattatgacttctagatggatactatacgtatgtaatactattgtttgctactaatgagtcaaattggagatagcttggtctcggaatatggtttctttgtttgttccatgtgtaggtgactcgatgtctcgggagagtatttgcggtgatggaccgggagtcggcttggggataagacgacgtctgtggtggtcagagatcatgcgggatacttaggctagagttgatgcacgtgattgatggagattccatatggcatacgatggagttattgtgtgcgtatgggatgcggagtcgaatttggaaggagtccaaatttggtacgattgattatgtaaagtttctttcttgtactagtggatttcctagggtgtttaggactcctagtatgagtttggttcgtggctttaggctgcctacctcatgtataaatagagggggagcgtgaggcttcccggtatcgctttagagagcaattgagttgagttttgagttagggtttcgagtttagtcgaaattttcgtaaggagtgctgttggtgcactttgtaaacacatagagaatcaataaagtcgtcatctactttaagagttcttcgatttgtgtttcaccgggtttcggcggtctaaccggcaactcaccggtggtcagaccggcggcattgcggcggtcagaccggcgggagcacggcggtcagaccggcggcggcgacagcgagcggcagctgatctcggcggtcagaccggagatctaatctcggtcagaccgacggcaaccaggcggtcagaccggcagcgagggtaacttttagttccgctaaaagttttcggtttttgggtataccaaccattcacccccctctggttggcttagttcttgtgattcaatcctacaattggtatcagagcctggctaggttaacatctctggcccgatggacacttgtgaaggcctgatggaccgtgggtgcctgcgggacccgtatacctgatggaccgtaggccagtgggggcccggatacggtgaaggggcggtgaagggctgaggaacaccaatgtgtgaagggggagattgttgaatagtcccacattggttatggaagtgcaaaggatctaagatataagtgggggagcccctcacttcaatggctagcttttggggtgggaaatgtcctttacgattctataagaaggactgcgctggaagggaaccactatatgtttggccgatgacaccaaggacgagccaccaaaattagagtgattccggggagccaaccagaaagtggtctagcgtctcttcgtgtttatcatagaagggcacacttcgccgaggtgagggcaaagccctgctcgctgagaaggggaccacctatacatttgtcgacaaattttctactaaaaatttgacagatgtaattatagtacaatcgtagtgtaattacaatgtaacttgtatgtaattacactgtaacttgcatgtaactacagtgtaacttgtatgtaagtttcacgtaattttgaatcgttagatctattacaagatttgttctatggaggaagaaaaaaatcacatcacacacatatatgaaagaatttgttcccacgacctctattttactgaaataacatgttaccgagagattcttgaaagttacatacaagttacattatagttacagtgtaattacatgcaagttacagtgtaattacactacgattgtactgtaattacatctgacaaatattagggggagaaatttaatgacaaatatctagcaaaatcgtgctggaaatgcgtatattaattgtctactggccatgagcaggccagctgcgcgtgctgtgagcagagtctgcaacagaaatggatccaaatggccaacggaacggcgacgacagtagtgaaggaaggaacgtgtgctgggagaaggaccgacgtggacaaacgcggatggctagcgaggaagtgacttgggggccgatattcatccccgcctagcctatcacgtcgctgccgtggcccgtcgccttcggcttcggccggcagcaggcaggctactgtagtttggccttggaaacttggaaattggccgcacccgcacgtacgccgggcgcgcggtagtggacgttctcctatgtaataatcgctctcatgcgatgcgacactagagtggcgttggtgccaaaactctcttccgagtcgttcgttccggccaagtcgtcgtatgccgatctaccgcaatgctatgctagcgaggctgcatgcgccgtggttgcaagcccgcacgccgcacgccgtggctgccggagcattactggagtgatgaccaactgagccaatggcaaattgacgtggtgcatgcaccgacaacgacggacattagcaatgacgcaacgcgagcatcgcgatttttcaatttgttaatcttctcagcatcaaatccggcagtgacataaataagctgctctggccctctagatgatgcatgaacgctgtcgcaaagaaacgagcttaatttcagttgactccatcgatatttttttttctgggcgtgcgtacgtggttgggtgcacgtatcatgcatacggacggcatgtgtcggaggctcggagcatgtactgacgtacggacgggcgctgtagtttatgggcctagcgcatgatgggctattatgggcctgatcgaaaagcccagtttaggacaaaacgaggttaactgcaaagctcacacgaatttaatccaaaattaatcatgttaaaataaatctaactaaaaataatgagaaagtccgagaagtattattgacaatctcacaaattccaaaaaataccatcgataagtacgagttccatgaaataccattatgccagaaatgttattgctgttggggttccgttagcagcacttcgttaagtgttgtaagataactttaacgacgttggatgaatggaatcctatcaataataatatttctgggaaccggcaaatcacaccaatcaagatgtaacgcccaaaagagaggcaagcggtaacacacggttgagacaaatagacaaatggtccacagaggctctaccgctctagaggtgtgattttaattttgaggcagcacaaatggaagaaaccgtttagtgaaaatttacactatcataaaatatatcctaacagcagcatgtcacattctccaccttccctaaatccttgagagcaaactttcggttacagaatgctttttccttttccaccaagccacaaaattaaaatcacaccttcccaatcatacctcttcctcccgtactaacccaccaacaccacaaaggcagaaacagtcccccaataatcgaccaacaaaaccgagtccaaaagaaatcaaatccagaatcatttattcattcaccttttgtgcaccagcagttcatgaatccccctgactcggtatatgtgacactgtgattgtaccaagggaaaaaaagaccgagcacgacacgacacgacggggtcccggtccaaaccaaaccaagccaaactatataaagggtctgttcagatcccaccttaaaattttacaccctatcacatattaaagacctactctcctcgttcttaaaaaaaaaaaagtgaatctaggactgaatgtgatatattatagtacaacgaatctggacagatgtatgtctagattcgttctgtccagatttattatactaggatgtatcacatcaagcactagattggttttttatgggacggatggagtatatgaaatattaaatatagaaaaaaaataacttatgactaatttgcaagacggatcttttaagtataattgcaaatgatttaacaatgtgtttgctacagtaaccattttctaataacggattaattaggcttaataaattcatttcacagcttactgacggattatataattaacttttttattagtaccaaacatcttatacgacactctctatagtaatattcgatgtgacacgtgagtacgtgacgcctgatctaaacaccccaaagaaaaagaggcgaaacgaagggaaaaaggagccccatccccaccaaacgcaacaaccaccacatcccgtcaaccgatgcaaccaaccgcttcgcgtctcctccccgtcattctcctgctgcgcctgcctctgccgccgactccccgctccgctccggcctccctcccgtcccgaccgcgaccagccaccgcccccgtccctcccgcgcgcgcggttgcttcagatctcctcttcccccctccctcacccgccgccaacccctcccgccattacgtagcagtatataaagtcctatccccatcaccctcccatttcgctgcttctccctccctacccgcgccatggcctgctgattgctgctgctgctgctgctgttgactcgtctcccgtggatctggatcttgatccccgcgagaggaatggaggtcttcggccccgtcacgcccggccaagtaagcgcgtgcatcccatcccccgccgcgagaattttgattttcgctttgctgtttcttctaccccgtttcggtttcctccgagcgaattccggcgagggtgcgtgcagtgttcgttcggtgcactacagtagtatattcctgtggcggcaagccggcggcaacggagtgcggcatgtgtatcacgagcaatttggtgaaggttcttatggaatttttcttttttaaggtttctccttcctggattcgtgagagaattgcgtgcctaatacggcgcgcttgtcacatgagcgctcacctaaccgctgtcctggccttccgtcccctcggaggtgtcttagcttccaagctagtactaatttagttttaacttcgcatgtttagccaaattgaatcagatttttgatgcccaataaaaaagttatgacttagtgaatgttgtgaaggggaatagaattcttgtgtctgtatgagtgatctgtaagtcgccgtggttgccatttctacttccattcttatatgacacttcgactgacgtttacaatctgaatttttaggcttagtgatgatacttaaattaaacaaacatcgctgcaagttaagctcactgtctggctctaccatggatgaacataactccatgttttcatttcttgcaggtttcgtttttgctgggtcttttccctgtcctcattggatggatctacgccgaaatcttagaatacaggaaatctttgttgtatgggaaagtgtaagatttctttctgaatactataattttatttagctttaggaacttagagttggttgttgatatgcatatattcgaagtcaactgcccaccattgctcctaataattgaatcatgtaaccagagttttcgtgatgaaactggcatgacatatcttacttcatgcaaatgttgaaaaatccatggtctaatctcctcctatccgggcattcttttcatctgcagtcactcggatgctaatttggagaatgagactatgaaggaagatgataaggctgtattacttgaaggagggcagtcaaaatcgccatctacaaagctccgaaacatgtctacaaaagcaaatttaatacggtactgtttgaatgcataatgcacagtttttaggattttagcaaattctattgcagttaagtgatgtctcgatgtggctgtgagttgcaggtttataacaatggacgagtcttttctgcttgaaaaccgtgctgtgctaagagcaatgtaagactattcagagctaattttttccactctagaatttcgtgctaagacgcacaccctttaactttcttgcagggccgaagtgggcattattctggtctacttttacatttgtgaccggacaaatatatttccagaaactaagaaggtaaccatattgctccttttcttactcttgacactctcaatgatgtactatatggagtagatgtaaactgcaacatgtagcttttggctaaattgtaactgtagcttgttccacatccctggggatagttcttactgttttttataatctaccatatcttgtttcttaattgttcttcctgcaattaattcttgcaagttatagggacttttctgccttagtttcagtgtaggcttatctctaaaacaagatagagaccgtgagttagggctaagtaggtgacatatctgttccttatctagttatctgactggcttaagctttctgccatctcatacagacagaactcatagccaatggatgtgagcatgtggcttgtagaaaggggataggttataagtcggggatcggggtcttgttggccaacttttctcgttgatctaataagctagaatttagggatttacctcaattaggccaaaaaagcattatatgatgttcatttctgcagtatatagtaatctttgtgttgttttgacagagctacaaccgcgacctgtttctgtttctgtacattcttcttatcatagcatcggcacttacttcacttaagaagcacaatgaaaaatcagctttcactggaaagtcaatactctatcttaatcgtcaccaaactgaggaatggaaagggtggatgcaggttagtgactttacttcactgcttctgttcttttagtaaatgtgatttcagttatttctgtactgagtttttatagcgcatggttatcatccttcctgttttgtacacgcaagcaatgtactttgatgtttgttcaccaggcattgagttagaaaaaaaaactctgggtattcttatccaaatcgtgctctcagttttatgtcatgcactgtttttatttggacaagccctatgttacagccatttcatgcctcagaaatttccaactactgtcgtagcacttttatattctttctcgctgttgtattatgcaatccttttagtacttgtatgttggctttaagtgtgctataattattttatctgcctttccaggtcttgtttctgatgtaccactatttcgctgccacagaaatatacaatgcaattcgggtgttcattgctgcctatgtctggatgactggattcgggaatttctcatattattatatcaagaaagattttagcattgcaagatttgcacaggtttccatcctagcccaattatccaatgttgtttcttaccccttgatttgttgtaaccatcttagaaatactaaagaccatcttttaaatgcagatgatgtggaggctaaatttctttgtggccttctgttgcattgtccttgacaatgattacatgctgtattatatatgtccaatgcacacactttttactctgatggtatacggatcacttggtctgttcaacaagtacaatgagaaaccatctgtcatggctattaagattgcttgctgcttcttgactgtcattttgatatgggaaattcctggggtatttgaatttttatgggccccctttacatttcttctaggtgagttatgcatgttttctgtcttagcattattctcattaaccatggataggattttacaccattttcctttcatgtacaggatataaggatccagagccttccaaggcaaacttacccctgctacatgagtggcatttccgatctggccttgatcgatacatatggattattggaatgatctatgcttacttccaccctaatgtaagtaattcggttatggatccacatttcctccctttggaactgcatgagtgagcagtacatataccgtgttcctttcatacatttcttcctagggagttctctcttattttaagaatatgttccttgtttatactatatattaatgtagcatggaatccgctatctgaaataggttgaacgttggatggagaagttggaggaatctgagactaaggttagactgtttatcaagggagccattgtcactctttctttgacggtaagttgcatccatcttttaccaatgcacagactttctatattgtcaagatgacatacttgtttgctttaccaactagatttgcttttgttttaaaccatgatgctgtattgatttcaaatgctgtactaactaggacttctgttcctcattttaggctggttacctatggtatgaatatatctacaggctagacaaaattacatacaacaagtaccatccctacacgtcatggattcctatcacgtacgtataaaaaacactaccatgattatatggcatgtggtaaattgtttctttaattgaatagacactttcagcaaaaagaaaacattgaattgacacaacaccgttgttttacagtgtttatatctgcctacgcaactgcacccagcagttgaggagtgcctccttggctcttttcgcgtaagcacctaatataatgatgtttctttttctttattggctttattttttactaagattttaacctgttttttcaatagctggcttggcaagatcacactagagacatacatttcccagattcacatttggctcaggtatggtatcaatttttttcagcatgtgttactgttgttttaattacttaatgcatgaccgttcaaaaaaaaaatttacgcatgaccagtccagtaatcagctctgcatctgatgtcaaatgtatgaacagaactacgaatgaaaataaacaagcaatttgacgggttgtgtattcagctgcgttgacttaacctacttggtgtaacacctacagctatcataagaactatgatagatttagatttattgatgctaacattgaaaatatattttctactttcaaagagaattcggaattcaaattcaagaaaaacacaagaaatgaagatttctggattagaatacatgtcaaaatttctttctaatatgaaatacgtctaggatttgttggcattgtccactctattgtgtccagtgtttttaattttaagaactggaaccacggtgctgattcttattttacaggtctagcacgccaaatgggcagccaaaatggctcctatcttttgtaccagattatccattgcttaacttcatgcttactacagcaatctatcttcttgtaagtgaacctgcccagggtgcattttcattcaaaaattataatcatcgaagttattaattccatgatgtatactgcagctatcataccgggtgtttgagatcacaggtgtactgaagggagcttttattcccagtagagacaacaatcggctatatcaaaattttattgcagggattgccatatctgcatgcctgtatttctgctcacttattcttgtgaaaattactattgtataggtaaacagctggaacctactatagatacttacggctttcacatagtctgtctctatatatcccagtttcctcagtattggttccacgtgattacaggtagaattgccaagtaaatgaccttgatagaaggtcgttcctgaaaattgtgtgcttggtatctggtggtaagatattcagctcaggcctcaattccattttgcatttggaggtaaagatacagttcccatgaaggacctgccgatcttctagttgggaattgaattgccagaggatgtaggtatagaagtcaaattttgatttatcatttcccccatttaaaacactgtacacagttagcgaagttgtgcattctttgggagttgtagatgctttcctaagttgatacaacagtgtaagaatttcctcccctcaaagcactgtaacatgtggtgtactatacagaatgatactacaaggaagggtttcccttttgtaaaacgaaatataaagggcaagccccaatctttctttctttctttctccttctccatatgcatgcagcatggtacttttggtttatccattggaccaccctcgtactcgttcaccggagcttcagctacttgaggcgctaattgattgatgacctgtgcttttggacctgatcctgcgctttttggaccagctaaaacgatcatgctgggaagtgggagctgcttgggagtacagatccagctctgcaagtctctgaaatttttggagctttctttcagttgacaaggaaataaccgttaaccgacaggagccgtacgtggagactcgctggatgcatgtgcagaactctcgtggattattggcagaatgccatcatccgccaaggccaaaaggccaccgtgcacaggcagccgcacagtctcagccgctagttttgagggaccgatcgagacgagagaccaccaccgcgccgtgcgccgccgcgccgcgccgcgcgacgccgtggcgtggcgtggcggggactacaggcttggcgcaccagaaggcagggccgcaagcgcaaagggtggtggtgtgcatggcgttggcgcccacgccgcccaccggttgttgcccaacttccaggtaggaggtgcgcggcggcgcggtttttctccagcacaggctggctgcgcgccaaacaattaggatatgggtattagctgctgcaatctgacactgaggtaaacgtttgtttgtgcataaacaaaacttgtgtggtctatcaatattaggcacatacaaataacatttcaatatgatttaataagataaaaaaatatgttattgatttcgattctttgaacatgtgttagaggacgtatccatgggagtatgatgtggcatatatagtggtgtatgcgtaaatcgtttattctaaaaaaacaatttgtgtatccatcaaactggttaaaatactctccaataaaaattggataaaattttagatacttgtgacacgttttttaagatgctaaacggtgtatttcactctaaaatattaaattaatatgtttttcaagtttataataattaaaactcaattaatcatatgttaataccatcttgttttgtgtaaaatacttaatcttcgtcatttttaggagaaaagagcatcacctagtctagtctaacatatttgagccaatgtgtttgcgaggaaaatatcatggaagatgtgagttttttagaggtggaagccgaggattacaaggtagtcactggtcagattagcggcttgagttgtgtgatactgtgatgaaatggccggtgatttctgtggtggtagtagtggcttgtgggtccaaatcaataaatcatcatcatgggacaaaataaactagagatcgccagaaaacaggagaaaaatgaccatactccccctgcgctgcgcagccccgcgcgaacatctgcaagctgacgaaatgaagcatcaaacacctaacccaaaaactaatcgcttccgacgttaagcttctccattaaataacgcgcgaaaaatctcaaatctccctcacttacaatcaccaagcttgcttgcctcgctggccttccttgtctccttccacccaccaatggaggctcctctccacctccccctcgccaccgcctcctcctcctcctccggcgccaccgccgacgagtcttcctcctcgccttccaccgccagcatcgtcgcccgcgtcgtggccgtcctcgccgtcgcttctgtctcactgttcgcgcggcacgaggcctctaaaggcttccacgtcgacatcgtcaacgccgcgccgcgcgacaccgtcgccggccggcggttcgacctcttcttcgtgtccaatggcaaggcggagcgcatcctccactacgccaaccgcggcgtggaggcggcgctgttcccggacgcgtcgttcccgcgcaagcaggtcacacgtgtcaccgtcaggatggccgggcacaacctcaccgacgacgacgacgcgacggtgatcgccgccggtgtggctcccggggagtacgtcatttctctgagccccaggctcatgcaccccgccagcgacaaggccgccgacgccgtggcgaacgcggtgcgccgcgccgtggcgcgcatgtggctgtgggacggccgcggcgccgctccggcgcgcgtcacggaggccatggtggactacctctcctccggcgccgacgccgtcgaggcctcgccggctaacgacgacgacgacgacgacgccccgcactgcatgtcggcgcggttcctggggcacctggagcgccgccgcggcgggttcgtcgcgcggctgaaccgggcaatgagggaccggtggagcgacgccgccatggacgccgcgctcggcgtgcccgcccggccggtctgcgccgcgtaccgcgcggcggcggcggcggcggcgctgactcagcagcaaccaccggccgcgctggctggctccacgtcagccggcgacgggtccagggtggcaatgtgaggcagcaagcaaggcaagggcagtttgggtatcacgcatccacgcgcgtcgcttcccatgtaattaatccactattagcgacgataattaagtatggggtgggtcattacctcgcctctaatcgtggttgaaggcgaattaccggtcgctgtccaagctattttgtatgtcattactgtgggttaatcagattaaattaaccctgtcctttgtgcatccgaattaaattatagtgtatgaatgtatgatgttaattactagcagattttttctgtttaggtgggagcatggtgatcggtaatgatacgagaagcttcgagaggttaataatctaagacccccctagccaaaaaaatatatataaatgaaaaaaatctgagaccaacccaacacgagggcccacctgttggtgacctagttatcgtttcattcaacatcgctttcgtccattcgcagtttcatggacgaacaggtgaagaagatatcttgagatgacatgaaaacaatcagatcaaagctgaggctgcagtgttttttggctgtcttgttcattgtggtagcccatggccatgacccatctggacagatggacggcatggaatgggagtggctactgttgcatctgcttgtccagcagcagcagcagaagattttgtttaggggtgacaggcttgcctaaagcggtgaaacgtgcacatacttttgtgagaaagagaatgttgcgtattcaaattttcagcatgtgagtttgtttgtagtttgcactcaaaaaccagtaacatgggttgctcttttttctgcaacttgcctttgaattgttccatctcgtgcagcacgcagctgacattccaataatactcctcaatatatataacaaaacaaagacaccgcagattctgaagaagaaaaggtcaaatcttggcaaaaaatgatatagatgagcaaagtgtttgtcaagtcatgaactcatgtgaggagtgtatttccagaccaaaactcagtgatggagatttctgaagctaacgatgtgaaatctctaatatgttgatgtgcaatactttcacgcgttcgtgaaaaaaaaggtgaaatatgtggaaattaccacgggtcactcactaatgcactttgtcttcctctagctgccacagaaaactgacggctgccattgtcttccagagacgaatcctgactacttctcaccacaagtccacaagtagtaaaagcaatggatctcaccacaagtacgggtccaatttattttcatcaatcagtgaggcagttacctgtctggctggaagattgttgggcccttgtacatcttggatcacaaaacccatacttaactgtctgcagcttcatcatagctacaatgtctgtcaacaattgcttggtttccttatttatattctggtgttgattttgattcggtcgtcgtcgggtctttcatctttgcttgtggacatggcttttgtgtccttaatatatatttatttttgacgtggtttttgtgtccatgattcagtaatggaagctacagaagtagtacagagaattaagatattggaattattgtgttaggacgatgggattaacgaaatgaattattgagttggaagctacagagaattattccattgcataaaaaaactaggaagaatttaagatattggcattattgcaaactgacagaagtctcgctggaaattcttgaatttagaagtactagccaggtagacctgatagcagtcgagctcatttcggcgctttctttgaaattcttttctgaacgaaccgttcttcagaattcagaaccagatggccgatagaactggccgcttacctttccagaatttcaattcccagatcgatttttcacgaacgtgcaaaaaatatatatagtcaatatatattagaagaaagcagagttttgattacacaacgcaaacggttagaaggccattgccggggcgggaattcccggatcgatttgtgaatgacccttggaagaattcaaattcaaattggatggaagggacataagtgaccgaatctctaatctcttcttcctgctcatctcacgtatgtagattgaagagttttgggccttgggacatacagcctttctcaattcttatccgagaagttcgttgtggattcagcccaaagcctcaaatgtgtcgtcgtcgtcgttgtcatatatttctttctcattttcaaatatctcaagctgtcatgcaaaaagtggcatccacggtttagcagcgggccatcaccattaccctcaagcaatcatcgtctccatccattgtttggcatggctttttttttgaaacctaattgtttggcatggtttcatgttagttaaaaacaaaaatgagatttggagggagaaacacgggacctcataattgaaaccaaacattctttaccactgtaactatcagatacagagactctagggttcatctgcaaatataccggaccgctcggaataatagcggaccggaagagggtcttatgtgcaaaatatgggccggtagcaatgaaaaggatctaagcagggactcccatatcactgttcaaacagtgttctctgcatttactgcagaggacctgcatccgatgtttgttgtttgcaagtaaaatttcaggatcttagatggatcgtgccgtccattgtgccttgtccgctttctgcaaccatgcggcggagctccggcgatccacagtgcattggtcgtcgaatcaccgggccgttgccagcggtcatccgccgcgttcttggcttattgccgggcactgtcgagaccggcgggttcggaaatcggaatgccacattctccggtgatctcttcgcagcctcctctgtcctgtgcctaatgtactatctccttggacggcatagctgagtgccaagtgccaaagcagggccatttttctccggcaaaggtcagagctagctccatcagtttcaggcacaaatcgggtgggttcagatggttcatgaattatgacatcgtgtcttcgtcttgtcttgctcatatcctgttccttctccatatctagcgtaaagtattcttttgtcttattcaagatttttgtcaaatatgcaataatataagtcatgattaagtatctttaatgataaaacaagtcacaatacttccatatttttattagtaagactaatgatcagacctcatatctaaaagtaaatggcatcatatatttaaaaattgaggtagtatatagctgtggctatgtggcatatccaagagagtactgaattccatattggaatatcttaagcaagccacatcaaatgtgtaaagaatctgccttgttagtgctttcagatttattattattattattctgcacagcagataatttgaaatacaatgtttcatgattgatagaccggttcaagagaaacaataaatccagtatttgtccaaccacatggcagagccttgtgatgacataagagcagttagaggcctagtgaacaaaattgaatgcacatgactttttttttaatcatctggtaatcaactggcgaggatgaattctagatcaaagcaattgatagtagaataattaggaggcggctgcggtgtcttgttagcatgtagattgatctttcaaacttttcctttttactgaagttcaatttttttttgtaacaggatgaagataacattatatgaggtgctactgattagtttgtatgtttgttggacccatgattgctatcgctaattgaccatgattgccactgggtactggcaaagtccactataacaagaggaatcatgagggttcagttccatttccattggttctacatcttccaatcttacttgtttagttgtaaatgaatgtctaaaaattgccaagcaaaatgagtcacatctaaggaccttcattattctaatgttcagaagtttcagcaccaaactttgcacctgaaagtccatgagaacaatgaccagtgcccagtgggttaagtagctaatcagatggcactatacattccttgcctttagaccagcttgctagtgtgattctgcatagagccgaggcagaggcactattggtactaggtttgttcagtgctatactaatttggctgggagttcagaaatgcaagcacgttcatcgacggcgcctagagcgcaacaccaattcgaggggacaaaaagcaaatctacgagctttttctacgatctgtgcagctgctcgaggagcccaaaaggagatgcaaagtttggaagctggacgcgattcagaccgagcttgctccaggtgacccaacttttccatttccatgcattctttgatcatcaagtgatcatcttgcactgtaaaaaaatataaaaaggagaggcaggcagcatcggctaaaaagtgcatgttctgctattcaaaacatcgaaaccggtgaacctgtcaaagaattcctgtattcaatttgaaagggaaatattttacattcgtataccataccatgactgaattttgaaggggttctgactgaatatctgaatacttttgtgttctggcagtataagtactgcgtaaacctgatactagaatacataattagcgtgcgaatctgaaaatattcgctctaatcccggtgcgcccggctgcgtgccaaatggaaaatccatggatcatcatagcaaagccatcatgaaagcaccccacagagaacaaatttctcttctttcacctcccaactcacccaacctttcttttttactttcctgccacttttgcttaatctattgcatgctgctcacaattatctcgaaattgcgtgatcctgcaaagctcttagcctcccggcccaagtttcctcttattcccctgacccctccactcggggaagaaaagaaaaaacctcgagattattctctcaagacatgcttatgctgatgcttatcagcatcaggagatgcacttgctacaagagtgaggcagcagctagctcgctttaacgctttcctgaatcagcacactcctacttgcagctagagctgagcaagccaaagctttttatcactcttggtggtgttcttagtagagcttttcgcaaagattgtgccatggatctttggcgagttcattgcttgggttggctccttgttctactcctcttcagccatggtgagtttagttactgaccaagtttgcgtctttgtgtagctttctgtcttgttgttttaggatttgaggtgatggtgttactactgctgattctgcttggaagaaattttttgctaggttagaatgaataaattgtttgtttgtttaattccgtttagttaaatcagttactagttgaagctgacgaacagagtgtcatgtcacagcaacagacaaacacatgcttttatcacagattagtaaacacaagtgtcaagtgtgcttttgcttaatttaacaaaaataaatatggaaatatgaagtgaaaactactcacaatgagctatgctttggttgaagaagctgcagggggaggaggagcagagcaggtagcaacacaagcgcatcacgacgcgtcgcggcggctctccgcgcaggtggcgcacggcacgccggagcgggacgtgacctcgccgctcgccactgtcccggtggataacccggcggcgaaccccaccgtgacgtcgacgacgaacccggcggcaatgccggggacgcagacgacgccgtcgctggcgaacccggtggccgcgggcggcggcggcggcggcggaggcgggagctggtgcgtggcgagcccgagcgcgagcacggcggcgctgcaggtggcgctggactacgcgtgcgggcagggcggcgtggactgctccgccatccagtccggcggcggctgcttcaaccccaacaccgttcgcgaccacgcgtcgttcgccttcaacagctactaccagaagaaccccgtccagaccagctgcgacttcgccggcaccgccatcctcaccagcaccgatcccagtaagcaaccaaatttcccttctctagcagagcaagagcatgatcagtgacaactcgtacaagttgaatttgaacatgcatgttggtggagtgatatattatatattgatctatcttgtcgatttttttaaaaaaatttcgtagccatttagttgatatgcaataaacggatggatgcctactcgagctattagaatccatctcctgactgacagatccattcacctctcgttgcaattctgcaggctcctcatcgtgcaagtacccatcgacgaggtaaaatcctagcaactcaaagtctgaaacaaataaacaagaaagaagcagcatgtgaatttcgctgaaaattctttttgcttctcttgttttctttgtgcgatcgaatcggcagcaccggtgcttcggttctgaacacgtcgacgccgacgaacccagctttcggtggctacgacaactctcctcctggattcggcaacaactcccctccgctgtacgggtccatgtcgcctccgggttacaacgacaacatcggcgccgccgcggccatggccggcagcaaggaaacactcctgtcgctggcgtgcgtcgtcgcaacggtttctctgaacctgtacaagtgagaatccaagctgctgtttcacgattcaaatctgtagaaactgcacggctttggtggatgttttggtactcgcacagttgccctgatgcaagcagaaagcagagaaatgaatgtgcagaatatgttttggtcagatgagctaggagaagcaggccggcaagattgatagatagatcgacttctcctagctgtagaaatagtagcatgtggtgctgtatgtagttactagtagtaatcagtaagaacattgagctgaacttttgcgttcacctacatatagaaacaattcctctactcagacgaacacagacacaggaaggaaactactccctccgtccctaaatataagggattttggttagatgtgacgtataatgatacaattaatctggacataaaacatgtccagattcgttgtactaagatatatcacatccaaccaaaaacacttatatttaaaaacagggggagtatttcagtgcaaagagatgattctggaagagcaaccaaccgagatgctggtgtgagtggcgccgccgaggccgaggccgccacagcgccactggtcgccactgccggtcatgggaacgcgacggcgaccacgccgtgcaggttaccacttaccggcgaagaattcctgcagaacgatggcatccaccgcctctgcctcccccattttcctcgtctgcatgcgccggcgccgaccagatctcaccggctacgaggccggagagaccgtcggagattaaatctcggaccccttggttgctcgtgaccgttcgatcagatatgggcggcggggagcgaggagtggccgagtcgttcaaattcttgttttactttaaaagtgggttcaaattcttgttccacgacaaccgttaagattgaacatgagggccagagtcgttcggagtccaaaaatccgaaccacctgggttgcttgtaatcgttagatttaacatatgcggttcagattaaacccttaaaccttaaacattaggggtggttcaaaacaattacagtcacaatggagcagcgctggtagccacatcacgatttcacgacccgtcgcggcagctcgccggcgtggagtcggtgaacgacatgctggaacgagacgtgacctcgccgctcgcctccgtcctggtggataacccggccacgaaccccactatacgtcgatgaacccgtcgctggcgaacccggtggccgcgggagctggtgcatggcgagcacggcggcgctgctctgccatccagtccggcgagaccgtccagacaagctgcgacttcgtcgtcaccggcagcagcagaacactgcaccggatccaaatcccaagctctggcatcagtggcggagccaccatgattcccgggtattcccgggaatacccaacattttttatcaaaaaataagtatacttctagtatatatacatgtacacatatttgtacacctaaatcctcaactcttttatccaaacacagcctaattggtctcttgcgatgcctccaaccaacccgacccactccgtcatgacccatcagacatcagttgacccacttagccaccactcttccagacagccccctctcgctctccctccatgacccatcccaccctggctcggctccctcgcgccactccccatttgcaaaccctaggtggcggcgcagcgagacggcaatcggcggcgggagctggaccgtgctaccgtgcagggggaggccattgccacggcgggcggcgcccgacactccgccaagctaaggcggtcaggtcggttgggtggccggcggccgcgaggggcaggggcgggcaacagcttaacgcttagacgggaatacccaactttaaaatcctggctccgccactgtctggcatgcctcctcgtggcaacggtgtctttgaggatccaagcttctgtttcaagatcaaatcagtacaagcttggtgtagtagtattttggtacttgtactgatgcaacaaccagaaagcagagacggctctgcaaaattaatgcgcataatatgttttgggctgtgtttagttcagtgcaaagtttggattttggttgaaattggagatgatgtgactgaaaagttatgtgtgtatgacaggttgatgtgatgaaaaaggactgaagtttggatccaaactttggatctaaacacagccttggtcagaagagctaggagaagcaggctgacaccaatcccatgaccatgggcactgggtatagggcctgcttggggagcttctggcagctagagagatttttcttaaaactaccactgtcaaaagccctccaaacaatccagatatttactcaaattttaagaagctgcaattgtaaaatttagaaaataaactagaaaccagaagccgtgttcccctgcttctctaaattctcaccagttacttttcataattttaagcttcccaaacagcgccataagcattttgccaaaaaaaaaaagaaaaaaaaagcaaaggaggctggtggagttcggagtatgagaatgtgttgtttctgaccgattggacatatgccatgcaggttaaacacttattaacggatgttaaacatttcattatggttaaagcaattacaggcaaaggatattattgcattcattctacttcccttatcgaatcaccaccaattagttacagcttatgacacgccattgccgataataaacgaaacaaggggaaaaaagaagcaaaagcacgcaacacaggtgatacaaagctagctcatcctttgcttccttgaaattcattcatggtgctgctttgttagatatctcagttttattgtttacatgatatgtaaacggaagaacaaaacaaactgagaaagaacggtcctttctatcagaatataaataaatagagctacagttttaggccatcctagaaaatgctaagggtagtagaacatgatgatcaaacatacatctcctctgcctctccaaaatgtcgacatagcaactcatatacacagttgctattcaggcgcctgaatcaggccaaaagcattgcatggcatctctgacgtagcacgcaccacaacaggaccacacactcaaaagggtttcaaaggctgggtcagtaactatttggccacatttggttagcctgagcggcagcggcagcagagcttaagttgccgtcactagggttccggtgctcatggcccaggccgggctgtgtcggtgcaagtggagcaccaaactgtgaaggcagctgcccctgccgaaggccgccctggtgaccctgctgcccttgataatacaaggcatttgctgcaagaggtggcattgttcgcgaactggcaccatgcatccacatcgcagcgttctcgctctgcaagaaatttacggaagttagattgctattgaattcatgcttgtacaaatttaagtgccatggtagttacctgctgaagagatacaaattgattcccttctttgtattgcgcgggcactgttccatcaaacccaggagcagcggttgctgatggtgtgctttggttcagggcaaaatttcctggcatgctgcttgcagctccaaagcccccaacatagcttgagagcagtgaggcttgctggggtaagctcgcaagggaaacattgcctttgtactgtggcaaaggatattttacactggaattgggaactgcagctgctgcttggtggaataggccactgttcatgtatggttgctgaaaggcaggaggcgggagatatgtataacttggggctagagatgggtagccaatcatgcttgcatacccaagaggaagagttgcttgagcataagggtgaagcgtgagatgctgagggagtggaggaccagaagcaatgctggtgctggtgcttggctgagattgattcaattgagggttggatgaagcacctggattcacaatctgcaagagccgacaccacaagaacaatgatacacaggtaaacaatccaaaagaaaattaaggcagaaaatatattcacaaatcacaagataaacctcaataaaatgaggataaaaaagtacagcttgatgaggtatgcgtttactattgcgagaaaatgatgagccaaaggttgaagcgtgacttttgtagtaagtatgtacagttttgacagcaaagcaggcttaaaaaaaaaacataacaaaacaaatgctatgcaaatggaacttcgccaaatgatgtgaccaaacttaaccaaatttcgattagttactgcctggtctctggcttattaatagtgccttcacgacaaagttaacaaaagaaacagttgcatagcatgaagctatacaggttagttgcatcatgaagccatcaagcgaaatcatcagcaaaaccatgcaacgaggagaaatacccggtcttgattaaactcatcaaaccacaggtttaagttcatcaataaccataaatgccgtttatcagaacaaatatgtatgctactatgtctattcaagagtaaagctagtttatgaattgattctatgacccaaaagatagcatggaagtatgaagtagataaaaagtccaattattcaatgagctgttccacacctcttgtggttgtgtagaaacagtagttgcattgcccatggacgatgatgttgtgccatgaaccatcgtagccaatggtgggttagtaagtaataatgagaaagcaggatcaaagtcacgcaaaggtggaagtgctggtggcaatagtccattcgggatatttccttgctgcaaagataagtaaaataagcttctcagtgaagaaaagataggtgttaatggttataatatatcatcaacagtgaaacagaaatgcgcccacagatttcttcatcagtgaagtaatgtatctctatctagatggagttaattccattattttagagaacatgcactgggggatgcactgacagatatgcttgcagaaactaaattaaatggggcttatacaaaataaaaacacaattccgaattttttatgtagataattccatatggaaactactaataaggtatcaatgtaaaattatttaataaaacaaaaagaagccaataccataaagctagagagaggggaaatgttttgcaattgtcgatgttcttgcagataaatgtgtgcggaagaatctggttgcactgcacttggagttgcataatcggaggttgataaattattgtacatggtgttgtttggaacatctattaaatcggctgttctcaattcaggctgttgtacaggtgcaacatcaacattctccgtgtcactttttgttgaagaggcaacatgttcgtcagctgcaggtgctactgtatccttattttcgtactcatggattctgaaaaatggaaatagatgttacatgatgtttgaaaagaagtgaagaatgcgacagacaaatacatacctgacatctgactgatcaatcgaatggttatcagaaactgctgcaacctcctcatcaccattggcagttttcaaggagactggcgcatcaagtgttccagacacaaaactaccaaatgtcaagtgtgcacaatcagcatttgaaacctgaagatgatcaggaattattacagccgggttatcttcagatgattttgattttttttcctcatgtagaatcaactgttcaaactgtttgtcagtagcagacatatttccctctgaatctgcaactaaggaaatagattatcataaacaattagaaaggaggctcgtaacttccaacagaaaagccaattagaaaatatatagtgtaaaaatgtaatataaaaaggcacatgcagaaccttcacaggccgtggtgctgcactaagatataataaaaaggtcctggtaagaacgtaaaatatgaaaagttgtagtttcagtagagattggataaaaaggtaataatagtgaatagctggagccatacgaacaaataaaatatatcaaactttctactggtccattctcgggtaaatgagcaacaaccttaaaaggtactccctccgtcccaaaatataacaacttttagcccttaggatttgtcccaaaatataacaacttctctaccaacattctcttcccaaccaatcacaaccctccaccattcacttttctcacctacctccactattcatccaattacaaccctccaccactcacttctacctactttcttaataatcgtgtccaaccctaaaacttgttatattctggaacggagggagaatttgattcaaaataaataatttgtattgaactcattactcatcatgaggatttgatttatagtctcatgctaaagtcaagatgttgatggagacagtggttccagtcctaagtagtactagtagttatataagcaaacgcaaaaatttaagacagtattgtatcggatttagacttgcagtagctagtagaaagaaacgggcttagtgctggatatgggaacttgcttaagatccatgtcagacagtaacaccaacacataagccaaatgacaaataggcagagatcaagccgccagcaaaaataaaatcagattgcttccgattcaatgtaataacaatggcttgatgggtattctggttactatagacaaaactataccatgccgaaacacgaaatctatgttctagatttctagaatatatattcgcatttggtgtaggcatacatatgaagtcataaaaaaggtgggggcaattttagatgacctaccacggttattctcaaatgcattgccatcagactgagagtcctctgtttccactatcaagtcattgtgatgggtggcaatttgagtatgttctgagtgtacttctttgctagatgcaggatatggtcctgaagatgttcgatcgtctgcattgcttgcactcatatccttatttttatcagaatccatgtcttcttcaacttcatctttgtaaacatctgcagttgacgatccaggtttaactgtggcgacagattctggcacctccaacccctctctgggaggtaatacatcaatagaggagtcattagatgcaggggagacctcattggtaccatttggtattctatcagttgcaacagagttcacttgtgaaggcaaaactaggtcttgtgaatcttttgaagtatgatttgttgcattggaaatgactgaaccaccaatggttggcatcccggtattacatgcaacagatctcacaggtttagcttggggtttgcccatcttgacaatatcagccatggaagggcgccctggcatcccaccccaaccatgcttcacttgagaagggggctggagaggagtggactttgcatcagcttggccacttgataaaataagactgtcattgatagtagcatggctgaaaaatgagtataaaaggttaggaggtctacaaaaatgaaaagtgcatgataaagagagaagaaaatttctggaacactacacatgatgtctcccagacaacaaactactctgccaagacattagtagttgtataattttaggtcataaactcattaacatatatggagaaatcctgactccattatgtacaaactagatattccgataaatccaccttctagaaagtattacaaaacagacaccgttaagacactgcagttggtaagtctcatgtttacctacgggagctgaataaatcatccaaactattacacatagataaacaaaaatagaattgtagactgttggatggtcatgcatcatactactgggaagacagctaacaaagatctaattaaaatataatgttacatcagacaaaacatgcactgtaatttctgtagtgcttccattagcaaaaggaagagtgaacaaaatgtcgagcatcaatcaacaataccgaaggataacatatacaaaaatagaaaccaggcacat

SEQ ID NO: 17839 - DNA, 2705 bp, Oryza sativa
ctttaccactgccagttgaatctcctaaaatgttaacaggtaacagaatgtgcccccattatatttttttttttaaaaaaaaacaaatttcattatcatgtcataatgcataatgttgcacactacctccagtcttagatcctcgaaatgcaggtttataaaatggccgaggcctggtttcctgaggtgctttgatctacatgtaataataagagtttgttaggagaacaaaaaatggcatagaaatgtcacttggacaaacttcagagatcaataatattcagtaatttttgcaagctctcaaagactcacacataacactactaccttggtgcacttctcatatacaccattgtggggcatatgccatccaggccaactattaggcaagtgaaaaaaaaaaggtggctttgactctgggtgatgtgttgatgggacagcgattaaagggggccatctctaaggctagagaatgcttaaaacttaaaaggactaaaatttgaattctatgatgctcaaaaactccaattgcatacttccaacaaatttcaatttcagttcaactacattatcaaacatcaagctaatttcaactttgaatgtctgaatttggagttcaaataaatgaaatttagcgtaatatctcaaattattattttgattacacaaaatcagaatttcaacattacgatttcaaaatctggaactcataacagaattctcagacctcagattgccccctttatgtgatgtcccaccaacacagcatctaggggtcaaatcaatttttttcatgtgctaacggttggcttggacacagtcacatgatggcgtatgtgagaagtgtactgatggagtagttgcatatgtctcagtataaaaatgttggcggcgcatgtgcaaagcatgtccaatttaatgacataaaaatttcccttgaagagaacttaactgccatcaaatacacttatacagtatcgcgagaacaaagcatttgatacaaaacgacctagtccctaaaaatggcatacagttgtaaacaaatcatgagaatgagaaataaattcagtactactcatcaggtattgcggcaaacaacaacggtaaattagcatgtagcatagttctaactcgtatgtgatcaatgacactatattcgcattgagatggaaaactcacacaaaataaacagggaggaaaaccaaacagtgaatttccttaagaactggcagcatatagaattcagagttcatatgcttacctcctttttcttgtcacgctttcttctcacttcatgaaaaggatctgaacagacatgaaaataagttagaggaactaccaacatggaattatgtttttgatctatagttccatactatgctgcatttattagaaatagatcagctagatgacatagcacaggtaagcattgtatagagcatgactgcatgagtataggacaaataagacactcaggaataaaaggaaaggacaagttttgattagctccttcagccaacaaaagcgaccaacacctaaggtatcacttttatgcttgcagtctagcactttcttcccaacaaagaaaggaattattctcgttacactagcttctaacagaggtaaacaattgtcttttaatgcactagttccaacagaaaaaaaaatatcccaacacaaatagataaatgccactggatgcaattccagatacaattcaaagttaccagcttcctaaaaagcaatgtacctagaccaagcattaaacagatagaaagtaacactaaataataatgaatgcaaatagatctctacagaaaggtaaataaaatgcatgaagaaagcttccaaaaccaaatcattgtatagcttaagttgaataacatgttgcaattccatccaacacacaatctatacacaccaaccacacaactcaaacatggaaaacaatcagcagatattaatatatagataaaccatcatgttcctgaataagcacacaaaccaagcccatcgtactaagatattaaactgaatctgcttactacatcataggtagccaattccatctcaagccaagaaaaaaaattcttctgcacaggaaaatatataagcttcattgattgtaaaaacaatatgaattactagcttcccacataggcagctccatgtaatcaaactcacagcaagtgaatacagataagtacagcgttaaaaaaagaacaccagattgacaggcagttcaatagcaaaggtccaagtttggagttacaagagcaccgaaacatgacaaaaatactaaaaacaataaaggaacagattagctcaaagcgcaactcctccaggtccgaggcaatcgtcacgcgaaatcaaaccctagtactccaacctctcacaagcacaccgcgccgcaaaacaaaataaacctgtacaattcaaaatcgtccggggggagcctaggcgacgacgggcgccagaaaccgggggctataataccttgcgagatgaggcgctcgacggcgacgtcggggtccatgccgcaatccaggagcgtggcgtagatctcggcctcggagcggtcggtcaggatccccttaagcccctgcaccagcttcctcgacgccggcgggatcgcggccgcatcccccgcccgaggctccgccgccgccgccgcggcgtagaagggcaccctcccaccgccgccc

SEQ ID NO: 17840 - DNA, 16120 bp, Oryza sativa
gatccgaaggcggcgagctcccgctgtggcgtcgccgccgcgcacacggtttgcggaggggaggagcagcaaaaccctcgtcgccgcctcctgttcccgtttggtgtactgcccacacccaccaacaccacaccacgcccaagcctaaccttctctttgtctctgcaaggagtaataaaatattaaatatttttgccctactcgtgtgtttcctgtattgcaaaaactatggtgcctgcctagggtttgtcccatgcctaacaaatctacccaggcagggaagaaaagataattggtagtacctccgatttcattttaattgatgttttagataataacacggtctataaaatatatttttaatcttatttttttattataatatatatatataataataaataaaatatatatctacttttattatattgttttaaaagacaaatctatatgtgttgttctagttcctttaaactaaatatttttaaagttattgttggtcaaaattataaaaaaattgacctcaaccttatctaaaacgtcaattaatatggaaccggagggagtagataacagttttgctagcatatggctctagaatagctaaaatgatttttataattgtgcgaaagttttaaatagattgggataatgaagtatatttagaaaccacagctacgttacgcgtcaccaccagtcatctattgctattagaaaaaaaaagttttcacaatcgtgtaaagtttttttaagtttgagagcttatttataaaccatagctataagacgtgcaatcatctgtcgccaattagtatcaattaaacatatttctaaatagttactactaatttgctatacactttttataagagaatttgtttcgcagtgaacatgtgcaatttatctagtaactagtgaaaacctttcttttcccatcttaaattatgttttgagttcaaaatattttgtgtacattgttgatgcatgcatagcaatgccacacatgtttttccttcaggaaaaaaaatcaatgccacaccttgcattagccaaaaggattttcaaaattgcgcaaaagtttcaaattcggagtaaaatagaccgagatttcagagcatattgtcccacatttccaattggtgcttcaattaaattccttgcttccttctctgaatgtatgcactttgttgccctacacaacttcaggtagaggcacagtgtcgttacgatcccttgcttacgtgctaagttttcttctacagctcccattcttcaccagtaaacaaaccaccatgtgcagcaaaacggcaaagtggttcaggcactcgctacgctttaccgcgttggttttctttttgctgggctacatatagcgatggccacttctggcccatacagattgcaggctaggcctttttcctgatgggctaatcctggccattcccaggagatgggccattagtaatttataacaaggccttacacactgtggcccaaattactaatggaccgttcagaacgagttgctgatccggcccagtgtactaagctgctccccaaagctgttttttctcttcttcttttcccctcttgacacatgtttttcttcaagttcagcactattttcaaggttcgaaatcttaatatctcagtagaattcatcagttgagacgtccaaactggtcctgcaaacagtttccaggagaactgcacatctcgacaagtttgtacgtggcacgacccaagtgacagagactgatttagaacaaaaggaacataacgcagcagcacataaggctttggttttggttgttctgggaggagacccgttccctgagtggcttttggttcattccaatcattcccaatggcttaatctaactaaacaccaacattttcgtacaaagaatatatgccaaatgtaatgtggttccttctggtgagaaatcaaaagagcacacactgcacataaacctacttgaaacacatttcagttagtgcaaaagagaggacaagtagggccaggttggtgcatacttaagagccaagcagcactatgaccatacaaagtgacagattccaaaagccatcttctgttggtagtatccactacttctactattatcatccactgaaaacaaggacatggatgcataaactgcttctgaattttattttaattttttggctctcgaccaagggggtccatatgcattggagcattattaacaaagcatgcaacaaagttgtgaattatttttgtgctggaatatggacatggaaggatgttgactccgcctttgtctctgccacgcaagaggaatcatttcgtggataatggatttggagagaaccagcagtgtaatctatatcagtggataatattctcagtagtggagataacaaaagaacaattagtgtgaggaacaaagcaactaaagggaagggcgatgtgaaaagaaacctgatgagaggtattttaattttcttatttagacggtaatgtctcttttttgtttcttcctcatgaaagttcagtggccaagtacatttgagtcgctgaaattgcttcagtaaagcgccactgccgccatgattaccattcaactaggtgagtgtctgagtgatggtggcatttgtttttgctccagcgacgagcatttgttttctactgctaacgtgacaatatgttctgctgaaggatcaatcggtgaagcggtttcctgcccaattaccacgtcgatttgcataggagtacggtgcgttgttgcatggaacagtgataagcaatctgcttctgttcttttcagctgcttcactaaattattacttcatctatatcaaaatataagcgattttagtttgatgaaacttatatttgtactataaatctaggatacgatccatctatctaaaatcctttatattttatattttagaacccaatacctgttgtctcatatcgtttcactaaaaataacaagtgcaatgcgagcttggaaaatttgagaaaaataaaataaaacgcgaggatgagagagaggaatcatggacgaatggatgtgttgagaatataggcatataatgatttaatatattctataaataaatcatgacattacatatgtatactagcattaacgcatcattagatctacacatgtaaactaagcagtaaaacatgaacagatcaaatatgcacaatatgtcgaacacgtaccgaggtggcggaaagaccggttgctcggcaagaactactcgcggttgcgagcgtcgacgaaggcgcgcagcacgcaagcggagaggaaggcgagccgtcgcggacgaacagggagcagtcgcgcgaagcgcttcctaaaaaccttattgtcgccttctcccggtgcaggacgtcgaaggcagaggttccggagacctgctctcccgatcgcaggtgcacgccggcgagcgggatggagtagtctacgagcgacggcgcagcacagaggaggaggcaaaccttagattgatttcgtgtgttttgcgtgaaggcggcggctcggtttatatagagataggtcgcttgatcagggcgcccgcacgatctccactccgcgtaaccgaaccggataagtcgcgcgtaacttatccggactccacgccgttttcacgcactggattttttggatttttcggaatgtttcgaaaacaaaacaaattcgaattttcctgcagcaaaacaaaactgcaaaccactccgcgtaaccgaaccgaataagtcacgcgtaacttatccggactccacgccgttttcacgcaccggatttttcggaatgtttccaaaacaaaacaaatccgaattttcctgcagcaaaacaaaactgcaaaaggaggctgcatctgcgcaagggtgaggagccaatttaaactgcaaaaggaggctgcatctgcgcaagggtgaggagccaattttgcggaccattcgacgcgtacgtcgtgcacgcgcgcctatcaggcgaggcgggcgagcgcacgtgtgttcctccttttctctccaccacaaatgcttcaagtggctaggagggcatcctcccttttaaggaggtcccctctcctagaataagcaaggtggtactaaactccacatgcatgccatcccatgaggtaggcttttataattttttaaagaattaattttcgaatgggtcttagtctatctattaatttcaacaggttagtggtggattagcgagagagagagagcagtaatggagacgagaataatcgccgagacggagcatcgaatttgttccctccgtttcttttccgtctcttcttctgactgaccaaaccaaaccaaaccaaaccaacagtgccggtgcaatgcattcagcagccagcagcacggcgaggtttgcagtattttccaatgcaactcgcacactccacgcaagcatcaagccctcggctcggccatgggaccaacccatggacggatggatggatggacgcatcaagccatgagccaacccggtcgatccgtcttttcataggaaaccagaggcgccggctggaagggggcatatcgagcaatggaatacctcaccaatttgtacccttcccacggttccccctcctcccgtcacgtctgattcacccttcaattctccactcgtgccgataaaaacgattttcgtttcgattattcgcggaataagccaaacaacatactactatttacaaacaaaaaacaagttacaaataaaacttttatatacatgttttaacgatctaaaaacaaaagctgaaaaataaattcaataaaaaatatcttaaaatcaactctaaatttaaagttataaatttattttttggctgataagtataagcaagcgaaaagatgagtcccttacgcttttacgaaaataatttgcgaacctttaaaacttttatatttaactatttagtgacgattgtaatacgatatttatataggtagaaacagatgcagtcaaaaacagtatttttacccgggatgatcgaagaaagactgttattaagataagtctaaaacggtgtcagtttttttgccaccattttttcatgtaagtatactagtaccagtagagtgcatgtttgccagccaaaccaaactacgcccgttggctgtcgtactctttcgtaatgtcgttgcttacggagtactcccctgtccagtactgtacttcggcctgtttaattcagctctaactcttaaatattactccagaagttaagtctgaagtgaagttgttgagctgcctaaacccagctccactactctagtatattttatgagagagctctatctaactccactcccaattttaatggagctgaaactgtttggctgagctctaactctaataggagtggagctgaagctgtgtcaaacatgcccttcgtataatgctactgttaattactgtagtgtagtagtcgtgagttttgttgacagctagcgtcaggtttatctactcgtcgtcctcttgggggcacttggcatctgattctgaattcctgatccatcatgtcacgtgtcaatgtgtcaagcgtccgtctgctacactacacggcccagcctccctctccgtcgtttgccgctcatcctcctgtcccgacacacgacgagtcaggtcagaattctgaaatagtagaaccatctcgcaaccaacagcttcagggggtgtttgggagagtttagcccctctctcccgaaagtaccccctcagattttcatccaacgctgttaccaccgtcggatccaccatccaacggctgtaaaacctcgatgatcgtgcaaacgaaaaaaaaagagtagggaggccaggaacaagaacaaggcaaggcaaaacgtgcacacaagatgtagccaaggagagcttcaattctccattttatgtactttttcacagggattttttttctttttctccactgacatgtgaggccaacttattccacgactgcgagtgctccggcgatggccggcgccacctcgccgtggccgacgccggcgacgatggacatggtcatggtcatcgactcctcgcggtggaacctcgtttgcttggcgatgaacgcctccaccgtccgccggaactcctccgcgtcgtccgcgccccagcacacctccgcgtcgcgcgccgtcaccgacgaccgccgcctgcgcccgttgtccgactccgaccgccgcagctccggcgacaccgcccgccggaacgcgccgcgcgagcccatcttctccgacctgctccgcctcggcgcgcgtgccttgttgacgcgcaccgcctgcttgtcctcgaacgccgccgccgccgccggcgctgccggcgccaccgacggggcgcaggggaccacgggcgccggaggcgctgccaccaccggggcctcggtggcgtgaggcggcggcggtgatggctgcgggacgatgaacagagggaagctggcggcgggtggcgctgtcgtcgacgctggcgtggacccggcgccagcgctgtcgctggagacggcggcggcggcggcggtggtggtggtgccgtggttggaagagatggagaggtcgtgcctggagagcgcgaggagcaggagcacgatggcgttgccgaggacgaacacgaaccgggcgttgagcaggagcgacccggcgagccgcaccacggcggcggcggcggccggcacgcgggaagaagaccacgacaagaacaccacgagcgcgaggagctcgcccacccgcagcatccggtagaggaggcgcagccgcaacgctgctccggcggccgccatggtcgcagcacactgtatcgtgcacagctctagctagctagcacacggcgtggccggcggcgacggcgacggcgactcttgccttcttggagacttgggttagtgtgggttttggaagagagtgaagctgagtgtgaggagaggagagctgtctgaactgaactgatgaaatcttctctttggttggggtgaggtggatgtgagcttatatagcctcaatttcggtggctttctctgtggccttttgtgtttaatacatgcatttgtcttctagtctactgtagtggtgggtcttaataaaatttttttgatgagtatattggtttttaaaattccaggagaatatttttgaaagatcaatttataggagaatatatttgtgctactgatggtagcatataaagttcttgaaatggagcgattataggacaaaatatgataggtgatgtggatagaacattagaaccaccaacttttgtatactgtggacctgtgggagttgtagttattgaagtcaatacaaattttagaatacataatctttttttccttctacaaggtgtggttcatacctaaatcaaagtggctttagagcgaaagatgtttcctacaaaaattcacatgttgatatgttgttagcatcatgttctattgatttttttatagatatatagcgtattaaaatggaccgaaaaaagtttactccgatcaagctttaagctggcaactcaacagtagtaaaccacaagttgtcttattatttttcagcctattcactgagttattaaaatacttcacgactcaaaaagaatacgttttttcaacataattctttttcactatagtattgggatcacttgttttaaactacagtatttgtttaacttttttttttcaaatatttggttttagataatccacactaatagttcctttaataatctaaaacaaacaaacaaccttatattacccaaccgcttccatttacacttgtttggcaacatattatatgtacaccagctctcacgtgtacacacgtacacaccaactaccaaatgtcacaaaaaaatctagaaaaattcatatatgtattttcaacagtattatacctagggataaaatattaaccctaaattcattatattttagccgtaataaaaaaattaaaaaatataacagttttaaggttataattctattagaattttgtctctttttttactttctatgtagaatgaatttgaacgtacgacattgcatgcttgtatgaatttttctagaattttttgtgataatttttagttggtgtacatggtgtgtacgcgtgaggaccttgtatataggataggctccccacttgtttgcttgcatagttgcatatactcgtcacgatgtgtgttttcatatgcccttgatactagtatacttgaaccttaactgagtcttccaatggataacaaacagcaacagcatcagctcgtagcaggagcagggaggcaggggccccaagagggatatgtgtacgtatcacgaggtggttgcccctgcacgagccaggttactattggtttgggtcggcttggagattcgtgtgcggggggccatcgatgtggagtcctcgatcagttcaaaacttcgaaccagctaatactggcagcatatacgttcggtttggagtttggatgcctctgtttgtaccagtgtgtctctctcttttcttcagattacagcactgcagagcagagtagatcatggttcagtctgaactcccaagcctgaatttccaatgtcaccaccggcctctgagcaaagcaaaggggaaaaatgatggcatcaaagcacaacggaatcaaagtgaaaatctctgcggatcgaagcaaagcgagaggataaaatctgagaccaacaacaaaccgagctgaaactcctacccggacttgctgtaaaactggaacgtgtacggatattgcagtgggggcagtggcagtgctgccgcatgcacgagggccggctgaaacactgacccgatggagtatcgcagtgcagtgcagtgcaatggagatgcatgcatgccgctgtgtacatcctgtgccattacacatttacgctacgctggccgtgtgtcgcagttggtgctgaatgctcctcgggcgtgcgtgcatgcatggtcgtgtattagtgttgttgtgtactccatagttactgcgaggcgtccttttgtccctggtcgcgcaggtgcaggatgcattgcagagggcgtttgcaatggaagaaattaagcgagatttagggtggtggccctcgcgccacggccggctgcttggcacaaatgtccctcacgtgtatggccgtgctaaccctgccacaacaacacgagcccctcttggaacatggaaatggcatagcttagctagcacatctgcaggagctaggatcagacgagagaaaggcagtttttcgtcgtgcggccatggactccgcatgcatggggcgttcgttcggtgtaacgccacggatttccagcgcggcccggacgaccaggcacgcacaccggcacacgcacgcgacgcaaacgcgactcgccgcttgtgactcgactctgtttacggaagggaaacgcaaaaacgagcccaaaatcagcggccgcgcgcaacagcggaagagaaggaagaaggggatcacggcgcggcgccgctcgcgtgcgtgcaaatgcatggacgcgcgggcgcggccgtccccttgttttccgcggcgttttttgctggggcgtttgcacgcacgcgcgcttttgccggtgcgcgcgcggcggggagggggaggaggaggagatgccgagacgggacgggacaggacaagcgcgggacgctgggttgtgcacgtgtggtggtggattggtggttccttttctttgccccgggcaagcggccatcggcagcggcagcggcccagccgacgcgacgcgacacgtcgaaacaacacagggagggagggagagtagtactagcagccgttgccgtggaccggccggcctcgcatcagcgccctggtctggtccactgttctcccttggtaacgtgtaagcaaaccccgcgagtaataataaagggctccttcagtttctttttccctttccacaccaactagcacactaattagcaaatatcacataatttttttaaaaaaaatgacacagtattacatctgcctgtaaaatcttatctttaaatttattatatttttatcataaaaaaaagtacacgaccaaccaaaatttagtatcatcacgtagttttggcacatatttactgttacaaaaatttaattgcgttgatgggtttagtctggtactgtttttatgaagatgaaactttaagaaataccgaatttggtaaaataacatttgacataaatatgtttaatttgttaggataccaacctgtaataatatattaaaaatagtagggttgaaagtgattaccaaaatgctttctctacttctcctttggacaccactcaactaaggtgaaaatggaaaatgtttatataatctatattccacatccacatcgagcagatataacgtcacatgcagctcattagagagcatttaggaggactagtattagaaaaactcgcatgatttcgcaggaaaaaggggcttccattcctttcggtacaacaacaacaacaaaaagcacacacggatcgaacaatttgattttgcccaaaggctaaaagcaaagctggcgcctatggctagttcacatagggagactgttaattatgcgtcaggtcgtgttcgtgtgcacgcatgtgaggtgccggtttctgagggcggatcagaaatttttatttttgttgcaaagtaaacttttcgcgcctcacacacacactaactacggctaagctatagccaggtgaggtgattaattagcggcatatattaacaaaaagaggagatttggtggggagacatggtggcatgatgcgccgttcgtcgcagtcaggcaagtttggtatcactaactaaacggccgtagcgattggctcgtgtcgccacaatattgctcttcttctctctctcttttttctttcttgttgctgttgctgttgttgtgttgttgttatgctggtcatgaatgacacctctttcgtcaaagcacagtttccgtggccttgactctaggctgcaaaagctcccggatagtttgctgctctagcatagtgcacgtaggagtactactttagaatagtgagggcaatgattaactattacgattgtgttggattacactaatcatgtcgggcaaccaggtgatatggctagtactatgcaaggtttaattaaacaatcaacacaaccttaattagcttgctgattgatgtttaaggttttgtataggaataggattgtggtgaaatattatagtctctgcctctctttcgaagtatgaatcgttttatcgttttttatatccttttggatttttggctattattgtttttactaaccaaggacgtatatagtattatacttacattcagaaacatatatggactatggtggagttttcatatgacaagtgaagtgttgggaaaaataagtggagtagttcttctaaccatggcaagttttcataggggtagcatgtaaaaaaacaaagttttcataggacaagtctactattattaacaaagttttcatgaattcatgtccagattgtcaggaaaacgaaaacatggcatggttaaaagcgagggatgagaagttgaggacaacattttactccctccgttttatattataagaattttcagcattgaccacattcatatagatgttaatgaatctaggaacatgctagaaagttttataatctgaaacggaggtactagttatgaattcatgtttaggttgtaagcaaaaccaaaatctgaataaaaaaaacttttagttctgaattcatgttcaggttctaagcaaaaccagattgtgaggaaaacgaaaacatggcatggttaaaagcgagggacgagaagttgagggcaacctgaattcatgttcaggttctaagcaaaatcaaaatctcaaaatcaaaaaacacgcgccaggtaggggtcgaacctacggccttctgcttaggaaacagacgctctatccactgagctacaggcgccttatacaaccaaatgaacatataaataatcaagtaggacatgtgtccacaaagaaacacacaaatagcaactgactcattgacagacatactgatccatctagattattctgctttttccatataagcacattgaattattcgccctgcaagctacgtggtgtccagcagtttgctgctcacatgaaatcagctcaacaaattcaacccagaaccgtgttaagaaatggatatgtaccttccaaaacagcgaatagaatcagataccgcaactaaaagcatcacttcttctcttatttgcgccgctttactgaaccacttgccccaaagcacctttccaattccaaatgctcccatggaggcgatcttatcctcctaattctccttgtcattgcctcgacgcaaaacatatgcttaattggttccagattcgcgattcccagctgcatccatgttctttcgcatcgccacgcaattatcgaccagctaaatgttccaggattcgatgataatacccggttctcaacttctgaccacttgaaattcagatgagggagagagagagagagagaaagaaatgcagctttatacttggtttattcgagctgtcttgcctttggaggcgtttattctgggctcaacacgtcagtaataggcccctttcactagcattggagcttaggaattgaaaggtgccttctctagaaggttaggaggagagctactatagctttgctttagtcttgatcattgatttgtgattttcttactggtaccagtagtgcattttggagaagttgatcaatcatccctaaacccatcattgcggagattagagtaataatactcgtggttctttttagacatattaatgacttgtggttctaagtaggaccctatttggtttggtacctcgaagtcacaaccggataaagctaagcaagagcaaatggctattgagcattgagtaggctaagttagttaaagcgttccaaagcctaagctccatcaccaaagcagcatcattactacaactccctcactgtcatggtgatttttgtgtttctttctactggtgtagtggtgctctatcttgattgtttatgatcagtttgagtcatggaagggactcacctgctttgtccaaggacagatccactgaaattagaattcttgttctgccgattccatgaaagctacgaatatctatgatccgttcaattcggttcgatttataaccaccattcagcacaagtatgcactccatctaaaagcatctgtatgactgaaaacaagcatataactttgtcatcatgcaattgcaaattattccaaaatcagatcaggcaagtgcaaattgtcagaaaagatagtaaataatgagcatatgtacaaagaaggtcaaaagtctacatactgatagacatgattcaccgttacataatcaaaatgtcaaaaggaagaatatcctaggagcagttgtcagaaagaatatggtactaacaactctactatagtacaaggattgacattaacattgtatataaaagaagaatcatcaccaagacaccaagcaataatatcttggtcaagaatcaagttattagcaagcagcatgtcacacatattgatgcaacttgggtgccaccaaagcgtcaatgctgctatgaatatctctactgccgtccggctcccttctaaagaactgatgaataagatcaacatcacgcggtctgccacattcctgtctgctccaaatcagtgtgcataaaatgcttccaacttgtattggttaagagcaagaaatgaacttcttcagttcttcactgtacatctgatgcaggaatcaagttgacatatttacgatttaggatatgaaacctgcagtgggtatctcattgaattgaaatccattcttgtaagacatgtctgctactggctgtgtatatccacttgtggatatagaggctggatttctatccattatcttaaaagaaaaaaaaaaggcatgtctgctactacaagctgcaatgctgaagcctggatcagagcatgcagcatggttgcctcatagttgtgcccatcttatcgagagttgtctctcaaacgagcttagcattggtatatgaactattcaatcagtgctttagtgcagtagcagaaatgattggatgaccagaccatcctaagctgcactgactggcaacaaatgctcatcatagcactcattcgtagccaatgcttcttattcagttaactgctaatcatcatatccacttcagatcctaaatccaactgatcaggtacatagcgagccattccagttccgaaatatatcaactcaagcatcctgtagattgcactgtcctggggatgtgtgcgatcactggccacaaacacccctactctcctgccctcccctccaaccgtgattgatgaccagcctgcccctttcacaacccctttctgcttcatcatatgccgttcttgtgcagcctcgtgccattgtcccttgctggcataaagattcgccattgccacatgtgctcctgcgccccatggttctgcctccattgccctctctgcagctttctttccagtttcctcttctcctcgggctgcacacgccctaagcaaagatgtccaaacaacaccatctctttcgttggcagctatctttccaatcagttcctcagcttcgtttattctaccagctctgcccaacaaatccaccacacagccatagtgctccttggcaggatacaggccataaatttggttcatttcattgaggtatctcaatccaagctcgacttccccagcatgacagcaagcattgagcacacctatgaatgtgacatggtctggctttagtccaacatgacacatttcctggaacaattcaagtgccttcttgctgtgcccatgctcagcatatccaacgatcattgcagtccacgaaacaacatcatctttcacacgatgggagaatactatatcagcatctaacatgctaccactctttccatacatgtcaatgagcgcactcctgatcattgcatgatgttcaagtccgcagcaacagcaagtgtgtggagttgccgtccagcatccagtgacgcagcagttgcacaaacacttatgagactggcaagagtgaattcgttcggaccaggacagccgctatgatgcctcatttctctgaacagagcgaatgcatcctcagctaggccttcctgtgcatagcctgatatgatggcactccaagagacaacatccttgactacactctcccggaaaacagcatcagcagccgacagacagcccgcggcgcgtgtgtagagtgtgacaagagaattggccaccgagcgggcacaggcgaagcctttccttgcagcttgagcatgcaactgctccccaagacagacccaagcaatatctgcacacgcagcaataactgcagcatatgtgtattcattcggcatgcagccactgatgattcctcacgaagcattcggacaaacgcctcgatggcctcctttgcacggccggtctgcacataggcagagatcaccgtcgtccaagcggcgacgtcgcgcgtgcccatgcggctgacagcagccagcgcacggtcgacgtcgctgcagcgcgcgtacagagtggcgagcgtgttggcgacgtagggcgtcgagtcaaggccgagcttggcgcagaaggcgtgcacctcgcgcccgcgagacagcaatccggcgtcggcgcacgctgtgagcgcggccgcgtaggcgtacgaatcgcagtgcacgccagaggcgcgcatctcggagaagcggcggagcgcttcgtggcgccggccggccctcgtcagcgaggcaaccagcgtggtccaagagaccacgttcttgtgcggcatttcgtcgaacaccttaagcgcgaggccgaggcatccagccttggcgtagacgtcggccagggccgtggcgacgaagacggaggagacggccgaggagcggaccgcgaacgcgtgcagcgacgccgcgtgcgggaggaacctcgcgtcggccgccgcggcgcaggacttgaagacgaggctgaggacgaaagggtccgcgggcgcgagcggcggagaagaggcgcggagg

SEQ ID NO: 17841 - DNA, 1366 bp, Oryza sativa
tctctatagaaaacacatactacaataaataagagaaaatttcatgagcatgagaaaacttcatgttgaagaaactatgagtgtgtgataggcaaggtggccattctaacataacaaatggttccatttcaaaacctaggacaatatattggacaataaaactaaatactagactctctttcttgaaagcaacccatagtatttgacaaacactttgatttaacaatggaaagtgaacattttgtgtacacttttagaaagcatgtgcttaattactcaataggtgttataatacattaatactatggatgttaatataattaaaacaatatttaggaccatggtagtatgatacacttaaaaatatgatgatatccaaatattgcatttataaacaagatcttaactggcagccttatttctttcttggtgtaggagatgaatcctatttttatatattcttttcactgacttgtaatacactactatgtaaatactatactcttaaattaagagaagaacaaacatgtactcacttttagttatacacatagggagaactacagtacttcacattcttttcttgatctcttaaaaaaggaagctctataaagaaagtaaagctaaggataaggataaaaagaaagtactatgatgaatagcttggaagaacctagtatatgctaatattagttgaattgaaaacaactattaaaacaagaataaaatgttgcattaatagtcaaaggctgagacaaagcacataagcatactctagaatatacgaaacttttaggaaatctgaaaaattttcaatacaacttctatgttaaaaaaattatatattgtgttttcttttaattgtgtagtactagtagtcggagtaaggagaagcaaaacatgaggagggagcgacacaaaattaaccagaggaaagaaagcaaaaatggcaaagaaggaagaaaaaagaaaagggaagaagaagaagagacgctggcagcagctgcgtcgagacgctttatcccttgcctcgcgagaacagaaaaaagaaaaaaaaagaagaggaagaggggaaggcaatccgaaaggaaattaggctagggttttcgccatggctaccacccaccacctcgagctccccctctccattcccaatctctccgactcctcctaattaatcccgtattcccaccccccaagccaaggacagcatctcgcatccgcgtccttcaattgatttgattgggttccccccctccatttcagggtttcgtttcgcatcgcagcaatcttcccgacccagcaagcttcttcttcccttgggtccgttagggtttgagattgagaggggcggcgctggcgatcg

SEQ ID NO: 17842 - DNA, 2713 bp, Oryza sativa
gccgctccgcccgcctccgcgaggagcgccgcgcccacgccctccagctccacaagctccgcaagaccgccacccgccgctgccgcaactgcaacaacccctaccgcgaccagaaccccggcggcggcaagttcatgtgctcctactgcggccatgtctccaagcgccccgtcctcgacctcggccctgccgggaccctccccaccggctggccctgcacccaggattggccaaatgctgccggtgaccctgcctactggctcgacctccgctgctcctccgataacctgtactcggggttctcgtggcgcttgttctcttccttctgcgtcagcatgaggtggttctggagggaagtgctcagatttggctcctcgggggacggcgatggcttgggccgagatggtaaaagattagcaaaagaaggggagaacggagcaaaggctgaggagagcagagtcgagaaggcgaaaaggaaggcggaggagaagaggttggcgaggctggagaaggaaatgctagaggaggaggaacgcaagcaacgggaggagatggcaaagctcgtggaggagcggaggaggctaagggatgagaaagcagaggctgaagagagatccaaaggcgccacacctgttggggagaaggatcctcggaaggaagtggaacgtagacggcaggagaggaggaggaaggacgagaaggataagggatcaagcaagagcaattcagattgcgaggatatcgagagaagagtaaccagggaaggggagagaaagcgggattctgatagaagaaatgagccagagaagcgggatgcaacaagagttggcgctgagggtcataagccctataattttgatgctaacaaccagggtagtaagacagtacagagcaaggcaaagtactttggccgtatgacaggcggtctattatcttcttcaagaggttttggtggcggctccttttttggtagaagtgctcagacctctgctcctcaagttaacaaggtgactaaaccgcttgttactgtaactgaccagagtaatgtagtcaaaagagatacccaacctcctgcaacagccaaatctgctactgctggaggaacgacaaattcatggactaatgttcatcgacctgtgagtaacaaaggcattattaattgctgcagcagtctatctgttacgattacgacatatgtcattaattgttttcaccctgactatcgtcttacaaataccatttgcatttttgttatgcttttatgcaggttagtccaaatgtgcagtcacagcctactggccttaaaaagtcatggcaccagctgtttagtcgctcagcatctgtgtcaccttgtcctgatgttcctgctgcagcccgtgaaatgaacgggcaaccagaaccatatggagcacaaattagcaatgctcaaatcttcctatcgcagtatccccctctggacagtaaccctagttcaagccgctgtatgcaatttccaggttttccaccagtgaatggagcacctgccaacatgtcactctctcattttccagctggacatgtgccctactattgtgagccagaaccaacagtgtttgaagaaccagaacaatttgaggacccatgctatgatcctgatgcaattgcgttgcttgggccagtttcagagtccctagataactttcctctcgacttggatagcgggttcatctctagtgacatcaccaaggaaacacatacgaagccttcaccaatcgaatctcctctttcaagatcacgtacattcgaggataatcctattaggcactcaactggaaaagggcctaatggttctattttgcctgaggctagcaatgaacaggggggcacatggcaaatgtggggcacgccattagttcaagaaagtttaggtctacgaggtcctcagactgagtggctcctaccaaacgcaaatcaatttaaccatggtgtcagtcatttgaatggtggaacaagaagctcagtgggttctggtttggatgacaatgatttatggctgcagaaagcgcctttccagcaaatgcctcttgatacaaggagtctgttcctttcacatgatgtctcagagaatgctatacacaacaatttggattttggatcaccaaacaaatcagcccgtttgcaccccattgggccacctggtcattcttggtccaagtaagtatgttgtgacattcttgtaccgctttcagtattttctgcagcaatgaagcatttgcttccattatagacaacaattcgataaccttggtttgagctagaaacatggtcataacttacaacagaattaccctaccccacactttgattatgtgagcataattttcatttaggtcataaaaaatcattacgaatgtagcttcgtgtatcaatacacataaggaccaaatgagatcaaattcacagagtattcttacaaggaataatcatatgccataggggactcctaaatttcttttgtcataatgactaggatgggtgctaccactttatctataaaaaatggggcaagagtgataccagttaagagcaaacaatacactctgagtctccaatttagaaggaatcaagggagcaaatacataaatttccataatagcaatttttgcccccaaaagctggggaccatggcccagtttgaccatgccttgcagtggttgcatccttatatggatgg

SEQ ID NO: 17843 - DNA, 894 bp, Oryza sativa
ccggcggcgagcgcggtgacatgcgggcaggtggtgagcatgctggcaccgtgcatcatgtacgcgacggggagggtgtccgcccccaccggcggctgctgcgacggggtcaggaccctcaattctgctgccgccaccaccgccgaccgccagaccacctgcgcctgcctcaagcagcagaccagcgccatgggcggcctgaggcccgacctcgtcgccggcatcccctccaagtgcgacgtcaacatcccctacgccatcagcccttccaccgactgctccaggtaattcatttgccatcaataacggttttgatctgtacgttattagctgcagcttaattaaccattgttaatctgcctatgtatttgtgcgttaattcgcacgcagggtgcactgatgagcggatcaacgtcgacaagtgatgcgacaataataaaggagagatcgatccatcgatctccagctctcatttcgcggttgctatgtgcatgcgccgtcgtcaatgatcgagctagaaatatatatgcatgttgctccttcgttgtgttacttcctgcttacctgctgcggtttgatagttagctagtgtgagagactgtgagggttgattttggggcagacgaatcatgaatctcagaggaccttgtaccactgcacgcttcaatatatatccatcaaatgcagggtcttttaataatgcatcttgtcaattagtatttcagttcattagctggatctgcatataatgctcctccagattctggcatgttttcatttatacctgttgggctggagccccttcggccgcgtgcagcctataaatctgggctggcctggaacgggaatggggctcaagcgcggcccgttatgtgtgtcgtgcgacccatgttg

SEQ ID NO: 17844 - DNA, 2857 bp, Oryza sativa
gccctttgaactggtcaaactctaatactgattgctcagtatatctcggtaatctataatagatgcatgggcacaaaactcggtaagggtgaaaaaggcattatattagttagcactaacctccaggctttccaatattgacaagattaacatagaagcatgaatatggtctggtataacacactttccttaatttgtcatattcctttttcatataaggatttttctatgacttgaggaagtaaataacaatacaattaattcttgaacatgcaaaacagtatgaagcaaaatacaatctacatatggaattttgcacattttatcatgaaaataatttctcactgtagtttatcttatcaaaagaagtaacacagagcatgagagatgcaccgctaattgtgcctcctgcaaggaagaaagttagtagagctaatcgtttgatagtatcttttagagaattttattactatgtatgtaattctatactaagtaattctgcaatatttttcatgcacaaatcctccttatcttcagtctctcatatactcaatcctgaaacaaggagggcaaagatggctacctcctcaatcactctgaaagctttcaaaaatttgatgaagctactctaaaacttcagtctgaagacctgaaacaccaaaaacaattgatagtttgactccgaattgatttgtgaaactattctaaactcaattgcgtaaattactaaattggatcaaatacaggattggttacagggcattgagtaaaactactgaaacatttgcaaactcaaaattgtaatcataaaacctaaacagatgcataaaccattcagtaaagaacgcaaggcaagcttaattaacctttgcccgtgctgtcgcagtaatttgttgcatgcccagtattgatccagtccaaaccatttctccatgtactcatctaggcttgcatgctctgtggcaaccggaattcactaataaactggtaaattgttcctttagagtttagacaatacatcgaaagtgcttgcacattactaatgcacgacattttacatattcaggtgtcatgaataaaaatgtaaaccggaaaaattgtcactgcatgcacaaatcagaactttccgtgtgtgtgcaagcatgccattcattaatatatgcaaagacaaacttaaacgacacaaggtaaactacagtatgaatacaagtggttcaatagagcacaattccagaattgaggtaaattctcattatgtatataaccttcggtacacatcacagaataatgtatacaacggaaagtaaaagaagctctcaatattggcatcatgatttagataattaaattcttctttttaatttggatgtcaatttggatggtgatctctaaagagagcacacaacatgtgtatcaatttaattggtttcctgggctatgttgctgaccaagcaattaatgaagttcaaaagaaattctctgaattttcatatataaacatcccaataatgacttaccttgttgcagtgcgaggccgatgccggggttgagaaatccgaccgcggggacttggaatgtcggactcacacacggccggaggaaggggctggtgccgggatcgaccacgaaaatcgggcggcaacacttaggccagatcggagcaaggagggaggagcgccaaaaatcaaatggaagacatcaaacccaaaaatcggttgtgatctgtcgacgaatctggcttgtcggtccttactgatctgtctcttgatcccaatccccatctctctaattctttttgttcgctctaattctttttgttcgtcctttgagcaatagggatttggtgacggccgcaagagggatgcagtagggggaggaggagcgacggcgacgatgtgaaggcagtacggcgaggaggaggggatggaggcgccggagaggcggtgcgacgattagggtttgggaggcgcgccggttgggcgaaggagggagcgagcgggttttggggagagaacacacacgcgggggaggaggagtgatctagaccgttagatgatcgggagatattctggtccgttggatttgatgaatgagtaatgtaggtataagagtgagttggtgaattatagggtagactattgtccacacttgatgatatgacattgacatatgcatgcaggaaatgcaaacactatatgtaaaccgtaatagcatatacttcctccgtcccctaatataagggattttgatattttacttgtactgtttgaccactcgtcttattcaaaatatttgtgcaaatataaaaacgaaaaattatgtttaaagtactttcgataataaagtaagacacaaataaaataaataataatttaaaaaaaaattgaataagacgaatggtcaaacagtataaataaaatgttaaaattccttatattagcggacatagggagtactaatatataaactctctctggatggctggatgcatgtgccatgaatttatcctaaattagggtactgcaaattaaagttggcaagtagtaaatgaaacaattcaacaaccaccaactcatgatcaaaagtcatatgtacaattaacaaaaagcacacggtgttttaattttagctttccaccgccctgcacatgtaactgcacgtgtaaggtatcaactgatgtgtcggacactcggactcgatcggaagtcctcttttctctaggattgaaacactgcgcttcttcaaaaattaccgggaagcacataaacgatttcactaattactctctaggatgaaaaccaactccaacttaatataggcctatcatcgatatgatctccggctgggctgcaggaat

SEQ ID NO: 17845 - DNA, 10558 bp, Oryza sativa
  unsure (1)..(10558): unsure at all n locations
atgttaccgagagattcttgaaagttacatacaagttacattatagttacagtgtaattacatgcaagttacagtgtaattacactacgattgtactgtaattacatctgacaaatattagggggagaaatttgatgacaaatatctagcaaaatcgaataggaatattgtttgcacgcttggttggagcgacagactgaaggaaaagttcactttatgagtcccagtttcattcccgttgacattttttcgtggccaacacaagatccccagtattaaaatccattcgctcggcggtttggatgacgattttatcaaatgtaaagtgtttactagatctacataaggatgaattctagatgctcgctctggaacattttttttttttttgaaaaataaccaccggagggagagattctccgcctgaattatattgaaaagaggaagggggttacaatcaacatgatgtcaacaactttcgtagttaatcagcagccttcgatctccaacactccgcgaggatgcaagcaggaagctcggctatatgtgctgagcgcctcaaacaagaagatatatatagggctgtagctctccgttggcaagatgtattttctatttttcttcctccttttaaccctgcaatctgtactgagcttccttgtaaaaccttcacaaccttgacttgtaaaaaaattactcagtagctaaatttaattaagtaactaactttagcttttataacataaaaaagaataagatgatacctaaatttgttttgcaatctgtaatctatataattaatatagacattgaacacctctccgaacaggtacaatagtagactactaagcaagctataaacacatatcgagaacataaatgagaagagaaaagagcaaagtgttatagatttatagccagctgtagcacaaactataagactcaatgtgtgtatgataggtgggaccagatattactagtttataggtaactattgtatgaattagctattaaattaactatagatgatttagagttagtagttgactatactctatagttggctatagattattcggagctagtagttggaagaagtccatctacggagtgaaaagacacaacataacagtggtagccatatcccttggcgatgacatccggcacttagtcgctgagccactccggtcgggcgcctgccaaacaacgctcctgtattgggcgggcctcgagtgctgagatggcatggttcagcgccattttccttagcactgatctgcttagtccatggctcggctctcaacgctagctgtaatggcgctgagctctgactactcagcgccatttttgctggcgctgagatccggccctggttccagcaatccatccattcacagattccagcaatccgtccatccattcacaagcaggttcacaagcagcaagcagccaacacaagcagttcacaagccggttcattaacaagttcacaagcatccatctattcacaagttcacatccacacacagccaacatacacatccatccatccattcacaagtttacaagccgcaagtagcaagcacagaacacatccatccatccatctatatatccacaacacacataggcaacacacatccagcacacatccatccaacacacatccatccatccatcacacatccattcacaaagttcacagaatataggttcacaagttcacaaaatataggttcataggttcacaagatcacaactaaagaggctatcgactgtgacacctacttcttcctaccccttggagcacgaggttgatcgggagtgtacctccagttgaaacatgagctatcttgtgttgtggtcgagatggcccctgcaacgactgtggagcgtcctacagctaggagggaccgagctccacttgctcctcctcttcctcctcctctctttcttcctcctcctctccctcttgtacaccctcttgagccactcctcgacttgtcccctgctcagcccgtcgaggtggttcgaaggcatcgtcggccctgcatcccagacatgccgccaacttctgcatcgctgtcatagagtctagcaccaacagaaggaagcagttagttccaattatgtgtgcggtgcacgaattttacaaatctacctgtaatgcattccgaagaatgctgctctcttgttgcgagctagggggcatgccaagtgccacgcccgcatcgttgactgtcctgatcagctcccgtgtctgtaggagaagttataagcacgaagtacagaaattggaaaacgagtaaatagaacccatactcaccactttgtctcgaaccggacccatcccgaccgtgctacctctatgggtacttgtatcgtacttgttctgctcctccacctcaatcaggtcatccagtatgtcggttagcgtccaagccagacgtagggcactgcggtagttcctcgcgagccaggctaagtacgcgtcgaactcttacctgttgtgcatcgcgttatccggcatgcggttggcttcgaactggttccatcgatcgatgtgtgtctgatgataagcagtccaatcggtggtcttcttgtttttccttctgtccaccctacacgcaagacatagtaatatgcaattttttaatgacaaatgtgtaaataggaccgactagatgaattatccaagaattgaacctgatttctacgtatggttatcggaggcaactggacttacttatgaagttcgatacttgtagagaatctttgcgggatcgttggcgctgagggtgggcatctcagcgctgaagcggttggcgctgaggttgggcaacacagtgccgaagcgattggcgctgaggttcttgccacgtcggcaggggggtcggctcggccgccacgctggcacgaggtcagcgtcaggtccagtggcgctgctatttacaacctcagcgctgagccgacggaaatagttgaagtttttggcagtggctagtttcgaaataagttttttaaaaagatcaatttgtcaaaaaaaaaatggtgaagtccattcgcggagtgaaaagacgcaagataacagtggtggcaattaagaaggttgttcctgagcatgcaaacaaagatggatggatcacatgcgtgcattcacgcacgtatcgacagatcccgagggtcccaatacgcaaccaccggctggtacatatgcatatgcatgcacgctctatactattagctaaacacagtagatcatctcccatctccggccggccggccgatctggaagtttcctatcgctaaccagctaagctaacctaattaacccggccttaatttctttcttctccacctccatctatcgctagctatttataccacccctcctcgacagctttgctcactccagtactccaccacaagctctagcttacagctcactaccagtgtacattgttgctagttagctagagctagatctcgatcgagacaatggcgggtgctcgcaggacgatggcgctggttgcgttggtggcggtggtggcggcggcggtggtggcggagagggcgtcggcggcggtgagctgcggcgacgtgacgtcgtcgatcgcgccgtgcctgtcgtacgtgatggggagggagagctcgccgtcgtcgtcgtgctgcagcggggtgaggaccctcaacggcaaggcctcgtcgtcggccgaccgccgcaccgcctgcagctgcctcaagaacatggcctcctccttcaggaacctcaacatgggcaacgccgcctccatccccagcaaatgcggcgtctccgtcgccttccccatcagcacctccgtcgactgctccaagtattctacattttctctctctctatcttcatttgctccatccatgtgttggcctaattaagctaatttcctctttccttttttatgcaggatcaactaattactagcttgatcatctccagctgagatcgatatgtatgggaagatctagagagtgactgttcactgctagctttgtttattttcttgctgcatgcgtacgtgcactatataatgtaataatgcgtttcaatgtttacatgtagtgtactatgtacactacttatatatttttcatatataataatctaataatgataataatgtcgtactgatacatgcgtacacacacttgaacttgctgtgccccgtttttttacttcaataagtaatagtatatggatggaatgatatgagctgttattaatttgaaaaaatgccaaatggaattctggaatataatgatggatcagtgacgaggctccatgcgaccacgtagtgatgaacgtacttccgtacatacgttttttatgggccggcagcacaccatgcctgaaaactgaaagaaaaaaaaacgtaatgcagacatgcatatatggcccatcaattcatttcttggatcctagcccattaaacaatccaaagggagaaggaaaaagtgcactgaaggtccctcaacttgtcatcgagttacaaaatcatcctccaaccacaaaaccagatatataacatctctcaattaacaaaaccgggtcactttagatcctctagcggttttaaccccggttttatcctacgtggcagctgagtcagcatgggacccacgtgaaccccgcatgtcagggtgaccacgtcatcacacaccatctctctctctctttctcagtttctcccctcttctcgtcttgaagacctgggcaagctcctggaggacatccgcttcttggtcgccgccagcggcggcggcgctcgctccggcgcgacatcggccgcatcgtccgatccctccagacgcggcggggcggtggcggtgcgacggttccacggccactgcagaccccgctgaggtgaaccgctgatgcccacgccgtcagtgaagcggtagggcggccttctcctcgtccgacgataggggtgtccggcgccgcgggtgggggcgacgaggcagggttcttggagcagcggaggaggcggtgggtgccccagctgaggttggggaacgagaagcggtgaagccacgtgcgcgacagcgacggcgtcctcgctctccctgtcccctacccgccaggccccgacgcggcacgatggcagcggctgctcggtcgccgccttgcatgactgcgcaggtccggggatgtcgcatggacggccatccgcacggcgtcgatgacctccgcggcgccgctcgggccgggggacttcaagcttgtgcgacgcatcggcggccgcgacatcgggtgtaacaccctacctccaaaatccgcattagtccgctctacacgttgagcggacccacgtttgcatggtatcccgcttacactttcgtcctcgcttcgtgtaaaagggttaacccggggataccatggttggagcaccaaggcttataagcaggccctcacccacctaaacttccaaggtggtactaaaccaccactatacaaccacttctgggccacatgggccaaatacacactactaggcttcaaacgggctggggtgttacatcgggacggtgtacctgtgccgcctccggagctcaccggcatccgcggcagtgagggagagctgtgcctgtacgcgatgaaggtggtggaccggtgggcggtggcgaggaagcagaagctagagcgtgcggcggcaaagaagcggatcttgcggcagctcgaccaccccttcttcctccaccctcttcgccgacttcgacgccacgactcacttctcctgtgtcgtcatggagttttgcgccggcggcgacctccactctctcatccaccgcatgccatcccgccgcttcccgctccctccgcccacttctacgcagccgaggtgctcctcgccatcaagtacctccacatgataggcgacatcgacgacgagcaggatgacacggctggcggtggcgcgtcctgcttcccagaccacctcctccagttcaagcggcggcggcggcgcctctgcggttcgtggccgagccggtgaaggcgaggtcgtgctcgtttgtcgggacgcacgactcacgaatatgtcgcccccaaggtggcgagcggcgacgcacatggcaccgccgtggagtcgtgcaaggcggcgttcgcaacgccgccacgaagccggcctgcccagagtccagagtccagagagaagagagagagaggaggaggaggaaaggagaggctggcctacttacgtagcagcttgacatgtggggcccacatgggtcccaccctgactcaaccgccacgtcggacaaaaccgggatcaaaaccaccgagggacctagtttgcactggttttgtaagttgtgggatgcgctgtatctggttttgcggttgagggactattttgtaactcgatgacaagttgagggaccttcggtgtactttttccaagggagaatgctctatatccttttacctccttttgccaggcccatgccacacaaaatttgattagttaatcagaaaaaaaggggtaaaatggaaaaaaagaagaagaaaagaacaaaacaaagaactattgtacacagttcaatgggatgtttattgtaagtagtagtcctcacataagtttgtgtatacccactccccttctctcgccttaattattatgaaaaaaaaactactctcacctttatgtgatacattagttctgtatagcaggctcttcatttgtcccctctactccccactccatagttattaagaccggaccggagaattaaccagtcgagctctcggttcactagtctggtggttcgaccattggttaggccggtccaaccgcggtttaatgtacaatatagcgcaaatgctgggtaccttcaagagtgtaaagataaagtgtgtggtagtggatgctattctcagcgatgccacccaaggtccattttttatgtagtttgctcagtgggctaaggcttttgatggagtttgctcattgggcctcgcatcagcccatcaacaaaagcgtagtagcttgttaccctgtctgaccacttcggttcaaagccgggtttatataaanatcgcccggttcaatgggttttccccggtttaaggggactggaccggccgaggtcttaccactccggttcaaagctcggtttatataaaaactgcacgattcaatgggtctccccggttcaattgcgcagtcgatcttttaaggggaccagaccgaccgaggccatggttagggtttttcccggtcggaccgccagtccggtcctaataactatgccccactctttcctcttaatgtgaaagaatatttttgtcaccaagatttatattctttttatgttcataaacaagggatacttcttttttcatcgtaagaggatgaggtggcctctcaaaaaaaaagagcgggtgtggggaaggggagttacaagataatttttatactctagaaaggttgagagtaatcttttttttcgtcaggaggttagagagtgccaaagaggagggtaggaacgagagggacaggaggggtccgaggggagtttggagagtgtaggacaaaaccaatgcttgtgagagtatattttttttacatcacgagggaaagggagggaagagggataggtgggcaactatgaggctcaatgtgttatttaccgctaaaataaaacttatcgctttttttatttctccccttatttttcttatctacttgtgttctattcattgacctgggtcctagttggctagctagcattttgtaataaatctatcatatatttattgagtttcaacccaataaaaagattaaaggacttgtttgggatggaaaaaaaaccctagcccatatattcgtaaggacatcccaagaatttatttcaatttactggtgcacctcaaatcataatttcaactctcatcgtttgatatatagctaatagccgtaaaaaaaaagaacagagcaactaaaataatttacaggataaaacttgtatatccatgttggcaatttaaaacacaatggcaaaaaacaaaccaagatagaggaaacctgaaaatcaactctcgaattatggttgaaaattcaaatttttgatgtggttgataagccaatttgcaaacgcgcggtgataatattgtaaacgctacaaactgatagttaaggtccttgtgttcgggtggctgcctaggttctgtcgttgacatctccactgcaaatagccattgatgtcacgaaaaattggtcgaccactggaaaacattattagtcatccagacttcatgataacgctctttctcttgtgatagaacctttttatcttggttcaagccatagtataggcacatatgcttgtttcttttagatttaatctcttgagagaatatatatatatatactctacctacatatacagatacgttcaacagtaaaacgtgtgcccaccgaagttatgtgagttaggcctctaatcttatttatcatatgctagtgagcgtgtgacgtccaattcttttttttcaaactctctgtattaggcctagtttagttcccaactttttcttcaaacttccaacttttccatcacatcaaaactttctacacacataaacttctaacttttccatcacatcattccaatttcaatcaaacttctaattttgacgtgaactaagcacacccttatttcaaagggaatagtgctctatcatacaagcctgatgaaaacaccaaggttgtgtttagttcacactaaaattaaaagtttggttaaaattggaacgatgtggcggaaaagttagaagtttgtgtatgcaggaaaattttgatgtgatgaaaaaattaaaaatttgaagaaatattttgaaactaacacgggccaagatgaaccgatggtagccctctttaatttgtctaacgtctacatagaaagttggccatgggttgctgtaggtggcatcatgatatgcattaatacctaggaggaggagtaacggttggcaggtagatcgatacgagaatgacatgaacataatggatcgtcggcttcaatttggaagccacctgctggcgaccgacagccgtcccggccgggagggataacctacgtcaacgataaataaatactcctactaactggagtagctagcagcttggtcttgtgaaaaagaaagataaaattctactactccatagtgtacgtggtcttatctagagcttaattggattgcaaaatagcatacagctgattgattaaaaactacgttaaacttagtaactgaaaattcttagatttaattaattgatcgatctgctgagagctttgcattgtggagcacatgccaagccagctagtacatttttgtgataagaaacatgaagtttcggtttaacctcttaaatacatgcatgcatggttgatacaatacacgtcctgaacatgaataaatactactaaatatatgttatccgaattttatcatataatatatttggattagtttcttaatatgacttttattcttttatcccaattgtatatcaatctcttgtgcactaacactggtggagaagtgttttttagtcccgttttataacccccttagtcccggtttttaaaccgggactaccaattcgagactaaagatcgctatctttagttccgggtgaaaaaaccgggactaaagatcgatctttagtcccggttggtgttatcaaccaggactaaagagagggtagcggcggtccagctggtcctttttttcttttttattttctcccgaatcgagtggtatgcatatcgtcaaatcaaaccccaaatccacatcacaactccacagcacgattcacaaattcatcacaaattcattcacaatatccattcacaatatcacaaatatattcacaatattgattcacaggttcattgacaacatcgagtcacatactcattcacaacatcccagattcattcacaacatcgattcatagattcattcacagatcaaaacatccaaaccacaaataaaaaaaacaaaaaaaatcgactcaccgggcggcctccaatcccgtcgccggccggccacccatctcgccgcttcccctccggccggatctgggggaggggagggcgaggccgcaggcgactggcctccatcccgccggcccgcgccgggccgccgctggccggcttccatcccgctggcccacgcccggccgccgtcggctgcctctgcaagggggaggggaggaggagagggggtgagagaagagcaaggggaggatggaaggagaagaaaaagagataagcatggagagatgttgcgcatgcacatgattcagagagagaagcgtgggctggtgcatgcgctttcttcccggttggtgttaccaaccgggactaaagatccgggggcctgacaaggtatgataggtttagaaccgatatcaaatatatccgctgtagccaccaaccgggactaaatctttagtcccggtttttagtggaaccgagactattgtaaatttcggtcgaccgattaaagatg

SEQ ID NO: 17846 - DNA, 11909 bp, Oryza sativa
gctgatatgatggcacttggatccaaacatcatgaatgcgctcaactacttgcatgttccaagtgtacaacatgcatgctagctgctacaaacgactagctctgttaggccgctgctaatcattttctcatcactaatactaacactgtgtgactagctagctaaaccagccctaacaaccaaccaccctgattcaattgaattgaattgaataacattagacgcaccgacgactaagtgcagtcccaaccctccacctaaaatggtgtctatatatggcattaactaaattgtcatgtatgacttttaacttatgtggcactatattaatatattaattaagaaggagagtgaagagaggaagaaactgggtctcatgcaagacacagcttcaacacgagaatctatgcactagacactatcaagttttgcattggaagagaatagtgtctttataatagttgaagaataaatatgattggtagagaagagagatgatgtatttattaatggcccactttaagaaatcatgggttgtggagtgtagtttttattgtgatgtcttattgacatgacaccatagacactgcttatggacattatgggttggaactgccctaagaacggtgcctaaacactagcactccaagcttaattacactatgtgtacgccaattagaaaatgtcatgaaacattctataaacaaattagatatttactcctaatagtattatacatatctggaaagtctcatactcaaatttaatatattttagctgtaacataaagtgaaaaaacccgacagttttaagggtaaaaatgtcaggattttatctttcttgttatggctaaaatataatgaaactaaagataagatttcacatataggtgtaaaactattggaagtatgtgtctaattttttctagaacttttgtggcatttgctaattgatatgtatagtgtgtacataagtaaagcttctgtgtataggatatgttctctaattataattataggtggactatatattccacgtagtaactacatttgacttggtcgatgcatcggcacagatgaaatcatagctacttaaagccccctacattcccgggaattctcatcgatcgatctcacctgcagcagcaaacgagcaccacacaccagcagcagcagcaagtcgatcgatcgtcagcacacacgaccaagatcgagatggcccgtgcacagctggtgttggtcgccctcgtggcagcggctctgctcctggcgggcccacacaccaccatggccgccatcagctgcggccaggtcaactccgccgtgtcgccctgcctcagctacgcccgcggcggctccggcccgtcggcggcctgctgcagcggcgtcaggagcctcaactccgccgccagcaccaccgccgaccgccgcaccgcctgcaactgcctcaagaacgtggccggcagcatcagcggcctcaacgccggcaatgccgccagcatcccctccaagtgcggcgtcagcatcccctacaccatcagcccctccatcgactgctccaggtaatcaaattttatatcgttttgcatgatcgatcatctaattaactaagtacatataaattaatttgtgcgtgtacgtttaattgcagcgtgaactaatctgatcgatcgatcgctaccggccggagggtgtgacatcgcaggccgtacatgcacctgtcgtcgtctcacgctttgtatcttgtgttatctgtgtttatgctgaataaaatgagagctagctagctaggtcgatcgatcgatcgccatgcatgacgagactagctagcattgctgctagatcgatgcatgcatatggttgatcgcccggtcactacgctatctgtttccttaatttattcgtcgatcgactacgtacgtacctgagagctagagatcagtttttgtaccatgcatatgcatatgaacttctgcatgtacatgcagtactacttgtactacgtgcgtgtacgttgtggattatacattatatagacagcttcttttggtatacatatacatgttctacaccgattcctccatcttcctggcattacacatatatacaaacttgggtaaaaaaacagtactgtgttaatttgtcttgaaatatgtatactctaataatcaattaataaattactccctccatcccaaaatatataagcatttttaaaatagcgtcaagtcaaatatttttaactttgattattaatagcaaaaaatcaataatgtaaaattgatattactagatttatcattaaacaaactgtcgtaatatgcaactcttttcatttaaaatatgttgagtttaagaggagaagaaaagagaagattgagaagatacgcaacatgaggtgtgtcattagcgcatgattaattgagtattaactattttagtagtgtaaaacacaccgtttagtagtgtaaaaaaacacaccgctaacgagacaaactttctctctttcacatgttgtcgaaagcagccctactttaacaaatattgttagtcaaagtagcatcgttaagacaatgtcgaagtacaacaatacttatatttttggatggaattattaatatagtcaaagccgcactttgaaagactattgaaaggggtaaaactatgacaacacttaattaagttgttcaacgaatacaatgttggagtattgtattaattagatagccaacagatatcttgcaatcatctgaccaagctttatatctctaccccgcaaaaaaaaaagaaagaagatatgtccagttataacttacctcacacattttataggctcgcagagtgtgagaatgattatcctatctgctgcataataaaaagatgcttatttttctagacctttagagtgaatatgataactttttcaatttactcttattcttttgatataatataatgtttgaaaagatggatggacgatatatatacaggcaggccggtgtactactatatatagttcctaaagtttcttgttcttcatttgaatcggatgcactgcaggccggccttgtttcatttctcctggcgaagatgcccttggcccaaatacacgtcaaaataatctcaaatatggaaaagaagctatgccatgcataaatatttatccatttggatcatactccctccatcccacaaaatatcaattccaatcccaagaagaaagtagtggagagtaaaaatgaccaaaatacctcttattgttgcaaaaggcagtagtagtgataggtaggtaaaaggtatttaagggataaaacttctcattttatgcgttgagagtaggtaggatgatagaagttgatttctttgggacaaaatttaaactctagaagataagttttatttggatagagggagtatatacaagggaaagggcttcatggcccatacatccttacttatccactactacagaagcactaatcggtgccagttgagaaacccccttaggtgccggttttcccaaccagcaccacggaggcggcattgattactcgggtcaaaaccgacacctttgaggcatacacgagccaaaaaaaaaacggcttgatgtatcgagccgtcaagctgatcccaaataataaccaaatcccaaaattgtgtcaaatccatgaacacgtgaactaaattgcgtcaaatccatgaacacatgaactatagtaaaaaaatccctagaaaaacaatacatctagatcaaataatacacatctagatcacatcaacatgaacaaatcacaaagagggaggagaagagatggatccgtggccgccaacatcgtcgcacctccagccggctctctcctaccgccgcatgccgcctcccgccgctgggccgcccctccgggctgccactgggtcatcgtctccactcttgccatgtaacatcctgaaaatccctaataataaaaatcactaaaatttcaaactttttaaaacttttgcatcatgctggatgttatggttgctattgcttgccaaactataaattgtcacgattgaagattaagctaaagccgtacaactaagaagtaattagaataagataattattattaatcctataaatatttgtgtacatgatagcaagccaaataaaacacaagtcaattattaataattacaaattgtatgttaaatacttgaaccatatcgacaagtgtcatgacatctaagtaaccacgaagtagtcaccactacaatgattttatatatataggagtgttccactagaataattaaattaatatttataactttcatcgagtctctcatgggatgaattcactcatgtaaaataatttgtcatgcaaataaattgaactttatatataaaatatgtttatgtgagtgtttaattaaacatttaggtcaatactgtaccaagtatcaatttacttttatggaataatagattaaacgtgtccttgtaaaatacattgttatacaaataaactcgactaatgtgctattgtattattaaggtcacattagaatatttaattagtttttaataaatatcaaagcttataggttatattggataatttttggataatttaatggaaagcaaattcatttgggaactaatgaataaccaaataaatattcaaatcaaacatttgaattctcaaaaccaaaatatattgattacatttcaattcaaattcaatcccattcacttttgcagattagcccctccctttccttcctttccctttttcttccttttctctcttttctcagccgctactattcactgtccgccaaccgttcgatcccgtctaccgcgtgcaccacatcgcttccggccgtgccagtcacgcccgtgctgcaccgcaaccgcgcctccttcccctcagccgcgtccgaccccaaccctagccgcaccgcacttgccgctccgcaaccgcatcgcgttgtatcgcgccatgcgtcgcatcgcgccggacccacgcccgcgcccgcgtcgtcccttccgtgccgcgtcgtgccagggcccgcgccacgccaagccgcacctctaaccgctctcctggattctctccaggaaacacggagctgcgccatcgcccatgtgcgcgcgtcgccgtcgccacgcttgccttcatcacccagacacgcgcgtcccatcgcccctatccatgcccaatggataaaacggagccctctcctccagctagcacccagacctgcagtctataggttataggtgtgatgattaagccacagaaccttaatggagaaggagatgaatctcagccgcgtcatccacctcattgctcttatccgatcaccattagtactctagctcgcctaggcatgtgctggtgatcttatccccatagtttgcttgcatcctaagcgaagccctcaacaaaatccccatccctctcagccttcttctcgtatgcatttcatcgaacaccttgcaatcaccctctcaccaccgctagagatcaccattgtgaggctccccggccggagctggaggttggagggagtggaggaagagccgtgctgccgccgtcgccatgggggaagccaggtagccgctggacatcaagaaacgccgtcgagcaccttacatcgccgctgtctgcccctgtcctgcaccgcgtcgagctccacttcgccgcgtttcgccatctcgccgtctcgcggtacaccctcgcgcccgtagcgtcctccatacatctaattgctagcgccggctccaaaatcggcgattagcgcccatggccgtgccgccccggccgccgtttcgtcgccggcgagctctccgtgggtaggctatcccggcagctcccctctccatatagttcgtgaaatcgaatccccataccccgtagatgctcccgcacccttcaattcggccggaggatgtccctagcaccgaagccccttgtagccgagctcgggcatggcgtcgcctgatggcgccgcgcgcccccgtctcctcgcgcgccggctgccatcggcgggagatcgccggagctcctccgcgcctcaccccggccctcgccgagccgcccgccgccgtcccggctcgggccggccacgccggctgcgccgagtcacgcctctgcctcgctcggtaacgggcgagaggaagaagaagatgaggagagagagaaaccatgtgggacccacatgtcattagcgcacagtaatcctatccctaacggtgattatcccactcaatggcaggtggggtccctatagttaaaatctaagaaaacacaattatatattttattcctatgacaggcgggacccaatggtaattaaacaagcaggtttgaccctaagtcaaccagggccggtcccacatgtcaaccacagtgggttttggataatgtttccgattaaaaataaatcatttatgaacagtgcatttttacaatttctcggattaactcaaatttgaatctttaaattagtataacttattcattttagctccgattcgagtgaaacttgaacctaaattcatctaaattcataagctttccaatggtatataactcactatttaataaaatatattaatatcaaatgattagattatggtcaacttaaaaatgtgctaataaataaaattgatattgtacagtagagtagagtagatgtcaaataaatatatttaacatgttttttcactgtagcaaccacataaactaagtataagtgatgtctcaaatgaatggatgtataggaaaatactagtgcttatttaatattcgatggccatataattaaattcatgacttaaaaattagttacataaagtttagctttatattttgtaactaaaatattaatactcatagatgaatctttaacttgtttatgagaaataataacagagctagtgtgattaaatcacctatacgaaattaattacttaacgtcatgttccttggaatagtatcttttaagttggtaatcaatcttaagttgataaacagtaccaactcgccaaatccacctgcatcacatatactgtatagcttacagtaaatagctcatgcttagtaaatgatctaatattaatatgttattgcactcacaactactgtacagtccatttaaatcatacacaagaacaataacctacctttttcatatattaaactgaggagtctatgataagcgtgtatagtagataaaacattaattataaatcttgacctcacacaattatagtttgaccgtgacttaggattatttatggtaaaattatgcattgagataaactttaactataatattatagaccacactaatctaacctacatagcatgtaattcgttggaaccctaatacagtaatatttgtagagccatgcttagataatccatcctgttagaactcttgttatgattaaattatccactgagccttggtaaatctcctgtagggtgtcaccatttaaattacgatcaaagctggtttagccatgaactccacatagcaatagttgatagataattccgtagtcctgagtattgagttctgtatgtgagcagccatagtttagacttcatagcaccttacaatccattagcaagcacgagtgatatgaatagccctaggtatattccgaacaattatattttgtttgtgcatatttgattgttgcttgaatattggttttctcgcatattatagaaattgtatatcggttagtcgtgaggcaacgtatgcagcttccaggaggtgaaggttgatcaagatcatatcaagaataagaactatcctgagcaggcaagtcatcaccccattccttgagcatgttgatcccaattgtgaaattgttttgtttacaaataaaattgcatgcagtgatgaatatcctacttgttattatgccatgcctttgattattgcttatctcattattcccttgtacccataattacaatgagtccctagtcacttatgacaaatgcttagtaatgctaatttagattcatgcattctcatatttatcaaatgctttatacttgggaaactaccttggggaggtagttgagatacggcatgtggagacatgagtgccacgttgccatgacattgatgagatgatttgtgaaagaaaatgaaaactaaacaaatgttttcgactagggcggctggaggacttgggtggtgtccggaaaaggctagtgccgtccctagtcagttaaggaccgagccatgaagctaagcatgaaacgacccccgtaaaaccgtacttctcgtatgggtatagacctagcagagtaaatagccgagcggaggcagtatccctgcatagtggttttcttgatgtgtgtgaggtagggcctacggtggggcagccattggtaggactgcgaggggcgggtgcctacagtggtgtcgtcatcggtaggactgccatatgtaaacctaaacttaactataacttaatgcatgtgtgagtcttcctttcccgggagcgccagaactcctctcactgttagaaaccttggacgcctagagtgcatgaggactaaagttcatggagcgggtactgccaaagtgaggttgttgaaaggctttgccatggcaagtctcattcgttgggacttaggctcatgtgttgggcaagtcgcggagtacgggtaaagtgtacatccactgcagtgtgagtaaactaaatctattcgaatagccgtgctcgcggttattgagcaccgagacgtgtattacacttggctagactctaaattcttaaactggttaggtgggatgttgcatgatgattttgtactggtggatcaacttctcgagaggcgagaaggggtaaaccccagaaaaccatgacgaccagtggcgggaagctatccttgggaacacaatggatggtggacagaaccgtcgctgtttaatgaacaatagaattaaaacttgatcagtttatactaggtcttaggtttgtgaaatgatatttgaaaactcagctttacgcaaagtaaccatagccactccttgtattatcctgtacattattgcattttctgtggtggcttgctgagtacttttgtactcattgttgctctatgtatatcttttagcagagtattgaagagaagcccttgttagtacgcttgcgtacctaacaagatgatcggagtgcggttctgttctaggtctcgttccccagtcgactgcttgtggcatgtcaactgagcccttgtattattttgtcttccactgttgtttctctgatagttgttggcctgcctggccctaatgtaagtatttaactctcttagcctgaattcattcgtgatatgttgtgattcggctatgtatgtgtgtaccaactactgatccagggattggtactgataaacacagaagatttccgatttacaaaatcgggggtcgacatgccagatctggcggaggggagggccccgccatgttgccgcctcccttcccgctggatctggcggagaggagggtgccgccgcttccgggccgcttcctcccctcccgtcggctctggcataggggagcacgccgccgtgctgccgctggaccaccgcctcccctcccatcggatctggcagaggggagggccccgccatggtggatggaggaggaggagaggagtgctgccactgttgtggatggaagaggaggagagaggagaaggaagaaatggagagaaagaaggaagaagaagagaggaggaagtggattgcgggtgcgggagatagagttcgagagagagggaggggaggaagagataaggatgggagtagatagggtggctcagctcggctcggttagttcggcagataggtgtcggttttaaaaaaaccggcacttataatatattataggtctcggtttttaattaaccgacacctataatatattacagatgccggttttttcttaaaaaccgacacccatagtataagtgtcgatttttctttagaaccaacacctatagttgtttaaaggtgtcggtttttttatgttttcatcccgttgaggtttgaaaaacattatatataggtgccagttttagcacgtccggtacctatagtgccgatatatatgtccctttttgtagtagtgatccctcggaataatagtaaccaaacaatattcttattctgcaggtgtgaacaaattaaacttagttttgtcttgatcatctgccaactattctttttaaggttaactgtcgactactcgcatttctcatatacccatcctcctcgtggaaaacagttctcctcctagactatgtttagttcctaaaaaaagttgaaagtttagggaaagttagtagtttggaaaaaaaattgaaagttcatgtgtgtaggagagatttggatgtgatgtgatggaaagctggaagttgggggtgaactaaacacggccctagtgttctctcgttccccaaaattaatataaatatatttactctttctacacatttacatcaacacaattcgcaatatgcgaagatcgtttcatattgccttccacgtgtaccgtaaaaggggagcaaatacagtcgacagtggatggaggggaatagctctggttttcccaacagccaaccaccagctgctaagctagctcccaatcgtattgaatgaacgtatggacacatgcaccgtttaaacaccacaaacccatccttgctttgttaattgctcgatctcttgcagctgcgtgcaccgcatctgtgcatgcatccacactagcaactctacctatttaagcccctgcattcccgcgtattctcctcatccatctcatcagcaacgaaccaattcacaccgatcgatcgagcaacagtagtaggaaccatggcccgtgcacagttggtgttggtcgccgttgtggcagctctgctcctcgccgccccgcacgccgccgtggccatcacctgcggccaggtcaactccgccgttgggccctgcctcacctacgcccgcggcggcgccggcccgtcggcggcctgctgcagcggcgtgaggagcctcaaggccgcagccagcagcaccgctgacaggcgcaccgcgtgcaactgcctcaagaacgcggcccgcggcatcaaggggctcaacgccggcaacgccgccagcatcccctctaagtgcggcgtcagcgtcccctacaccatcagcgcttccatcgactgctccaggtattcatctcatcatctctaattatatatattctgttaaatataattaattaagcatggctaattgcatgatatatactccatcatctaatatatatatgtgcatgtgtgcagggtgagctgagctatcgatcggatggatcatttatatgcatacagaagcgcgacggtgggtcgatgtgtggagccgatcgaattctgtatccaatattagtagtatctgtacgtattctggaataaaaagatgagctagctaaggtcgatcaatcaccatgcatgcatgtgtgtgcatccatggttgatcggcccggccggtcaggctagctagctttcttcttcttgtgtgttcatctcgtacgttttgctccttctcgaggtgtacgtgtaccagagagagctagctagagattctacatgcatgtactgcaactccttgtactacgtgcttgttttggaatattacacatacatatagctctttttggtacatatatagctctttgtagagctccacactagtatagatactctcatctgtgacgtcctctaacatgcctagaattagcgggctgtcacaagaaagtcatttcaatcgggccgaaaaaacgcccgattgagatatggtcataaaactcacgcctgtcatggatgacacctatttgtgacgggcc

SEQ ID NO: 17847 - DNA, 4875 bp, Oryza sativa
cgccctcccagcccgaccccccaatcgacgacgacgagtggggccgggacgacccctcgtcctccggcaccgggtggggcgagccgggtgtgtccgaaccccaatccacctccgccgccgacgacgagtagggtggggaactggggatccggcgccaccgccaccaccacctcctgccaccggcggggatggaccgtggtgggggtgggggtgatgcctccgtggcggcgctgctgctgccgtcggcgccgatggcgtacgcggtggtgactgacccggggacggtcgacacccctgacatgcccagctaccagccatacgtgtacggccgcctcgaccccctgcgctgatcccgctccagatgaaggaggtcgacctgtccgtcgactgcgcgctcggcgaggccgccgtcatccgtccgcgcgcggtggtggctgcacttcatcacccgcagccgcgactgtgacgtccgcgtcgtcgtgcccatgggcgaccaggtaaatctcgatcggatcaaatttggagagcgaatgttgtttaatttggtactacttggttgacgtgcatgaatcaaatgcttcttgaatgatggagtgcaaaccaaatatttctggtgggaactggcgtattgcagtgttatacatgctgaggttacttgcagatcagagataatgaaactttttatgcactgaaatgtgctttgtactgtgagtcactctgaagatatttctcctgtttgcaactatgagacatgctcaattttgtatttattttacgctcttaaattagttcttttgctatatttctggatagatcgagtaggtttcatttttaagaattttgtttctggatttttggctagcgattagttcggatactccaatgttaatgttgtgtagaggaagatagaactacatgagcagaacatctaccagtcacttatccatttatctcttcagaattttttggtctcagatcaaatgacaggagaaaataatggacgccttctctatttttcaatagatatagactcagaaagggaaaaacccatagcttatttcagtttcattttggtttatgcctcatgaacttgttgttctctgaattttctaaagataattaaactggcaaactgcttgtgtatatgtgtgtgtctctccaataatgcctgccatttcatggtttatcatgtcatgttcctgaagtcaaaattcttatggcataagcaagtgaaagtaatcccttgctttgtccagtggaaatcaaatacaacaaggaatgtgctggtttagcagagtggtaacctgacttgtgtatcaaaattttggcttcgatctgtattatgtgattgcccagtagtagatctagagttcgacacaattagtggctagggatttggttattggcccttgaccagaagtttaatgattgccagtggaatgtcagtagatctagattgggttcttgtgtcaaaccctggctcgcttcatttatcaggtagcaaaccatccatccgttactattgttgccaattactattttttctcagagctctgattcccagacattaagctagacaagttgattcccatattagtctacattgtgtgatttggtccataagagtaatttaatttctataatagagatttaattttcttggattagtcctagcttataatatttattttacatctaaatgatttgtttcttgtttcagccttctaagacaattatgtcaggaccaactaattttcctccctctggccattttgtgaagacctaatgttgtggcaccacaggtactttcacactagagtccctgctactcataaaactttgtttgtgtctggtagtgaattgtttggcatggaattaatcgatcagtgtcttatcatacactatgcttttcttggtcacatttagttagaatgcagatgttggttaatatcttccctagaaaaacaaatttaattagaatgtagatgcttttcttatgctatttttgccttgcaattcatcgtaaggattgtgtgaataattagtgttacagtgttttgttttctctgtttcagtaactaagaaaacatatttttagctcagtttgtatgcatgaaaacattagagctttctagcctctagaagtgcaaatacatacttcacaagtctaagtccttgtatatcttttggcaagacacatgctgctacatgtgttggatagatacatgccatccaaataataaattagttttagtctcttgtttttttcttatttacaaaccttttataatttaccttgttcacggcacttcgtatttttcttagcaggccatagtttgaatctaaagtgctgcagttaaatatctacagaatgttgcacatcatgaaaatcagggtatgcttctcattcaggccatagcttgaatctaaagtgtatgcagttaattcagaatgttacccaaggttgaagcaccacagaacacggactgttggaagacaattttcttgtacatgtgtttgatgaattgtaactgaacacatttaattttcctatggaccatttgtatatttctaaatccgatttgaatgaatttgttggtactgaacttagatggactatttttgtaaactttagaaacttgaattttgatgtatgaattgagatcgatgttcatatatttatccaaattgctagcaaaggcctgaggctagctaaaaaaacaatttttttttgtggattatactcatctgtgacgggcattaactcagagcccgtttgagatgagagtcatccatgacaggctatactttaggcccgttagagatgagagtcatctgtgacgggctatactttaggcccgttagagatgagagtcatctgtgacgagctatagtttaggcccgattgagataagagtcatttgtgacgggctatagtttaggcctgttagagatgagagttatctgtgacgggcttttgtgttggcccgattgagatgtgtgtcatccgtgacggccggatgtccgattgagatattttaccacatcagtgacctttacttagtgacgggtgacgggggctatattcgaaagagatgaggcttttagcccgttagagatgactgatcctgttctagtgccatctatctctacggcattggcgcctgtattgcaatttccataagccattttctcgatacataattgctactatctcatcccataatataagaagttttagagttcgatacgtcattaagaaagtaaagtaaaattaaatggaggatgagtgtaattagttgaaaattggatgtaggtgggaaaattgaatggtgaaaagttatgattggttggggacataatgttggtgaagaagatgttatattttgggataaattctaaatcctagaagttgttatattttgggacggacgcagcgggtctgggaggccagcggcaggcaagcgtcgcagcggtcggcgagcggcggcagtaggtggcaagcggaggtggccagaggaggagcgtagcgggcggtggacgagctccgccgggctactctgcccgccgcgtcatcgtcgtcctcaccatcggccgcgccatcatcccctacggcgcgcaccatcatcctctatgccgccatcatcctcggaggtgctccgctccttcaaggagctatgcctgcgttttgagctcctcgccgatgagcccaccatggtagaaggcgtgttgcccgggtctcctctgcaccccaccgccgctaccccgcccccttgcctccagctccggctatcgtcgttcctcctacctgcttcgtgcgtggccgctccgcccgatgccaccccgcttgccctgctcctggctgagagaggatagagagaagagaattagagtgaggatgatatctgggccccataatttttattccctctttgctaattaggaagccacatcagctaaaccacccatatatactgccacagaacctattttgcacggttttgaacatttaaggggtagacatatctagtattggggattgaggatgtcatataaactcgatgtaaagttaagggatggtaggtgaacttattccttttgaaaacggctaggattggcccatccaatattggtaataggattgaaggcgatttaaaatatggcccatggcccactacaaattataattatattggcctactgatgaatgctaccactgagagctgccgagctttgcttgtgtgatagcacaatcctatagctgtagatgtttaattcaagttaatggtgtcttatttagcatttatatatgctttttaaagaaacaaagttgataaagtactcttgtttctttaatatggacaccttcttatgtttatctgcatgttatattttcccgcaattaaaacatattaattctttcttgagtaaaattaaacttaaggtggatactaataagtgcaacgaaacactttttgcgatgtgacaacttgcttagtccgtactaactttaaaccgaccactcaagtgaaaatgatcttacaagacgctctctataacacgcttgtacgttccaacccatgctagcaggatagtactaattaattgttattttgcaggaaaaaaaacccataacttgcactgtataactttatataagtatttaaggtccctgcatttttcaatggctatttttattggagaatttgggcttgaggactaatgttgtcatacattttaactaaggttgaggacaaagtagagttgtgacaggaaccgaacaatatctattaaaattattacttccttaaggttaggtgtggaaaattagttgccaagtaaaattccatgggggtccatgcatgctagctagca

SEQ ID NO: 17848 - DNA, 4431 bp, Oryza sativa
agcaggtagaataacaagttactccctccgttccactatacaaggcgtaattgctttgatgtaaaaaccaaggaagctcatataactaccgcagaattagggggctttaaaacaagcagagcaaccaaccaatagttttcactgcatgcatgcatgtgcatggatgagaattacaggattcaaagaggcgcctctgcagcttccttcaatgcatgcatgcgcatgaacgagaataatggagtcaaggaggtgcggctgcatgtgccgccctatattgtactggaacttgtgaaaaaaaacagttacgccttgtataatggaacggagggagtacataattaagtaagctgaacgaagctatacgagagacactctcactgaacgacgagtagtagtgattactactcgccggttaattaagtactagtcgaacactaagggcaccaacaatgattatctataggctctctacaagagatccatgtcagcatattttcctatttgaaaggtattaaatgaagagagagagcaaagctatctactaacttagagatagtctatagagaaaaacgaggcaatacatgagagagctactaacttagcaaaactatctactaacttagagatagtctattaagatggtttactattaatcgagtctattgctgagatgtacatattttatagataacaccttactttactattacggatgcttaagagtattatatgtatatgagagaggaatcaagtattaatggtgctgtttgattagctatagaaaattttaagatggcatttaattagctatactattatcaaacttattttaatggaacacatattagagcaagtttaatagtatagccaactactagctccaattcatctatagccaatctaatagctcatttgcacaatagttacatactatactattaatactgatcccacttgttatacatacaccgtgtcttggagtccgtgctatagctggctacaaatctgtagcccgctgcttttctctttttatttatctccttaaaatatgtttgcagctggtttatagcttgctattgtactgctcttagtatatacatcattgagattgagaagagtctagtatagctagctcgatggagtccaactcccaacgacttagcagcgactgccatcaatggatgtatatatgattccatctatcatccgcatctcagctcgttgcccagcatcttcctatttataccctccacccatcgaccgacgatccatcgatcaccggcgacgagagacactctcactgaacgaagctacctagcttaattacctagctactcgatcgatcatcagtctagatatggcggctttgaacggtaaggtggtggtggcggtgatggtggtggcgatggtggtggcggcgccgggggcgtcggcggcgatcacgtgcgggcaggtggggtcggcgatcgcgccgtgcatctcgtacgtgacggggaggggcggcctcacccagggatgctgcaacggcgtcaaggggctgaacaacgccgcccgcaccaccgccgaccgccaggccgcctgccggtgcctcaagaccctcgccggcaccatcaagtctctcaacctcggcgccgccgccggcatccccggcaagtgcggcgtcaacgtcggcttccccatcagcctctccactgactgcagcaagtaaattaatcatccatgcatatgcatgctactttttttcaagttaattcaacttaatttactgactaatccactgtatatatgcatgattatttcattggtgcagggtcagctagatcgattaatcctgcttggaccgaccgatcgatatatcgatcgatgctggctcgcagttgatcaactagccaaaataatagctacagtaaaaataacagctggggcatatcaatgcagcgctggtcatctctctctctatctctgtatactttatgttgcacgctccgtgcgtgcatgctatcttaattttcttgactctgtacaccgctctgtgtacgtgtaatcctacgttgatgaattgcatcttgtccagacttggacctagctaactacgtactccagcttggcagcttcttgccgaggcaatctgtagtaatttccttgttacattcccctgtcccctctactccctctatcccataaaaacaaacctaatatactaaatatgacacatatattctagtactacaaatctagacagatgtatatttagatttgttatactagaatatgtcacatccagtcttatgttcgtttttttggacggagagtatgtcatatgcaaaaattgataaatgcacatcatgctccctagctctgcactttattattatttttaatttacatgacagctgtacacacatacacaccactatacacacaacattacactcatacctccgtgaatacgtcctctaacacatgtttcaagagacaaaaaccaacagcacatccctaatatcactaaagtcatgttgaaatcctatccgcatctgtgtaatactcgtggccactctattacttgattgttcacaaggaagaatgatactctgaaattgattctaccgaaatatgaaaaatattatatattagaattgataaagggagaagaatgaacataaaaacagataataaatcattttctatcgtcggaatcacacatctccaacggatggtgtgtgatgttatagcctgatccaacggtttaaaatggtgataataagatctatgtctactagctagtagcactttcataagaaaacagctgggttatgactggatggatagacggttcggtcgttgtacacccaaactcaccagggttaaagtactactatatatatatgtttgaaactagtgttcactaattctaagagtacatagtggagtatatgtgcttattcagtggttatatatactcctccgtttagatattagcggtgaaaacggatgtgatagtttctgatccgatactctccgaatttggttggagcaagatatggtatatgtttgtttaaatccctcggatgcgaattgtatggtgcaggtgtggatcggatgtggtattgcaaaaaatcggtggatataattattcggtatttcgaacatattatccgatgaaccgtttagcaaattaaataatccgaatttttcagcccaccagctcactagccgactatctgcccatgaaaacggtaaattagctcaacccacaaattcaggacatcaattaacccttgaccttaactcaccatctcaacttctgtctatttcgcttgtgcatctcacggatgctgctgccatgcacaccaaaatggagatcatgcatgtatatatgttatattgttactgtgttgatgtatgtacattatactgagtccgcaccatgtgaaaatgtagtgaggttgacacgtaggttgtagtattttatttctttattttgctgctatctatttatattgattgttatcttgatgtcatcactactctggactctgtatatgttgacaccacgtcatcgataacgatcccagttcaggtacagagataaaacggaattaattggtttggatgggactaaaaatttttaggcatcatgtcggatgtttagacactaattataagtattacacgtagactattgacaaaatccattccataaccctgggactaattcgcgagacgaatctattgagcctaattaatccatgattagtctatgtgatgctacagtaaatatgtactaattatagattaattaggcttaaaattttttttacacgaattagctatcaattatgtaattagtttcgtaagtagtctatgtttaatactccaaattagtgtccaaacatccgatatgacatggactaaaatttagtcccggatccaaacaccccccaacatcagaaagctaacaaagtactctcgtttctaaaatactaggtgatcctcgcgctttgctgcgggaattactaagtaatttttaatatttttttcgattatcgagctaggattaaaaagaaaaaaaaatgaaacgcgagggttcatgaggacttatcataaaacaaacagatgatacccacgatttaacgtggaacatgtatatgttaaatattataaatgatagatatatttgttaaaatattgtggaaatgatgtgaagaataatgattagagatatacttgcatgctggtttgtagaattaaataaattatagatgattttatatgtttgtatgaggttaaatatataattattgttagtgggtgatgatgcatgtgacatggttacatgttgagattcagaagttagggggcattaactttatagtaagatagtattaacatatatctttttaaattatcagtctgttatattttcccggg

SEQ ID NO: 17849 - DNA, 5017 bp, Oryza sativa
tgttgaagatgaattcgctcgatagagagatcatattaattccaactggatcgcccatgatgtaattaaatcacctgatactgatagagaacacatgctgtagtacatcattgagattgagaagactctagtagagtacctatggcgatctgagtccaactcccaacgacctagcagcgactgccatcaatggatgtatatatgattccatctatcatccgcatctcagctcgttgcccagcatcttcctatttataccctccacccatcgaccgacgatccatcaccggcgacgaggagacactcactgatataatcaagctagctagcttaatcacctagctatccgtcagtttagctagatatggctgcagttaactgcaaggtggtggtcgccgtgattgtggtggcgatggtggttgcggcgccgggggcgtcggcggcgataacgtgcgggcaggtgggatcggcgatcgcgccgtgcatctcgtacgtgacggggaggagcggcctcacgcagggatgctgcaacggagtgaaggggctgaacaacgccgcccgcaccaccgccgaccgccaggcggcctgccgctgcctcaagagcctcgccggcagcatcaagtcgctcaacctcggcaccgtcgccggcgtccccggcaagtgcggcgtcaacgtcggcttccccatcagcctctccaccgactgcaacaagtatatcatctctctatgactcctctctctctctctatatatatatatacacgcatatatctctttattttttacgtgctatctaaatactccctccgtttcaggttataagacgttttaactttggttaaagttaaacttctctaagtttaactaattctgtagaaaaaagtaataatatttaaataccatcatagtttcattaaatccataattgaataaattttcataatatatttgtcatgggttaaaaaagatactacttttttactacaaaatcagtaaaacttacagtattttaactttaaccaaagtcaaaacgtcttataatctaaaatggagcaatagttaataaaaacttttacaagttaagatagattaccatatgtgagatatatctcacttcatagacataaaagattaaattcaacttatacaagttaaattaaaaaacaaactaaactaacactagttaacgtattttcgctattatatctgttattattgttacaacttgtacaagtttaatttaaacatgtatatttatggacatgcatatttaatattaatctatcttatcattttgttttactttttaatggctattaaggtggggggatgaaagcaacaatgagatatttctcgagatatgaaacattttcccataaaataactacctatatatatgcattttttttctttggtgcagggtcagctagatcaattaatcctgcttggatcgatcgatcgagcttaacacgctagctcgatcggagttgatcagctagtaattaagcacgtatttgctacagcatatatgaacaaagtaattaaaataacacctgcggcagacatgcagcgctccattctctctctgtatcagctgtatactttatgttgcacgctccctgtgtgcatgttctatcttaattttcttcagtatgtacacgatctgtgtgtactacgtgtaatcctatacgttttatgaattgcatgttgtccaaatgtctttgtcctagctactagctactccagcttcttgctgaggaaatctgcagtagtagtaatccctcgttgtgatacgcaacaaaattgtttaatgtgatcctgctatatatatagaaaatcatctctattattttacaggcataaaacaagtccactctaaaaacaattagtgcggccgttgtcttaatagacccgtatgtgaaaatcgtttttcacaagcagttccttaagacaacttcatgtatcattattgtagtatgtcaaaaagatgcaccacactatgcacagtcatacaaaatggcactactacacaactgatcttttatcgggatatccatttcggatagatttagaacgggtattagagatatttttaagcaccggttaccaaaaacatctttaattccgattggtgttataaccggtactaaagatgcctacagggctagtttaaaaagaaaacatccatatccatgtctgatgggtggagttggtggatggttacacgcgtgagggctgaggtgagagatcttgagttcgaatcacatatcccacacattttttttatttcgtatgcatctttagtaccggttatttcaactggtactaaagatcgagatatttagtctcgatttgttagaaccggttctacatctaaaacggttcccaactggtgctaaaaatgggttctccactagtgtggcaatacatttacattcacacattaaggattcacatcgtcacccatattcacgttgacactgtcttttaatgtataatttaaatgttcacattgtgaatattcgacaatgatagggagcccgatccctatctacaagtctaaacctaagattaatttgatcgacatgagctaatgaatagataagcgcactatctattgcttgaaatggtagatccattaatttccttttcatatatagattattgtaaaaagttgtcgttggctgattggaaatagacttgggcatgaaacctataccctctgcaactccacgtaatcgaaaatcatcctggaatagacccaaggatgaaatttagaccaaggaacgaaattgggcatctataagtgtggggagacaaaaataaacggtttcatagagttaaatgatcaaagttggaacaatattgcaatagttgatgattaaattaattaatgtggacttctttaaaccatatatagactgtgttcggcagcgctgttcctaacactaccagtacgcacgaaaaatgaaacggtccattagcgcgtgattaattaagtattagctattttttttaaaaaaaatgaattaatttgattttttttcaaacaactttcgtatagaaactttttaaaaaaacacaccgtttagcagtttcaaaagcgtgcgcacgaaaaacaagggaggagggttgagaaaaagggtgccgaagtattgtgcgctagatactggtaggggcattgttgtccatcctcggaagtggctcaaatataacgtgccacgacattagcgccatttcttacacgaaaacgaaacagggaaaactaattgaacaaatagagagatatgtagctagctagctttcagagtccactttttgagagagctcaatccaatgtgtggtttggctgcagcgacgaaccagaataatctcactctgctggtgcacccaatcaccaaatccaaaggaaattcaatgtacaacaaaattaaaaagaacatcttataatttgtctcctcctcctgcatatgcttgactcctagcttaactagaggtacctgcagccagccatgcggcggctgggtgacgtcgtggaggcgcctgcgctggtgctgacgccggcctccatgcagcaggccggcgggagggggagctccggcgccttggacgccagcatggtcgtcatcctcgccgcgctgctctgcgtcgtcatctgcgccctcggcctcacctccctcatccgctgcgcgctccactgcgcccgcggcctctcccccaccacggcgacgccgacgccgtcggtgtcgacagctgccacggccgggctgaagaagacggagctgaggaggattccggtggaggtgtacggcgccaagcaggccggcgtccccgacggcgagtgcgccatctgcctgggcgacttcgccgacggcgacaaggtgcgcgtgctcccgaggtgccaccacggcttccacgtccgctgcatcgacacgtggctcgccgcgcacacgtcctgccctacttgccgggactccattctctccgtccatggagtcgtcgccggcggccaaacatagctagtaatataatttcttgaacagaagaggtctaaaatgtaaatagaatataggtggtaaagtactccaaaattgggattgcgtaaatgcaagggattggacacaatgtttgaagtgtctctgtcacttggattatccatctgtttagctgtttctatgagttttctcctttaatttgtgtgctagcacatgatatttcccccaagattcgctgttcgtttgttctgggcataattttgtcaccactcaacaacaaaacgaaaggagagaaagcactgaattggtattttcttttggaagaattgcattggtattttggatgcatgttcagccaaacttttcccccaagtgacaagtccttttctcaaattggtgttgtccagcatctaatcacctcccatgccagagaccttcttcctttccccttttcttcacgttgccaactagtactagtagctaagaataagatggctccatgccaacgttctgcgctcgagttatggcacaagcattggagtaaaaactcagaaaatgttcaattgttctgttcaaataatgcttcaaaaaaataacgtaggattttggggagagggtgcctggggtggcacatagtaatacgtcttcggtgatgctaaatcttatgtttggattcctctaaaattctctacggatatattaagtcattccatataggtttctaattgattatcttttcttcttgttagagtttgtgtgaatatgtatataaagtcggtttcagtttagaactttaagtttaataggagtagggtagagttagagtcaaactctttcagctctcttaaatagagaggcaaacttattataattaaccacatgacaacttagcataggcgagagggaatggctgtcgacgatgtccgaccgaagtttgttgtacctctgatacgctgtaattatgctacatctagtacgagtgttcataatcagtgtccagagatataggattcggttgaatt

SEQ ID NO: 17850 - DNA, 3309 bp, Oryza sativa
tatagtacttccagtagcaatagctagtgttcaaataatcttttctgccatgaattatgtgaagaataaattgagaaacaggctgggggatcaatacttgaatcattgcttggtcacatttattgagcgtgagatgtttttgaaagtcaaggactgtgatattataaaccgctttcaagtcatgaaggaacgtagaattaaagctactcttccaaaccatgaatgaaccgaaatagaaaattagaggtaccatgtaataatttgtagttttatttcttcgattatcggtattgacatactgtgaaccattgatttttttttactatgaacttttttttgttaaacgggaatacccaacttcgaaatgctggctccgccactgcttagaagaagttaaagcagaacatctctaatttatttatttgttggagtaggtaacttgtatgggttggttgattccaaaatgagtacaacactgaaaggaggttttaaaggatgtacaagactgaagactgcacaccaaactatggcagtacagtactattcatgaatttgtgtcatgatgttgctctcaaagatattctggtgtcgttttccagcttcattttgcaagctcaatacacaagttggaagttggaaccactggtggacttaattcgaacatgagcagtacagggacagattcctaccttcacttctatcactgtcttaggctgcttgcatcagatacacaagtaaatttgaaacatatacatttgagtatgtttcctctgctttggagcaagtaaatcatgcatttgaagtagtagggaaatcaataccattatcaattgtagcatgcacatgagagcagctggacaaatcaaagcatgatcgaattaaaaatgaaagggaaacgggcaacattactacagtagtttattactccatgcctcatgcagagagcagtgctgcgaattgatctgccaggctcttcacagtcgtcggagaaactgcagattctccacccaggtaccacttctgaatcatctcggccacattcttgttctccactgtcagcttcgcctcgcccttgccttctgtcacaaatgatatctgcacacatatatgcatgattcaattaggtttgcaagaacaaagatttgatcacttgatatcttaaccaaacccagctgaatataaggagtactctacaagattatacctctgcaattccaggggtggtaggaaagtggaaggtgatgacggagttgggcttgaaatacttggactgaaagaattcggtgaccttctccagagcctcttcttcatcctcctcgtacttgtctactgacacgagacggtcacgcactgaactctccagctgcacgccgtattgtgatcctttgatctccttgatcaccactatcctcaacaatttctccaccggagctaccacacgtaaacatcatcaatcagcatgattcaaatgaaataatgaaaaaaaaaagttattgctgtaatgcatgagctgtcgagctgaagctgaaccttactctgttttattttataggatataacaatgttctataaactctacagagaaaatactactatttgtgatcagccacttgatatgggagaatggtattgacatactgcagaacatgcatttctaaatcagcttttacagattctgaagtgcaaaatctgaatgatgggggtcattttagttaccagaaactagggcctgaaagaagccatcatcctgcacaagctcctcggccttcttgcccttccaactctccaaatgcgctagcacattgcccttttcaagatacaccccgatggcgttgtatttgatctggagggaaaggattctaatggctgggaaggctggcattgggttatttcaaaggcgttaaaaggctggtgtggtactgataatctgatattagttaacagcttaattcgttagtagattaattaattaccattagcaagcagtgacaatggcttactgacggttatctcctgaggaaatgggatgccctccacctccacggtggctatctctgtgcccactgcacttacaacaatcatgcaaaatgcaactaattgggcattgaaatcttgtaattaccagtacatgtatggtcatgttttgtatataagcatatttcaacaaccttcacatactactttcagaatttctctaaatgtacaagctagtgcaaagtccgaagtgggtatgaagctaccaccagagtttcagatggaattagatacattcattcatgagaaagtctttttgagttcttgatatcccttttttttagaaccatgagaatgtcttttcttgatatccctcaagacggacgaaagacagaaggcctgtttggttggtgacctgagcaccacgcctgaagaatttgcactccaacaaactcatgggttccacctgacgagttgcttgtttggtttgctgctgctgcctgatcgagtagatgattactgctaactcaagtattagacgggaagaacaaaaatctcgacaaaacggcttggcgtctcgggaaaaatctcacaaaatccatatgctacatacctaactttccaaaaatatccccaaagtcgcaataacgatcagcaaaatcagcagcatcagctgaattgaagcttcgctctaagctggatccggcaaaggggatcacgcgaagcttcgtacaaactcgaccaacgcggggacttcgctcaacgacgaccacggcagtggcttcgcttgccggcggtggcgattgaggtaggtgtgggcttcacgcagtggcgtcagatcaggggcagcctcgtgcgatggcggcacgcggtgatgacttcgtacagttgagatttcgatggtaaagcacgcatttgtttacgcctggagcctcgggcgacagaaatcggccgcgctaattgcacgcctctatggctggagtatgcgtcaggccaggccagtggagaacagtcttgggtagcaaccaatcaagatcgacacaaatcttttaagcctaattactccatgatttaataatatggtgttacagtaaatattttctaatgatgaattagttaggtttaataaattcgtctcgcaatttacaggcgaaatctgtaatttgttttgttattagactacgtttaatacttcaaatgtatgtccgtatattcgatgtaacacggtaaaacttttcacccctggatctaaacacagcctaaaactttagtccctatcacattagatgtttagatgctattttagagtattaaacatagactaattacaaaact

SEQ ID NO: 17851 - DNA, 1410 bp, Oryza sativa
attcctggttggagtctcccagtggatacagtagctttgttgaacatacctcatgtagccacaaatttcattatttcaaggcacattattatctgcattgcatatataggaccagatggggggacgaaagctgctaccttgatttctttatcacattttaggaagaataacaactcccttttatacaactgcaatccatgttgttcataagcaatgtgacactctagtgctataaaaaccaattattttcttgcttgttacatccactgtttcagaagaattacctcctttcatacctttcagtgtgtacttgagcaaatttgcttctgttggttcgatttttcaaacttcacatatagcttagcttgccacaatatgtgaatgttatttgctttcccaagtattccccgcttttcagatcactcactgctatgtttctttcagttactagaatggaatggtaaagcatactctagtacctataaaatgagcttaagagtttcatttgttacgtttgatctaaataaaattatgtgtttttcaaaaaaattccagacaaatctatatctgtgaaaaaacaaatgttgaaatgtcatagagtattctgacagatgtatataatttcttgccatctattgctcatctattccattttactttagatgctcgatataagaaatatagcatataaaactttctgtcttcatgcaacaacagaatttctccatgtcaagcctggaaaaggtgctgcttttgtaaggacaaaaatgcgtaattatatcactggcaacacagttgacaaaacctttcgagctggaagtacggtaatccaagcagaaactcacctttctaaacctgtagaaattactctctccgtttcaggttataagacgttttgactttggtcaaagttagattgctttaagttttaccaagtttgtagaaaaaagtagtaacattttcaacccaagacaaatttattatgaaaatatattcaattattgatttgatgaaactaatttagtattatcaatattactatatttgtctataaatttagtcaaatttaaagcagtttgattttgaccaaagtcaaaatgtcttataacctagaacggagggagtaccattctgtgactgtatcagatcatgctttagcttatgtaatcagaagcaactgatatgatactcatcaactctccttcaatgtgttctaacaaagaagagcacttattttgtcacttttgttttagatcccagaggcatccatttcaaaggaaactaagcaatttacctacaaggatggagcccagtttgtgttcatggatctggtacatgtttcagtttttcattcaaacatatcatgaaaagagtagtcgctagctgtctgtatgcttcagtaatcagtat

SEQ ID NO: 17852 - DNA, 710 bp, Oryza sativa
aattcctgcagccctaatttgcccttcttaacccttctgtacttaaaatgacttgacaccaacatcaagataaaaatgaagctaccaacattaaaattattggagctacagcccagcaaaactcaagagctagggcttctagaattaagaatgatcattatttcctatagtttcaggcagatgtattgcttacattacgtccatttgactatgtgcagcatgcttcaaagcactgttgcgtctcaccttcattctcagatgctcaacatcatcccatctcttcgcttctgcataaacatttgatattgtgacaagtcctccattatcagttagaatcagctcatgtagttaatgaaaaaacttgtaagcaagatcgatgtgcccatgcactcggcaagctgccaacaacatcttccacagaacagagtttgctgttgaagggttttctttaatcatcagataagcttcttcaattcttccatagcggcaaagcatatcaatcatgcagccataatgcttaacatcaggaacaattctgtagtcctcaatcatgctattaaaatatttcctcccctcattcactaggccaccatggctgcaggcagtcaagacacccaaaaatgtgacaggatttggctcaattttcatcgaatcaaagagctctagagcctcatatgagcagccatgtactgagaaaccaatgatcatcg

SEQ ID NO: 17853 - DNA, 3315 bp, Oryza sativa
cgagatccaacctcccacattttgcatacatatcaatgagtgcattgccaaccaagccatcagatacaatgcccttgctctgaaggtttatgtggatgtctgtccccagctccagcttgccatcctttgcacaagccccaaggattaatacaagtgtaagctccgtaggttcaatggcattctccttcatttcttgaaaaatctccaatgctttggtatatttgccgagctttgtgtagccacttatcaaagagttcaatgaaacaacatccctctgtggcatttccctgaaaagccttgatgcctcatccatatacccgatactaacatttcgtgcgatctcagcattccaccatgacaagttcctctctggcatggcttgagagacgcgctctgcacccatccagtctgcagcggcacgatgagccccgaccaacgcattccacgagacggcgttcttgtcaggcatttcatcgaacgccttccgtgcatccccgaggcgaccgaacttgccatacatggagacgagcgcattccgcacgtatcgatccttcccgcagccaagcttcaagacacggcaatgcagctccatccccttggagacgaagaccgacgcgacaccggcgcgagagctgcggttgaatgcgcgagcgcaggatttgagtaacgcagggaaggtgggtagcggggtggggagggagcacgaggaggcatggttgaagaggatgagcgcggacgacggggccggagaggaggagaaggcgacgatgaccgggcagacgagcgacggcgagaggacggccggggaggcctcgagcagaagggagagcgccgacggcgaaggcgggatgcgagagaggagagcggagaggaattcagggtggtggagcaggccgagcttggcgagcagcgcgtggagctggtgaccgccggcggcgcaggaggcggtggtaggaggcagtcgtggtcgtggatgtggaacgcattggtgggctcgcctagtgggccgtggtttggttagtgggctaagaaaaagcccacgaggccagcgaatggtcgcagggggaaaggaggaaaccgtggcttgaagccgcaggcagagacagcgtcgtctcctcttcctcttcgtcttcctgccgccgccgaggagccgagcaaaatccaataatccatcatcggagacgagcaggagcacgcgcatcaatcatcgtagagtgactcatcggaggaggcgtgaattccacctatccttttcttttccccccttgtattctcttattattgaaatcccaaccccataatccgaccgtacccacccgccccccatcgccggcggcgcccagatcgccaccgatcgcctccaccaggggcgcggcgcctcttccgccctctctcagcggcggttgctccacgtctccggattccggaagaggagggagggagggagggagggagggagggaggaggcaactcggggcgttggaccgggctcccacggcgacgcccatggtcgacaaccagggctgctcgccggcgctcgagcccgtgcccacgccgcccaaccccgacccctcatccatctcgccggaggcctgggatcccctcgaggccgccgccggagccgtcgtcgcccggatccagcccaacccgccctccgaggaccgccgcgccgccgtcatagcctacgtccagcacctcctcaggtgcaccgttggctgccaggttcatctctcactttcctcacgcctgcctttctagtattccgcaataactactactctacctttcctttgtgcgtcaatggcatgtccacaacacctagtatgtgcttactacatgtgaatcttattcagtcgtgtaattattccccttcgatcatctctatgtacacagctgctctggagtgtttaggaggattcttttattactgtttcacaagttatttccattctctgtttggatatggaaatgtagtaaggacaacatgctacatacattgttgcctctgatttggctaattaccatactcggagtttcatatacctacactatgatggcccaagtatgattttgctaacactagcgatagcgccaaactgatgtacaagttcatataaatacaaatacttcccgcggccagggtcgcaggtgttaaatgtttattccctatgaatgttttgatatcccttgtcataactgggcttgattttcagcagcataaatctgataatctaattatgcaaaacaataatatatcgacacatgttaatgtcctgcatttaacgacagttaacttgcaggtactgggttggagagttgggtatatggtatatgcactttagtgtccttttttatgacctgggtctccatagcttgctcatcttgtatgctccttttggataagtgcctcttctctactatatctgtgctcacaagaaaatggaatagggaaaagtctactgtaacacctccagaccgtggcgggaaactggcatagttttttttttagtttagtaaggagtacttccttcctgttatatggttagttattttggatctttgttcatgtcaaacacaagagatctggtgaccatagtgtattttaggggatttgtagaatattcactgaacaactatagagcatgtacgaggcatccaaaaaaaggaaaacgtacctgtatgcaatcttgcattagcacctaagcatatgttccgatatcaatactactttgccaagtatatgttactgtctggtgtgtgtccaccatgtctagtatcagcaagcaagtcatccacatcgttgctcatacttgttgttcacggacctgtttaagctacactatgtgcggatggagctaatatcaaactgttaattatggcaataatagacatcaaacgcgtacatggtctattctttgatgtgccaaaccatgccttttcaacctttgtttatacctaattactagaattactgtcgtgcacagatgcacttggtagatcacgaattttcaagacaaaggtgaataataaaaatagaaaagaagtcaaacaaaaaaaatcagaaaacaagcagtttattgctttatttcaatccaattcttaactggaacccttagccactgtgaggtgtacatctgacaaatcaatactgaaaactgcatagaaaattgaggtttatttatttaatatcgttcatgtaatatgtgatatgtttactaccttggcatcatgttctttaggagccaaacacatgttccaatggtgcataacatgctcactgctagttgttctatgaggagtgctccttagtgctca

SEQ ID NO: 17854 - DNA, 813 bp, Oryza sativa
cgttcatgtaatatgtgatatgtttactaccttggcatcatgttctttaggagccaaacacatgttccaatggtgcataacatgctcactgctagttgttctatgaggagtgctccttagtgctcaaccctaggaattggcatggcattagataggcaatatgggattctctgattttgttgtgacttatgtacaatacttgaaaaagaattattgcttgcgcttttagtcctctgcgagcactggtctctctctctgtgtgtgtgtgttgaatcatccgacatcgtgctattaaaaactacaactttaacctttttctttctgtaaagcacaggtctttccatttggatctgttccgttgaaaacttatcttcctgatggagatattgatttgactgcctttggccattcaagtgatgaaattttagcaaaacaagtacaggctgttttagaatcagaagaggcaaggaaagacgctgaatttgaagtcaaggatgtccaatatattcatgcagaggtttttctcttgatgctctttgttttttagtttatatattagttagtgtctaattcatatgcgtttatgtttctggtagtggtgtctacttatgtgtgcttatctattgtgtttattatataagatcacatgaaaccatccatgtgattcattaatacatgaattcttttcttttttcttttactccccttcttatagctgcaatcaaacatttcgcagtattcttatcctactataaaacgggaaacaacaatagagaaatccatcgtattcacatgacatcaatgaagcctgtg

SEQ ID NO: 17855 - DNA, 518 bp, Oryza sativa
ctaaaaatcaaagtatttatgtggtttcttcacaaaaaagtaatcttgacgaaagataacctcataaagagaaaatggaggggtaacaagcaatgttgtttttgtaatacacaagagaccatccaacatcttttctttgactgtcatgttgcacgttttgcttggcgatatgtctttttttgccttcaatatccccctccccacaatgcaaaagatatttttttttgtaactggctaaggggagtgcctagacccacagaaaaatgattttatttggagctagtgttctatgttggtcaatttggcgttgttgtaatgatatggtttttaaccataaaaaaatgcttaacatcatgcaggttatcttcatgtgttccaattggcttcactctgtgtatgatgctttcacaggaacaacaggatactatgcgcaatgctgctacacgcttggaattggtagccaaggaacttttactccagtttggatggcgtagtacctacagaattttgtgatagaa

SEQ ID NO: 17856 - DNA, 625 bp, Oryza sativa
gatgatggatcttacaatgtgtttgtctcattaatcatctgctctggtgaaatatgtacgcacatatgcagtacaaaaatttgagaaagcattttgatcctgtcgagggttcaaatgctgtaaacaatacagtcaagcctgggtgaggtgagggaatgggccaaaaatgcggagacaaaaactaatgctctgttgatgtctagtctctcatctcttctatgctctgttcatatactggccagttcttgaatcaatcaggatatcatcgcctacgttcacaaacgagggcactgtgacaacagctcctgtttccacggttgctggttttgttcctcctacaaaatatacagttaaaagattattattctgatcgtgtcagctttaataagaaaacatttttttttctaattgtgatattcacatgcagttataccttgtgcactgtcaccttgccctgggtcagtatcagttacagtcagcctaacggtgatggggagatcaaaatcaatgatctgcaggacatattaatgtcagtgaccaatatcctattctgtgcaagaatacataactaatcaaacagcacattatcaagagtttgaaacaaaatatgaacatatgaactgac

SEQ ID NO: 17857 - DNA, 4174 bp, Oryza sativa
tgcaaatgcatcatagcttggcaaatctcctacacacccagcataacggccatgaagagccaaaacagctggtggtggcttgcgagagcctttctcttgcttgttcaaatttatgaatttcgtcactgtaagctgatgacggttgaagaacgggttcttgcttccaatgccgagaccttggtccatctgtagccgacaagaaaactttgttcagagagtttactttagcatggagaattttgtataaaaacatgctacttttgaacaaaacttattagcccaaatatcatcaatatgtttgcaaaaatgttttttttcccaataacgcacaaattacttgttcactattcctttgaaactcttgaacaaatgtaccgaaacatttcctaaaattttccaaaatatcgatcagtctcattggtcttttcaggtgacaactttttgctacagagctacctggcaatgagtaaaggttgagtttgtgttcctagaaccagggtacaaataagcatacctggaatatacatctgtcaccgattgttgcaccattgacgaactctgtattgtctcgagttatattagcttgtagaaacgccattcggtctacgccagtcccacttaaggttgtgggaggtccaatcatgctcaaggcgccactaggcaattgtcgagaacgatgtgtacatatattgttattctcatcgcgtgttgtaatctcttccactatgaggccatacgtgaatttgctctgctttgtgaagctctgaataaaagatccaaaatgcagtttcctatatgttgttaataactgtccatgatagttaaaaggagtggaaggtaatatcaattgtgcaaacctctgttatattggctttaaatccaattctatcaacccagataggtggagcttcatacatattgggaccagcaacgaatataggactcaatttcctggagttgaaacagctaattttgaaggtgcggttcctactaaggttgtcgataccatccagataaggatgggcatactccagcttgaacgaaagatcatcctaatactcaccaaaataccatactatcatgtatgactgatataacagcagccaaaagcagcatcgaagctgatgggaaaaagaaaaaaaaaactaactaccaactcacctcagggttgagcaagttgctggatgtaacagaaccaatgagagacctttttagaccacagatgttgcggtgctcaaatgacacagttcctcctggttgaatggacgcctaagaggaagttgtgaggttatacaaaatgacttgcagtgatgagggaatgtatatattcacaatggtgtctagcatgttaagtacatattcgatctggaagaacaaaaggttgcacattaccagagttggtcttccttgagagccaggcacaatgctccaatctgtgatcacctgagctgattttgggtcatgttccttgagcttaattgcaactattactcccccttgatttgtctcatcagggcgaggctgtacttctatagtggagaacaaaccaagcgaatcgatattcttcagagcctgcttccccgccccattgttgtagatatgcccaggacgaagctgtaagatatcaacagccattttattgcacaacagtcacattggcacaactggtacaattatcagagaatcataatcaaatatacgcaaagccaagaaatttgttgcaaaatcaaacaacaaaatcatagccatctgctattaaaaatgttagtttttcttgttagacatggagcttgacagtgatactagcaacattaacaaaacttggatcaagagacattttattgcaaaacagtcacgttggctcaaccagtataattatcggagaaatcggctaagaaattcgtcgcaaaattaaacaacaaaatcatagccatctgctattgaaaatctgaacattaatttagacattgagctcgacagtgatagatactagcaaaattatttgtacgcaaacctgttgaggaagctccctgtcaatgagagggatgctggtgttgccgtcgacgacattgccgagcttgtccaggaactggtactccaccttggtgatgtccccctccaccacctcgcacaccacctcgccggcgtcgaggttgccgtggtagctgaccacctgcgcgcaatggaacccctcgtcgtggtaccacctctcgatgcgccccgccatcctcttgagcagcccggagctcaccttcctctgcctcttcaccatcccttgcagctccctctgcaacttctccggcagtacgcacggcttggcgcggcggacgagctgctggtactcgcgctcctgcctccggaggtgttccatcctctccctcgccgtcatgtcgtcgtcgagctcgagctcatcgccgtccggccgcgccatggggccgcccacgttgatgcacttgaagtgttcgaccgcgggccactcggtctcggcgtaggagacggtgaggccgagcgtgccgtccggcttgggcttggtttggagggtgacgtggtcgaacatgccggaggtggcgagcgcgtcgagctcgtcgcgcagctgcgccctggtgtagacgccgccggggcgcagcgcgtcgaagaggggggcctccgcggcggcggcggcggcggcgcgggtgcggcagttgaggaaggtgagatccgagaccttgtacctcttcttgccgtccagcctggagagcggcaccggcagcgcgctagccgcgaggccgtgcgcgtcccagtccggcgacggcttccctccgtccgcgcgcgccgcgccggcggagaagaagccggacaggaagccaccgactccggcgggccatccctggccctgggcagtgcttcttccatcatcggaggcggagtcgagggtgaagcagcttggcattgcgattgcggttgttaaggttggcgccaatggcgcgagagcaccacgacgacgacgacgacggatgcttctgaataatcgatcgcgcaaccagtttatgtttggaatgccagatttttctttttccgcaagaaccaagcaaaactgattcacacgaaaattctatacaaaattcatgctttccaaacaggtctttttgggtggggaatgccatacttgtgttcttcctcgagatcacaaacttgcctaattttgcaatctccatatttccccagcgctatatgggagcaaagcagccaggtacgatttgaaactatgcggccacaggataatccagaaatttacaatgggctaaatttgctaaacataagatcctcagagtgatactaccacacatatcgtcaggctgtgtgttcatttgcagctcatgatctccagtttttcacctcttctcatcccatttgagcaacatggggggaagttgcatgttttcctccctcttttcatagctcgatatggtgagaatgattgggaacatctccttggttgtccaggggcatgtactgggccatgatggcgcggatctctgaatccatgtacctctgtacacaggcacaaccaatgcaaaagaaaaagcgagaatttagatgccaattcagagttatcaacagagttaacctgaacaaagttacccatatcatacccggatcctgtatttgtatactgcgtatcctgcaatgcctgctaccactaggccaaagaagatcacccacaagaagttccatcctacctctgttgctgcatttttgcctaaatacagacaaagacaaattagtctactcacttaagtaaaatttcttctataatctatacactgacattctacactttcaatggttgcagaatgctgatcatgatttatgtgggtccgtcaaatagatcagacagaccgcaaaagtatatgaatgcacaagtagtggactgtttgatatgaagaaagagcaacatatgcatgaggagccgggagggacatacttatgcatgtatcatgctccttcatataaagcaagccgccactgcaaccgcattcatagcttccccatgtgttcttgcatttgcattccttgcactggcatgcagtcctttccttgcattcatcaatatctttcacaaaatatttcacatcagtacaaggggtcaagtgcacaacaagggtgtattgcaagtgatatttcactaaaacta

SEQ ID NO: 17858 - DNA, 6240 bp, Oryza sativa
aattcctgcagccctccatcttccagaagaaaatcttgcttgtaaaaggctcatttagttacttgctttctacccgtcatggaagaaaacgtggagaccactgtgacatatatagtgataaaaaaaacaaggacaattaattaaaaggactaaagggatgaaaatcatatactaagataaggttcccctgactatgaatgacacatggccatatgttactttagcccaaacacttgagatatattaattattaaattcttttcactgtctactacttgttccgtcctaaaatccagatttattgtgttaagatgtgtcaaatttcattctaggtaataaatttttgggacgaaattcgtatactagcagtaataacttttcgtgtaaaaccaaatgggtgtggtaaagaattatatgaaaaaagattgggttatagcttaatgaaaagtatgtaattcaaagttttacaagtgatacaacaacgtggtttgcataatgcgtcaaagagagaaaaaaaagaagaggtcaacaggagagagaggggggctggtttggcttggctgttacaaagacaaagaatgacatgcgggcccagagaggcggaccgcgtcccttttgacgacatctcatctcaccctctcctcggccgcgtaaatcccataaataaattcttcttcttctttttgtttccttgccaaatcccatctccattttcctctctttctcgttgcgatttgagaattcaccttcttcttcctcctctcgcctcctacctcttgctgcagcgcacggcgccgcgccgtcatctcgtgcttgtatccttgttcttcatcttctctcaccttcccttgagaagatttgttattactagtttaatatttctaggaaagaggagaagaggagaggagaggagagggtggtaacgcagcgttaggtgggggcgtgctagggagtcaagaacagaaggaagggaggcccaactgctccatcctccctttccccaaatccactccttcctttcgatttgcctccttccttccttggttcattcattgatttttgcaccgcatttgaggaagaatgtgcccgctgagggtgatcctaatcttcctctccgccaccatcgccggattcttcctcatccggggcctcaacgccgatcccgacctccacgacgatgccgacgcctccgaatccccaagggaaaggccccccgtgcccctccattccaaggtaatcaaaccaaaaaaaggggaaaaaaaaccattctttcttggtcgctccatactattcttgggttaggttacctcacacacacgtttcatgacatcccttgctagaggactaacgcttcaattctactgcttaattcctgctacgagccccatgtaccccgtctcatatggcaaatcacaacattgtcttgtctttgacttctagtttgctgttgctggatatggaagctagcgattctaggaatgctttcttcttacggctgaaaaaaaagaaatcttctagctaactttcctatgaaaggggacgaaaatcatgtgctttggaaatgtttctggcatatgcctaattttcagataaatcacaaccatatgtttctttttagtgcacacaacatgttctctcttgtttttgttttttcacagcagtacttcactacacataatcgactcatgcacagcaacaacaaaaaaaatccaatggctttcatgctaatttttagattcacggcttcattttcggtcatttttttcagccttataacaattagaacaaatgtttcagtacagtattgttggttcctgctgattgtctagagcttggaggttgaaaaggaactaacacccgccattccaaacttatatgcaaccactgttataatacgataagcaaagatattgcctgttcttattccaaagaaaaaaaactgcatgcaaattatcaggaatcatactaaaaaatgagctattttgaagtatttctatagttgcagtatgcttgataacaaatcttacttaaacagcgacatgtagttggctagttggcagtgcttcttacattgtgttaaaccatggtatcatggttttacattgtgaacctgtccttatggattatgtaagcataatagtttatacactggagatgctggattgttgaaagaagtactagggaaaagattgggttgttgtcctgttgacgatgcctgaaatttatatttccaggcccacaaacttataaccctctcttttttttcttaaaaaaaaatttatagcggaagaagattttttcttcagggtggagcgcatcagaacgccgtacgtaccacctacgaataataggtagccccaccccagacagagtttgtgagccgtgtaattggcgaccatttcgcgcggttcgggtcagatagcaagcgaatcgtcctatatcgcggaagctggattattacgggccatatttggtcttgagccccagtttttgttccagtgttgaatcttttgatgtatgtagtaaaaatgggtgctggcatcatatcttcatgcttcctaaccaagctacagcataatattggattttatttcgttgcttgccacataactttctctctattgaagtataattttgcatgaaactgtaggttgggtcggctttgaaaacaggattctggacgatggtggacatggcaagtgggaaatacctttggcgcactcttgtttcaccaccaacaaaatgtgaatctgagaaggcccagtgatggagttctgatatttatatcattgttgatttgggaatagacgtaacccctattgtggttagattctgttcttgaagtgtaatatgatggcaactgtaacatgaggattacatcttgaagtaaatgtacaaaatagttcacgtttgagccttttcgtgtaacctaaaacaatgagtggagaattgtattaatacatgagatttggactgaagtttctgaatacaatagttggacactattctttattttcctgttgaaatgatgcttgttttgttttgttgaaatgatacttcaatattatctttcttcctttctatgtgttgtttgaagtatctggtccaggactgtgtttctgaaatgtcctgttaggtgcctggtatttgtgatggcgcttataaagcaagggcaacaatttcatggttgatgtcacatcttatggtaagttcttcaggtaagatatatggctgtgatgtgcaaaagaaaattagctgtactcatcctggtaagattactggtattgctggaggctggagcatatacatacatgcttcaaaacacgtatatatatgctgccgcctgccggaagattaggtagggggttgcaaatcaaatcacagtgtctgcaatgcaagcagaaggcacagttgtaccctcctaattacagtccagcagaaatgtggacgacaaaatgcatcgtagcagataaaagcattgcttcatagaaaccaaaacgatactcactagtttcagaaaacccgttttatgttatagtagccaaatgggtagcatatggacttgtgcttgaccatccagggggcttgttgatcatctttggtaccacggggaggcaccatctgcagggcagtgaggacagcaaactccatgtgaatttcgtcatcttgcatcatagaagagaacatcttggcgacgcaaaatctgccagagccgaggctgatgaggtcgagccgaatcggcgaccaggatgcaggtatgtcgaggtccaactaagtgtgtagctgaccctgtgcaatattggtgagatcacaagcgcacaagctatgggggtggtggcatgatagtccgaaccagagcttgagctccggcacatattgagctttgcctaagaatggcattgaccagaggctgcttataggccgccattgacggctcaccgtgtcaaaggcgtgagtgccacagagcttggaagaaacgtagatagtgttgtgtaggaggtaattgtagtttgggtggtcgttgtgaagggcggcggcggtagagaacgccatatggggatcctttcacaaaaaaccccatagctgagcacctcgaagcaatggttgctggtagtggggtggtgtctgaggttgaggacgtagaggcagtccggttcttggttgatggagacggccatggcatcataccccttggaacaattgaggttggggaagtggacgacggagtaggaggcggcgtcgaagagcacggtgtgtccatggttgtcggcggtgaggatcttggtctcgtcgtcgccgagaagggtgaccaagtcgagagatctttcgtttcggtgatgcattggggtgggctggaggttgagcaagggacatgggaaattgcggaacctgtccatgaaatgcagcgcccctggatgcggcctcttgccatcgtgatcgatgtaggacttggccatggctgctgcttcggctgctctcgctgatgggtagaagagacgattggcgggtatgcggcgcagagaatacaagtcgtcgtggttgttgtgcaccaacagattcagatatcgccgtcgacccatcgatctccaaataccctactgccctgatcaatcgaattaaagagaacaagttattagcaggaggcggcggtgaagtcagatggattagatgaaggcgaaacagagaactcgtgcctttgggctatatatggcccgacaggccacagcctagggccttcttcttggttcttgcacggtagctgacaaccaacaagaaagttgattattttctgattggattgctcccctatcatctactctatatatatgctgataactgtacaaactctgatgctgattaaatgtgcccttctcagctgatttgccccccctttccccttttttttcctgaaaaaaaagagaggagttttgatgcttttattgagagaaacatagtaaggtttttttttggtaccactaggtaattgcagaggacaccaccttacaaggagataatagatagaacattttaactatcaatcctaaaccaaaagataacagcccaaatataaagtggaaattagataaggtggcaagctataagataaactactccagaagacaaccgaaccacttgggccttttagagggttaaatcagatataatatttacacggtctgaaaataagcaagttacttatatattctcaatgttttaattttatttttctaccctatcacatgagacattcttacattggctctcaccctttaggttggttttacttcatcttcacatgttccaggaaggagaactgtgcaggcattgcaagaggcaacaaatttatatcatatctatcaagcactccaactaattatcccttctccatgaataaatttgttttcctccaagtaatcagcttatgaagcggagacaacacatgactttgtactgatgcaaggaattcagaacttgtatttgctcaacaacatatacggataaggcttctggttgcagagaggtagtgaaatccaggagatgacagtaagatacatattgttgtaccactaactagctagcaaaatgacacgccagcccagtaatgtcattcagttaggaccaaaaaacactggaatattacatgccactagctagtttagaattccaatcctacttaactggtaagtataccaccactaatttacttgatcattagtctcttatagtccactagaaatgtggacgcaaaattgcatatcagataaaagcattgcttcagccttcagagtatcaaaatgaataagattaggccatatgggctgattcatagaaatcataacgataatttagtttcagatagaacactcggccaaatttagttcagctgacaaggaaaaatcttcagtctccactgttttcgctgcctttccatttctgacaagatagctctcttgaagatacaaccagcaagagtgatactgcttcatacaattagcaaagtagactcttacagaccatgcactaatttagagttccaaattttcaatcctactcactagtcccttacagtccactggaaatatggatgataaattgcatatcaaacgaagcatattgtttcatatgaaaatgaaatcagtttaggcgaacccattctgcttcatatatagcaaaatgatattagtttcagaaccaattcgatttgcgttagaatgggtacacacatatcaggtactaatc

SEQ ID NO: 17859 - DNA, 2320 bp, Oryza sativa
agtccattgtgtcatcgtcatcgtaatcggagaaacccaatgtgcagtcacctgcaatagaacggaaaatcttgacgacgcaaaacctgccacagcccaggttgatgaggtcaatgttatagggcaaccaggattcaggtatgtcgaggccacccaagtgtgctgctgctgcaccgtgggtggctttgctgcatcggagaggagatcacaagcgcataagctgtaggggtggtcgacggatagtccgaaccacagcttgagctccggcacatactcagctttgccatcgaatggcattgtccagcagcccaggcgacgccactgacgccccactgtgtcaaaggcataagtagcatctggctccatggaagaaacatagatagtggagctgtcaaccaccgtgtaggaagtaatgtcggcatgcatgtagttggcaaagggcggcggctgtagagaactccaacagggagtcctcccacggaaatccttacaagaagaagtgtagttgagcacttcaaagcagtaatccttggtttcagggtcaacactctgggacatcacgtagaggctgtcttcatcccacatgtcgccactaatgttcttgttggagttgttgtttttgatggagagggaaatggctgcacaacccttgtcagaaatgaggttgggaaaggcaaaacggtggaggagtcggcgtcaaagacgatggtatgtccactgtggtcggcaatgaggatcctgttctcattgccgaggagagaggcgaactcgagattcctatgtcgacgctggccatcccagggggttggttcgaagttgaacatgggagagggaagcttccccaacatctccaaggtgtggaggcctggatgtttcctgccatggtgctccttaacgtacgcgttgaatgattcttgggactttgccgtggcctcttcagctgctcttgttgatgggtagaagagatgatttgcaggtatgcggcgcagagaatacagtccactgcgggcgttctccaccacaaggtttagaaatcgcctccccatatctttttccgaaccaaaactgatcttcttatctgacgggatgattctattgttgggtgggagtgcctatataacagttgccacaatttcagcctaaaaacagttagtttttcaccattacagatcaacggccaggacaaaacaaaagctcattactgatgaaacaatttgacactaaacttatagcataagtactagctgcatagctaaaaaccaaagctagaaggcaaggtctgtgcaaaaatagataaaaatataaatttacatgcacatagaactaaacctacatttttaaatacggtgtaactgtaatgtaagtgacatgtaattgtagttcaaatgtgatgtgagtaccttttaaccttaactttatcatacactacattgaccgaagaaaaataccagctaagagcagttggtaactcggcattcaaaacgggcttgcatgcttgcaatagaacgaatctgagaatcgatatgatgttgataaatcttactataatcagccaagaattgtggagacacaattttagtaattccgtaaaggaataaaagaaacaaaatacgacgaacgaccagacggaccaatagaacgaaacagcaatggatggagcaaaataaacccatacctgcagcagcagcagcaaaggatgtggatttcctttcaattccttgcaatctgtgacagtcggccgggatgcagatcagatggaagctgctgatctacaggggcagcgtgcaatctacaggaaggaaggaggagggttggacaagtcaggaaggatggcggcggctgccgaggctcagcctcagcgcgatggcacggattagggccgtctgggtcctgctagtcgcgatttctttatttttatattatttttttaaaaaataaaaattaaattacccttattaatcgccataccatacaaggggaagtgcgagacgtggcaaatgacggaaggggcgcgcgtcgtgtggcaattttgtaggcgccccttctcactcttccgtagaacgatttattactggggcactttcaaatatccgtggtcaccccacttgttattttttttaagataaaccattgcaacagtagattgtcctaataaatggtgatttatcatgcctttttggaggcagcaccctgcccgtaaaatttcaataacacgcctcttcggtcgtcctccatgtcacatttctcgtcctaacataggatgatttatatgtcctatcctatggtaggacataaggagtacatttctacaaaacttcag

SEQ ID NO: 17860 - DNA, 3750 bp, Oryza sativa
aaatgcaatagagatccctcatcttgtcacattacaaaatcatccttgaacggcaaaaccggacataacgcatccccaaacttataaaccagtgcaaaggaagtcctctggcggtattgtccctggttttgattgatgtggtgcctacatgcctcctttaactaggtcttcgtctcatgtgacattgatatgacgcttattaggtactaataatttagaaatgttaattacttagataccactagtaacttagaagagtctcttacaatcaatcctactaattattccaatcaaattaagtagagtctctgatagacaactaggtagctagaaacatggacatatgtataggagattaaagctagcattgcttcaaataccaaagtgaaattagggcacatatgctagctgcttgatagcaaaataaccatcagcttcagataacccattcgatgtaatcatcgaaaaattggtagtacatgaacttgtgcttgatcatctggacatcatcatgtttaccacgagggcgaaccatgtgaaggccagtgaagatagcgaaactcccatgaattgggtcagagtcttcaattgtgccatcgtcactctcagagtaggaacaaaatgtgccatcacccgaaatagaatggaacatcttggcgatgcaaaacctgccacagccaaggttgatgagattaatgttccatggcaaccaggactgaggtatgacaaggtccacccaagtatgctgcaccgtgggtggttttgctgcgacggatgagtcgtcggagggaagatcaaaagcacataagctgtagggatggtcagcagacaggccaaaccagaggttgagctctggcacatactcagctctgccatggaatggcattgtccaggagcccagccggcgccactcacggctaaccgtgtcgaaggcgtaagtagaatggattggcttattgcaagaaatgtagatggtggtgccgtgaaccaccgtgtaggaggtaatttcggcgttcatgcagccggcgaagggcggtggtggcagagaaacccaatgaggggtcatctcacggaaatcggcagaggaagaagagtagttgagcacctcaaagcaaccatccttgattctgtggacgtcgggactccgggtcatcacgtagaggccgtcctccggcggtggttccaacccgttgttgttgttgctgccatcgttgttgataatggagagggatatggcgttatacctcttgggagaaatgaggttggggaaggcgaggacggaggaggagtcggcgtcgaagacgacggtgtttcccctgttgtctgcagtgagcatcctgctctcgtggccgaggagacaggcgaagtcgagagacctaagatggtagcgatccacgggggccggctcgaaggcgaacgtcgaacggggaagcttctccaacatctccatggtgtggaggcctggatgcttcctgccaccgtgctcctccatgaatgattcttgtgactttgccgttgcttcttcagctgctcttgttgatgggtagaagagacgattcgcgggtatgcggcgcagagaatagagtccaccggcgccctgcaccaccaggttcacaaatcgtcgtcgtcccatggtacgtatctgctccaaattccaaacgccgagacgacctgattctaatgtagattagacaccatgcaacagctcgcaacgaagaagaagatcaatatggtgtggagagagaaattaaagaagatcgaagaaccctctatatatacgtcgaaaagcagtaagtaatccttggagtttatagcaatggccggaggtattcgatgcatgcagtggagttggagacggcgggcggcggcggaggtgccggcatggatggagtagatgaaggtaaatctgcggcagctcgcgtctttgggcccgttggcccgattaacatgagtaatatttttcctccttaatgggtccaacgggccggttcaagtaggccagtaattcctttttctttttacaagtccgcatgacaccttgcaaatttcatttcaatttcatccttgcgacagagatttttttttttactagtaaatggttcgactgtaacctctagttttgtcgaaatgatgcttgttggttggacagtggcgttttattgttaaaatgagactgtactacagaaatatagggtcgttcttactttcttcattttctattcaaagtactgatgcaacttgtaaaagctagcgtctgcaagacgaatcacagttgcacaccggaaaaaccatccttaaactttgtgttacgcataagaatgaagtggtaagcggtggatggtttcaaccctgaaatctcatatttaattcttaataagctcacactttcttttaaaaaaatatttgaagggacttttccccctccaaatctcgtttcatgcatatacctaaatgccattgcacataggtataaaaatacttttcggcccaaataggatgcacatgacactactcctgtattgcacatgcacctctaatttattagagctccaacaactactgagtagtcagtactctcctaccgtccaccggaaattaactaaggtggatgataaatatatttccatagaaagaaaatcatattgattcatagaaaaataatattactttcaacacaccaattctcatctataaaaactcgaaattagtttcttagagaacaaattcaatgttataggcgttgaaaatgtaatacatggacttgtgcttgatcatccgaacctctcttggatcatctttaccacgggggcgcaccatctgcaggccagtgaaaacagcaaaatccgcagcaaaatcagagtgaatcatgtcatcatcagagtcgttgagtaaccaccagaagtgaagatcttaacggcgcaaaatctgccagagacgaggttgatgagcttcagctgaaacgtcaaccaggacctgaaacggcacacaagctgtacagatcaaagcctagttccttccatctcctctccgagaggataataaggtcaaggtgacaggaaagcagagcaggtcaaggtttttctccatctcttgcaaattcagactactattccctctgttctgctttactggttataaaggattacctcatcatcatcatcacatattgtcggccaaggcttttttttagcatatcctatcaagacaaacactactgtatataaactggcaacagctgaaagatatataaatgtatagtagtagaactgaattttgcatgaccacatgacttatcttaaaacgttttttttctctctctctctaatttacagcgatcttatcaggaatctatcattgatatctcagtattatttctcaaagcaaaaaaaaattctcaaatcttacaaaggacaaaagcatctaggtgggaaattcgcaagttgcaatctgaagagtatagcctttgtcatatgtacaacttgtcacagctacaattgggttgttgagattaaccaaatccagtcgacatttggacagtctgattagcagtattattaacatcttggaaagttgttgggtgatcaattaggaccgtgaaaaatgagctcttggatgttggatctatcctcagtgacagggacaatttattttcctcacaactcacaactggtgtttaaatagcttttgttcagacttttcaacatgtgtattatattttcttttgtttaccaataacttcgctctctgtgg

SEQ ID NO: 17861 - DNA, 2567 bp, Oryza sativa
  unsure (1)..(2567): unsure at all n locations
tttgtttgataaaaacttatgttcaatatctgataaggtatacctctgtagcactattgatatgagaattttcatcaacaagatgataataaaaagttaaaaactctagaaattcttgagtgcctggtgaataccaagaattgcatacttcatgctgcagaaaccttgctaatggtgtcacaacattgcacccaaacatagctttatgacagtatcaggacgaatatctgaagaaagcttgaaaggctcaaagccaatttttatattgcagctcaatttctcataaaattactctcgacagactccatctaaattgtgcataaattgcctaaacatcaactctccaaatacaattgcatacattgtctcaacatgaactctccagatacaaaaacatagatgctaaaaagaacacaggcaagacaaataaattcatttgagctaaaacctaatgaatttgaggagcggaaactaaatgcttgagacatcaaaatctactcttgcgactgctgctattcatctccatgctaggccaagacaatgtccttcagagctggccggatgccctcctccagtagctgtcggtactccaatgaatcgccacttgtttgtttcatctcgatgatatgataggaagtggtaacctcaaatatctctatgtcaaactgaagaacaccattccttccctccttcctcccttgcatcttcactacaccattgtctttcttccttaccctgagatttagcgcctttgctacatcttctagctttgagattatggttgaggcagatttatctgaagtgaaccttgcctcatttctccattcctttacaatgaacatgccagagagatcaaatcccttggagaaagagataatttcaaaagcatttaagtttgtcactgacatgggcttcacatcttcatgagcatttttcttgcgtctcacaccaagcaccggagcaacatttttggtggtgttttcattcaaagttctttccttcaaaatacggttctcctcaggacctttccggaaccaggtagactcctttatcttctggattgaaatccttgtgcttgggttggggtccatgatcttgtacaacaacttctggagtttgcgtgaaaannnnnggggcacctgaattcaccgtgttgtatcttccgatacatttccatcaagtttgggccctggaaaggaaggtaaccagcaacaagaacaaacaggataacaccacaagaccaaatatctgactttgcaccatcatagcctatcttgctaatcacctctggagctacatatgcaggtgttccacaggtggtatggagtaagccatcttgcctcttcgactctgaaagcgcactcaatccaaagtctgagactttcaggttctcattctcatccaacagtaggttctcaggcttcaagtcccggtgatacacacctcgactgtggcagtaatccactgcactaatgagttgctggaaatacttatgtgcaacaacctctgtaagctttccacgctttgcaaccttttcaaatagctcaccacctttcacatactccatcacaaagtagatcttgttccgtgttgccatgacctcatgaagctgaacaatgttcttatgagccaccaaccgcatggttgtgatctcacgtctgatctgctccgaaagcccgaccttcaatatctgctgtttgtccatcatctttatggccacactctggtttgactccagattccttgcatagtgcaccttgccaaatgttcctttccccaacaatctccccaactcatacctctccattagaatcttccctctactctccatgcccacaaagatataaatctcagcactatgttttgaccaccaatcagatggactgcaattctttagccatcctccccaaggtcatgatcgtggatggagaacaacattcttatatcatcgtcgtttcggagtctaaatggtgtagaattagtgcaggaaagttgatcactcacatcaagacttgagtagatcagtagcactggtgaaccagcaatctgttttatctcacacggaaaatttcttctatgcaagcacatctttcagcattccttgaggctttcactgcttgttttttttattgattcccctgtataaacaaaaccaggcatcagatttagtaattgaatgtcctaggatatgcactcaagtgctaacaaggtacgtataataatctgaaagtctgtaagaactttaaccaaacaaaagttaatgcgaagaattttgaaggcttattgtaatactaaatgcatttttgtacctactacttatataatataagtgttccctagaatcaatcagaacttacatgagttcaacgtgttatgtaatagataattaatataataaggaacttcaactaagtacttatcagaaatctaggacagtaaatcagaagctaacaaaataaaactagtcaattacgaattaaaatttgcaaccgatgtgaattattctacatctttcgttcaagttcagaaaggtgattaataaaactagtcaattacgaattcagaga

SEQ ID NO: 17862 - DNA, 11033 bp, Oryza sativa
tattcctgtaatccattatctaaaaagaaaaaaacctatcaagtactcctcaagtagtctgaagatgcttactttttaatactactcatttagtttcacaatgtaagtcattctaacatttctcatattcatattgatgttaatgatttagattcattaacattaatatgaatgtggtaaatgctagaatgacttacattgtgaaacggggaaagtactatttaattagttaattaggtgtcaatcttaggagaagtgtgtgttcaggttgaagccggtggtggtgttactagcaccctggcctacaagggaggttggacatgacaaggactccaggaaggagaacctgaaacccaaaatgaagatagaaaaaggaaaagagaaatgatcgtttgtctgaattcaagatacaatattcagtctagtcaaggaaaggaatactaccatttataacaatttattaggcatggtctaaaatttgtgaatactcaaaggtgttttttttttcaaaataagagtatataagatacccctgacattacttaagctaagataaaacgtgaaaagaatatgtcagattttttacgaaaaaataagcaaagtcaaatacggatcatgtgaacatattctgaaaattcagttgtggttggtcttgtgctgttccaacgtaaccaacctttcctcctcttccctctgcacatctgaattgtcaagcaaccacaactcttgtccatcctctccaatcttaagcaggataacacaaagaattcttccttcacattcccattcacaatccttccttattcaacaatttgtctgatacttgcatgcccacaggcagctcaaaaagctagctacttgtttctgacttgtatcatttctacatagatagctcaaagcctctcaaaatcctgcatttcttgctcaaatggatttttcaaggcatagattcttcaaattcagatcagcagctgtctccttcctctccatgtaactaatttcaagctctcaagatcagcaagttcagcaatcactagactagctaggctcactccttccacatatagtcacagctgctctcatcaatcaatctatctttccagcttccaggtgacaatcgagacctgaatttctgaactttttttccctctcgtcacttcgtcagtagaaatccaaggtttatattcctctgtactactacacaacagagtgagcgtagtacgtgtctcatcagcatcaaaaagtgacatactgaaagcacgccacaattgaggccgattgatagaatcgaattccactcaaaattgcacggtggaagagaatcccctgcgtgcttgatttgatcaggatttatattggaggcatccaattccatcactcaaccggagctgtctgtctgtagctatcgccctatttctgctagctcgtggcgtgccagtttaatttcttccaaaattctccggcctcacctcgcgtcgcgtcgcgtcgcttgcgttaggaggtgcctaagtagtggcttgtcggcgtcagatgagtgcagggacgtgctgctcggaggcgtccatggcgtggatcgactgctccctcctcgcctggctcctcttccgcgtcgtcttcttctcctgccacgccaagcagttcagcatcttctagcactcgatcagctaggctgaatccacatatactccagcatatatatacagcaactgattaagtaagctgttgctcgccgacgacggtggccgagcatgtccggtgcacggcggtgcggtggccggacgtcggagagaagctcggtggtgggcgacaacaggaatggatacgtcgagaccgacccaactgggcgctatggccgggtaatttattcacttcttcttcttcttcttccaaagagaaatttgacttgtttcctttcaaagttcaatcttatcatgattgccaaatgatcagcaagcaattccgagctattcagggtcaattcagttcattgctttttcgttcaaaagaaaaaaaaatcagttagttgcttttgattctacttggacatggattgtgcctatcatgcatgagtttagttgttcagctctatcatgttctttagatgtgggctggtacttggtaattacatttcaatacacgttgtaagcatcagttaaaacatgttggcttcattctctttcagaaaagcatgtaggctttatgttctttagcataattttctagagtagattccatgttgatgtacacatcggagctaacacctctaaactatgcaagacacaattattgtgtctttagtactttcatcgtatccatttggcttttgctgctatctatgggctgcataggacaattgaatattgcgcattgaaacatatcaggtttgaggtttcgttgttaatcctaagccattgctgtactgaaagataacatcatttttttctatatttggtcaaataacggaagtgcatcataaatttgagatgatgagtgagaattcgattatgatctcttccaatccaatcagggaaggtaaggtgttccttatcaaacaagctagagttgttgtttggttggcattcagtttcctaatatgttggatttgatctgaatagataagcatgttccatgtgtcaatctgccaataatcagatgttgaaaaagtttcaagagtggagtatatgccctgtctggtcatgctcatgcccaacgatttgatacgatccgctcacctttttcttagtgggatgaagacgtattggcaactttattagttcatctttttcagtagtttctctagggttagaggtgtacttaccggcaacttatttgtagttatgtgagctttttgcaaaagtgtcttacttttataaatttgacaactacccactactttgagttaactttttatatgtatagtaattttaacttttgatcagaagtactggttgtttagtgctaaattagggagagtagttaattgaggtgccaaattggttctcgtaactcaaaagtgttgattttatttgactagagattttctagacattactgtagcaaaaacccgtttggaatctgcatttttcacttcagaacattatgaaaataaaacttatataagatttttaaatcccatgtaaaattaaattttaaaagatgactataaaagtgcactacaataaataaataaataaataaaatttatctcattctcttgaagaaaagcaattcattaattgcactttctagtgtagtacaatacacaataatattgttttctgaccatgtgctcatgatctgtaagtatatattttctctacatatgcaagcatgtttgtttcaaaaactttttaaactgcacgaagtataaaatatttagaatttagtgaaagcaagcatttcgaatcaaaattaaacttgtcaattcagaataaagtagtctggctagcttgacaatatatagataaattaattaattcgctttgtgctggcatgcatatttctggtatttcagatatatcagaaatttcgttttgtactttctgctatttcagaaacttgaagaatttccccccccccaatatgaaattaatttggctgaaaaaaaattcttgtttttaagtaagcaaattttaactaaactttaaccaaaatttgttgaaatttcaaccttttcggcctgagatttccgaaatttcggttctatcgaaatttgttcaaattttgtactgtatacaatatgtgtgcagttgtcggaggtgctggggaagggtgcgatgaagacggtgtaccgagggttcgacgagctgcggggggtggaggtggcgtggaaccaggccaccatctccgacgtcctccgcaccccggacgccctccaccgcatgtacgcggaggtgagcctcctcgccgacctccgccacgacgccatcatcgccttccacgcctcctgggtccacccctcccgccgcaccttcaacttcatcaccgagctcttctcctccggcaccctccgctcctaccgcctccgctacccgcgcgtcagccgacgcgccgtcgccgcctgggcgcgcgccatcctccgcggcctcgcctacctccacgcccgcggcgtcatccaccgcgacctcaagtgcgacaacatcttcgtcaacggccacctcggccaggtcaagatcggcgacctcggcctcgccgccgtcctccgcggctgcgcctccgcccgcagcgtcatcggcacgccggagttcatggcccccgagatgtacgacgagtgctacggcgtcggcgtcgacgtctactccttcggcatgtgcatgctcgagatgctcaccaacgagtatccctacagcgagtgcgacaacccggcgcagatctacaagaaggtcaccgccggcaagctccccgacgccttctaccgcctcaccgacgccgacgcgcgccgcttcatcggccggtgcctcgtcgacgccgcccaccgcccctccccgaggagctcctgctcgaccccttcctctccccgtctcagaaccacgacgatcacaatatcattgctcatgcccctgcgccgccaccgccattgccattggcgtgcagtaattccagtgaggagcaagaggaggcggcgccggcgccggcagcaaagacgacggacatggcgatcaccgggaagctgaacaaggagcacgacaccatcttcctcaaggtgcagatcggcggcggccgcaacgtgcggaacatctacttcccgttcgacgtggcgaacgacacggcgatggaggtggcgacggagatggtgaaggagctggacatcgccgaccgggagcccacggagatcgccgccatgatcgagcaggagatcgtgaggttggtgccagggtacaagcagcacgagtactcgtacgcggatgacaacgacgatgatgacgtcagcggacaccctaatcccttctactacctctcctcttcgccgacctcctctcagggatctctctgcggagtggggtccacatcgtcagaggggtttcctggcccacatggaaaagttgactggtcaagaggtactataacaaagtgttttcatcttgattactttcctatatatcaacaacgtgctattctaatctgaatatggttctagctatatagaagataaaaggttgggttttctatacaaatctcttgagtaggtagaagaaacttgcataattaaacatttttacatacagttttgaaatgggcacatgacgtagtagcatgcatgcagtgatgcagatgataatagtgcggcaccaacttccaaatgcatgtatgtatacctgaagttagcttttgttcatttgctcaactgcttttgttcctatgcaagaaattaaatttcctagtcaccatatatatgaacagagaaattggaagtcagacgtgcaaactactagaggtagctagctagcaaggtggttgatatatgcttgtccatttgtcgttgctattcgtgccaatcctgtgacacgaatacatgcgtcagcgttatatcgtttctgttcctatatagtactagtagctagcagcttacagacagccatgcattaggttcgtgatgcataattgtggctttcactgtcacaattgatctctgcagagacatcttagacggataaaaattgtgctcagttagtcgtgttacaatcatcatcctggccggccagcagcataaatgtcaaatggaatagttgtcatgtaacatacacatcaatcattatatctactacaagtactaccaccagctggttagtgcagttaataatgtgcgcatgaaataatggacatgaataatgaataaagattaggcactatatatacacatggtacatatatagctccccatttcattgtcatcgaccgcatctttattcatatccatttatttcatgcgcacattattaactgcactaatcagctggtggtagtacttgtagtagatgatgttttgaattgactaatccgtttgatttgatgcatggtgtagattactgttactaccctccaagcagcgtcagcgtgagcgacgacgatgacagcagcacgagctcactctctgctgcagtcagtgcaagcagcctgcatcagcagcagcagcattgctcggcctcttccagcagattggggccagcatctgcatctgcatctgaagacggaggaggaggacacgccggacggccacggcagcgagagggggaggaggagcggcggcggcggaggatgagtcggaacaggtccatggtggacatgcggagccagctgctgcaccggacgttggtggaggagctcaacaagcgcctcttcttcaacaccgtcggcgccgtccacgacatcggcttccgcgaccctactgctgctgcttcttcttcctctagctcttcccaccaccgccggagaagcagcaacaagatcgaccacaagcaccactacatgttctgaataaacttttcagagcaacttaatttgctactccattatgtacagagaatcagatgcagagtattagcctctgataatggattagggccgttcactttgatgccactttgaaccttactaaattttggtaaaactaccaaaaaaaagtggctacatttagtttgttgtcaaattttagtaactatatataagaaatcctgctaaaattttaacaagttgccaaaatttgataaggttttttttttgacatcaaagtgaacatgcccttaatgtgcgcagtgcagagtatgcattgcgtgcgcggccacaaaattgtgtatatttggaacgagtgcatatatatatatgcgtgttatcaatgagagtttcgccatgagacatgtaagtgaatatgggagtgatatgtacatatagttgttgttaccagtggagtacaaaatactactccagcatgcatgcgctgctgaccagagtttttactgatgaacagctctcctaatcaacgcgctgtttttttttcaagtttcaattttgctaataaaaatggctctctctttttgttgaaagtgttttcagctttggtgagtttgctggtcgttctccgacatcttttccaatccaaatttttttccccgaaattgattgtggaaatcaaccaaaattttctaccccgagatcatcttgggctctggacacactgatgtgatgaccctaccttcctgggccacgtccatcgatctctgggctgcagtaatgggccttcgcccatcaccgcgcgtgtgcaattactgcaaggaataagttcactttaggtccctctatttgtcggtcagtccgattttcgtcccttgaccacaaaaccggatacgacccatttctcaacttatcaaaacctaacaaacaagatccctcggcagtatggagtgtggttttagccaacgtggcgcctacgtggctcctctaactaggtcttcattccacgtggcattgacgtggcaactcgatctgaaaaaaaattaaaccccataggacccacatgtaaattaaaccccataggacccacatgtcagtttcacgcataaagtaataaaaatggtggggccccacatatcactcccacccctacctcttcttcttcccctctcccccatctcccctctccggccacggtcacgccgccgcctgggacgacgacctcaagaagacttcgcccgggcgtccgcccacgtcgctgccccagtccgtcccgtcgggcttcacgccgccgtccgctcgcccgccccccgcttcgccccgccccgacggcttcgcgccgctgcgtgccggaagacgacgacgacgaggctggcgccctctgcttggctccgccgcccgccgagtcgcagccgtatgcggacgggagctcgacgcggcccgccgcggaggaggaggagaccacggcgctcaagactctgcaagttccatctagctttgcaaggcccatcaaccgcagcatcatcagttcttcttcttcgtcgtcgtcgtctcagaattctctgcggccaaagcctggtattggcagggctcgccgcaagtgtcgccggagagaggcggcgccggagcacggtggaatcttactataaatgcctgtatggtgatgttggatgctcattcagattacctgctccaataatagtcaagactcaagagtcgattaatttctaagttccaataatatttggtgtttatatatattggactcgcaagcaagaactactacaccaggttaggtgaatggtccagcttgcccaaaagttgcagatgaaatattcagacctgtggatcggacaaagtgttcccgtttgaatcattgatcatagctggagaaaaaacctaggagctggggataactaatatgatatatatggaagacgtgatcatctcaactaacaatctatggcgttgctggttgtagttgctactacacgtttgatgggaaacatgcaggggcggcaacaacctgcacggctgcgtggacgagggcgccgcggcaggagcaggcggcggagatccccatcgtgctgttcctgtcgatggtctttcccggcacgacggtgcagctccaggtgttcgagttcaggtaccggatcatggtgcacatgctgctccagtgctccaggaggaggtcaccaggttcggcgtcgtgtactcctgcatgggagtgggggtcggtgtggcgccccgccaggtggggtgcgtcggcgacgaccggtttcgcgtcgtcggcgctgtccagacgaagccgcacgcggtcccgaggatccgccgccccgccatccgcccgccgccgccccccactccgcgcccgctctaccacccacgcgaagcttcttcgtcggcggcaatggctgataggggaagatagggagaggagaaagaaattgctacagcctaccgactgacatgtggggtcccatatgggccccatcacatttattttgttgtgtagttgacatgtgggtccacgcgggccccaccatttctaaattattatttttttgtgtagttgacatgtgggcccgtggtttttattattttttcgagatataattgccacgtaagtgccacgtcattgccacgtggaacggagacctagccaaaccagccacgtaggcgccacgtcagccaaaaccgctatccaaaccgccttaggaccttatgtgcactggttttgtaagtttggggatgcgttatatccggttttgcggttcagactgggcgacaagagggacctaaagtgaacttattccttactgcaacgcgtaaacagcctgcaacttgctgtatctgtatgcgtgtcgccagcttcggaggagggcacggcaacgatccagagtcaacggtcaaatgttccctatcccatttacatctctctcttgatccaatgcattgtaccaccaacttcttctccaagcactgaccctaaattgcctaattgtttcctcttttttttttatgaaatagaaatcatgtatttgtctcatcttctcaaggtgttcaatgtgtctcagatatcgcgcgttgtcaaggaccaaattatgctgcatatcttgctaacctctttatattttgtatctagctgatcatctcgtaattaaaaggtagtaaatttgatctgtaattctaacatcaatgtaattctaaatttgatttgtcccatggaagcataaccgatattacataaattagactcatcagctgcacccccctccacccgctttctttttcctttcttattataatctcctagcccctgggctattgtacagtttttccccctactttacaaatacaccccgcggggtttaaaaaaaaacatcaatatgcatcacagcagtcagaactcagaaatattcagaaaatgcaggggaaaccaaagaaaaacgttccattagttgttgcgaactagctagcaaatcgatctcatgtatatatatatgtacatagtttctgtatatccaacaaatcaacagataaaaagaaacaagaaaaagaagtagcctgtgtcatacactcatacatacacaactaagatcgagagcctacagaggaggaagaggaagatggcaagtacgagcagctagctaagctagtttgtgcgcttgctggggctggatggttgtggccttcctctgggcttcatacttctcaaccaagacagctgctgctgctgcaccacttgttcttcagtcctcgtcgtcgtatctgctgatgctgtctccgattcgtgcttcagctgcggctgcatcggcgtcgtcggcgacgggagaagcagaggcctgctgcagctgccgtggtgcgcgaagaagacgagcaggaggagcagcacaagcagcagcaacgacgacgacgagctgcagggcttcttgttgcttgacaatagcaatgtggccattgttgtgatctccttgtgttggaagctaatatggatggatttgcagaggaattgaagcacaggtagctatccgggatataaatacaagagataggtagccgcagagcgaagaaaagggggcgtttcaattaaagtcaatggagaggagacgatcgatggaattattaactcaagctaagacgtgtttcctcttccaaaagattagctctcaagacgtgtggaatggaaatatggaatcaattaagccagttttgcaagctggaaggaagaagcagaagaagatgtagataaagaagacttggtgtgaggggaggcgtgcggatcaagttgaagctagctagcaacgatcgatggagggacgacgcgttttgagtagcaagctccacctggcgagaccgtgtagccgtctacacattgatgccactagtatactgtacattctgcttcactcataggctgacaggccacgtaccgactttctatcagcacacctcatctatcagtaattccatttaatttgtagcgaaaatgtttagctatcgtgcaaaacgctaggccccatgcgatcgaggccatgtcttaccgataatgggagtatttggagttggtaagcgatagaccacaa

SEQ ID NO: 17863 - DNA, 3007 bp, Oryza sativa
ccagacggcgacaatgaagcagacgaggaacaataatgccttcccgtccgtgcctgcatgatgccaatggtgcatgcgttgccagctatgagctattcgtacgtgcactcgatcgatcagtatcttgatgatcttgatcaacaatataatataataattaatcaaaagctgctgatgctagccgcagtacgtctctttaattaagctgcctggctgcttaatcgattgtgtaacatgccagtattttttgccaatcgacttgggcttatatatctcaatcgactctggatcggagtaattcccccgtcacaatacataagaatatataatatgatgaaacacattttaatactataaatctagatagactctacaaccaaatctataatcgaattcgtagtacttagatatattctatttaattaatactagttacatagtcgtgttacacgtgacttttgattctgtttaagtactttgctatatgcaacctcgttattccgtttatgcttatgcttgtatttcttaaattcttttcatgactctgtagtgtgagaccatgaacaaattactccctcgttttagaacatagcaatttttaagcatgaatctagattgggattgagggactcaagagaaacacgtaggggtcttttggctagctccacaatgtggtgggctagacgatctcggttcaaaacctcaccccttctaattacttgatattagatcattccctaatatttgtgtcttttttttctactaaaaaaatagttgcccttctatctcaatattaatcttctacgtaagtacaagatactagataatcagccaattaatcaatacagaattactacatacagtgacatattgcagaatactacaatatacaacatgttcagtgacatattgcagaatactacagtatacaacatgttatgttcgacattcttttttcagtacaactgcatggccaaaattaaagcgaactctagtacagcacaatccatctgctatctgaatttgggatcagtttcatcagaaatagtgtcttgttgttcgtgacagaggaacactctgcacgccaccatggtctcacccaccttcatccccggcgtcacggtgaacgcaactccatctcctccgccacgaccagcatcggcggcggcggcggccacgacgctgtccatgtactccgccgcgtacctgctccctctcctcgcgtacaacatcctcacacttccacggccacaacatcgccggtgcgccgtcaccgccacctgcagcgcccacgccgacctcgccatcgtcgcgaacgccctgtagaaccacgtcctcaggtgcccgcctcgcgacacgaacgccctcacgtccagattgtttctgaacatcgctgcctccatctctgacggcacggccgctaaatactttgttcgacagaatctcgcgaagctggagtttggatgcgccatcaacgcgtcaagagggtcacagcacctcatgatccgatcgaagcgagcaagatcgagttcgtcatcatcttcagcaccatcatgtactgcaagcattgttcgtgacaggtaagcttccagcgagtacctcttgtatggtgaatgttcgtctgcattgttggtgcaatgatgatcagatgaggaaatcaagctaaagatcagctctgcgaaatcatgcaccgatgtcgatgcaaccttgaacagctccaagactgcactgggtgtcgtcaactttttcaggacaacggagtaatccttatgatggttaactgatggtttgctgctactgatctgtttattcagtctcgaattggcactcttcagaccatccagctctcttctcaacagcataatgtctgaatccttcttcctcgtctcagcttccagttcctgcaccagcgaccatcgatcgttgatcagtgacccgacgctgccattccaactgcataagctctgaagagcagtgaccgagtcgagctcggaggtgatgatctcgtcggcgaaggctatctttggaggattataagggatatgggctttctgcagcttgatgtaggctgacttgagagctccgatttcctcaaacagtcttgtgataattagcctctgatcatatccgccacaataatctccaaattctgtcttcgtgtcagcaaattcaggcgcggcacaaatctttgtgattttgcagagcttggagaagcctaatacgagtccaggaacattacaggtgctccttgcaactgaacttcttggtgttcttgactccattggggctgattcagtgaaaaccaagaaacaaaagaagaatctttgagacgacatgggagagtatggtaaaattatctacgagaaaatcaatgtaatcaatggtttgaacttgctttacttctctaattcgacagaaagactaacaaacctctgtttatgaccacagaccaaatgcagcaatatctttcattttgtgagatgtaaacccaacagtaaaccacagactacataggctccatctccactgttttgagcacttgcacaacaaaattcagatactacaatgtactactagtagatttgagcaataagctggagccttgcatttgcatggttgtaatggatagaattggataaagcagtacacaacagatagagctatgcaggatcaagaaaatatgttgcagacaaacagatttatttgttgaaaatgaagggtagaaccgtagaagagcaagcatgaagtacctgggactctgggagagggaggctgggactgacaagtgaaatgctgaattgaattggtgtagagtgaccaagtctgaagctgctgctgctgctgcctgctatgcagagaggaaagcgaaagagcaagcaggagcagtagtacaatgaaggacaagaaatggacatggcagtggcattgggaacaacaaaagcaaaaagcttgcagagacaaggtttttgcgatgcattgtggccactggaatggatagtgtgtgctg

SEQ ID NO: 17864 - DNA, 2060 bp, Oryza sativa
aagtagatttttcccaacattaaatacacaaatgaaaaataaacgtaacataggaatggatatgtaccttctgttgtatattactatatcgcaattctgttatttctttcaatgtctttctattgtagaacatttgctcttcaatggttccttgagtgcttgcgtccacttcaatcattgtgggcaaaaccttttcagcattatgcctataaataaaatgcaatataatccatcagataattttagacaaatcaacaaatatatatatgaatttaaagctactactgcacacctgctcaatatttccatgcttgcaggaatttccatatccaaaaaaacttctgtcgaacttgttactccaaatgataataattctaaatgatcaatgtcgttagtttactaaaactataagtacgttaaattagaaaaaaataacatcctcactttcatattctttaaccagaagtccagtggcgatgaacacagtttgcttcccaagcaaatcgtcgtcaaccatatttgctaaaatatctccccatagagtaattttaactttttctcccctacaaatgcaataaagtcatgtaaaatataccacatagaaagtattagtgctggtttaaatttgcagacaacaatcttactctaataaaaggagttcaatttcacgcatgttgcaaaccctctccctgcttgtgttttttcctagcattctttgctcgatcggcttcatcccgctaagtaagccaatcacatctaaatacaaacaggtctttagtacaaataacaatgtttaaaagaagtaagattatgcacatacctgataactgttgatctttattcaacctactccttaatgttttcctgtctgtaaactcgaagtaatagtccaagaaacattgtctttttgattttacctcttttactatggtatcatgataaaaaaggattttcagattgttttttaggacacggtatttatcatgttccataactttgaaatttttaaaagtatatattgagttaatcttaatttttggcctgaagtggttcgccaattgctttgagatagagacatgtattgagttgccctgcaccaaaaaaatagtatttacataatagaacaatatattaaatcacatgtttacaacaatcatacctctgcatctagtacaatcatctgtataccatagaactcatcaaccattgtaggattaaccgcatcccatagcctaataacttttactttgattctccacctatcgttctttggtgttaattcagtaatcaaattgctaggtgccatgttatctgcaaatgagtagtactgcatatagttactaaacaaatttgacagagagtcgtatacatgtttatgttattttatagaactaattaatacaaactctcataattgtgttctttgataggtgcaaggttacttttttgtgctggaaaaaaaaatgacaaaattgtatacatagatgcaacataatgtacctctaactaatacaggatatcgtaattgttgtgctggaaaaaaaaatgacaaaattgtatacatagatgcaacataatgtacctctaactaatacaggatatcgtaattgtgttcttttgtaggtgcaatgttagtttcttctgctgaaaatatgatgacaaaactgtatagatgcatatgttatttcctagctgcaagatcatgattagatgatgtcatgattgtgttcttttgtgggtgcgtgatataccttcttatgccatagatgattcgcaaggtgccgcagacttcttctgctccgtccgccggaatcgacttcttctgctccgtcgtcggaatcgacttcttccggaatcgactaatgtcgcatgctggcggggtgtatatatatgtatgcaagccttacgaatattgtctcatgtatatggaactaatccttcttgcaattaataatctttcctagtgatctaaattttgctttttgagatttggaatcttgccctgtgtacacgtacatatatttatggaaataatgtgcggcccctacaaggtgctgaat

SEQ ID NO: 17865 - DNA, 1973 bp, Oryza sativa
atttaatagaaatgcgggacatttgtaaattaggtacaatatgatcaattgcaatgtatgacttgccttgctctcgcactgatgagaccacagcaacgtcttcgagaaaccacgaatcgacgaaacgggcgaaatctacgcgacaaacaaagcacacaagcaaaacatgctataagactactgaaacaggaaacaaaaccatttttaatggattctacacatttttatgaatttactgagacttgaatggacttaatcggagctcggatgaattacgtatgatttttagaagattctctgtgtttttactattaaagaaaagccttaatgtatttattgcgcaataattcaccccagggctgacgtcagcacaaggaggggtggcgccgacacgcgggacccgcgggtcagcggcacaaggggagagggagggggcggctggcaggtgggcccactgggcagcggctcaagagagagagggaggggcgccggcacatgggccccactgacagtggcacaaggcgggagggggcgcggctggtggctcggctcggcttcaagccggccggccggttatggcgagggcggcggcgcgcgcgcacggttgccagcgacggcaaccggcgacgggaggcggcggcggacggcgcaaagacggcggcggcggccgaagcggcggcgcgagcgaccctagcggcggcgctacgcggcgggcggcgcggcaaagggagagagaggaagagagggagaccgatcctcaccgaggggctcggccggcgcgagggaggagcgacggcgaacggcaacgacgagagacgggaggatgacggcgacgggttccgggaggacctagagaaaaggttgggaggggttagagagagggagatgaaccacggcgatcggaaacatggccgaaggcggcggtggaggtggtgctcacccgtgcgcgaggggatgagggctccggcgatgaacttcgacggaggaggggtggacggggtggatctcggccacgcgaatcgaacggcggcgacggcgcaagacggcggcgagcctagcgacggctagcggcggccggagtagcgggaagaagcggcggtgggtggttgcacggcgcggggacgatggggagcacgggaggggtcggcgatatggggaaaaagagagagggggtgccggcgatgcttaaataaggggagagggggccgcacgtggccgggagcggcgggaatcgccggccgacgtggggagtgggggaggagagagaggcgggattcggttttcgaatcccggccatctcgggcgcgggcgcgaacgggagggagaggggaaagagcgcgggagacgcggcgcacgcgcgggcgtggctgacgtggcccgggagagacggaggcgtgggcgcggcggcggtttcggcgcggcggcgcgccgggatcggcgggaggagggagacgggcccgacaggtgggccccacctgtcggcgaccccgagagaggaggcagcggggcggcctggctgccggactgggcctcggcctgcggccggcccagcaaggaggagggggaggaaggaggggaatgggccggcggcccatccgaaaagaaaaaaggagggaaaaagggagggaaaagaaaaagaaaaaggaaaaggattttccctggaattaaaatttgcactttagtgatttttaattggttaaaattatttccaaggctctgaaaattccactaaaaatcctgttagcatattttgacatgtagaatccaagaaaaattccacatgccgattccgattattatttgcatttattactttagggtttctctctaggttaaattaaacaatttcttcggacgatttattttatgaatttagagcaagggaggggaacttcagggcgtgacaaacctaccccccttaaacagaatctcgaccccgagattcagaagagctggcgaagaggtgcggatgg

SEQ ID NO: 17866 - DNA, 995 bp, Oryza sativa
attcctgcagccctgggataattggtctcgtgtggacgcaactgtcgcgaagcgtatgcgaccactctgccttcttgcatcaacacacatcccaacccttggcgagatgcatcacagtagacttggaagtcttttgtctgatctggcagaattagaactggtgcggagactaacttcttcttgagttcttcaaaactttggttgcactcagctgaccatttgaatttttcatctttctttagcaactgtgtcatgggcctggcaatcttagagaaattttcgatgaactgacggtaatagcccgcaagtccaagaaaactccggatctgagaaactgtctttggtggggtccactttgtaactgattccacatttgatggatccactgccacgccttgagcagaaatgacgtgacccagaaatttgacctccgataaccagaagttacacttgctaaacttggcatataactggtgctccttcaatttctcaagtaccagacgaagatgttgctcatgttcctcttctgattttgaataaataagtatgtcgtcaatgaataccacgacaaacttgtcaagaaactccataaacactttgttcatcaagttcatgaagaaagccggtgcattggtgagtccaaatgacataaccgtgcactcaaacaacccataccgagtgatgaaggctgtcttgggaatatcctcttcccgaattctcaactgatgatagcctgatcgcaggtctatcttggaaaacaccttagctccttttagctgatcaaacaggtcatcaattctgggcaacggatatttgttcttgattgtgacctcattaagggcgcgataatccacgcacatcctcttggtcttgtctttcttctccacaaagatcaccggagcaccccaaggtgaagtactcggtcggatgtaccctttctgcagctgttcgtcaacctgcttcttgacctctgctagctcctgggctgcaggaat

SEQ ID NO: 17867 - DNA, 2885 bp, Oryza sativa
  unsure (1)..(2885): unsure at all n locations
attcctgcagcccgacagtagtgtgctgtcctcatatcatttccaggggtatgaacctgcatcggtattttaagttccactaccgataatccatgtgtcccagcaaatcttttggaaatgaaagaatgcgaggcacctgaatcaaagagaactgttgctggatatgagttcactggaaacgtgcccaacacgacctctggtgctgcctgtgcttcctctgcagacacatgattggcgcgggcctggatgagcctgggtccagtgcgattcagcttcggacacttgccagcaaagtggccgtgcttgccacagttgaagcagtgtcctggctttcctacagcccccttcttgggttgttctgactgagctgacacagctggcggatctgactgagctggtgccattagtgggggtggagtcgagttgtggttgtgctgcttactgttgttgtgactgccaccgttgtagtcgttgtcgaagttactcgggtgatagggatggtgctgacagacgatcagggtggaaggcccacctagctgtcccgtcatgaaacgaggcttctgattgttcccctgaggaaagctgatctgagctgtctttctttttcggtctattttgttgcgttgctcttcctggcggatagccttgtccacaagcttctcaaagtcctcatagactccggagattagctggttggtcaattcatcgtcgagcccaaacaaaaacttctcctgcttctcagcatcggtgcgccacgtcgtcagggagccgtagcgcgcaagggcggttgaactcgtgcaggtacctctgtannactgacatggttccttgctagaagcgcacnggaactctctcttctgttgtgccataatcccttcaggaatctgcgccttcctgaagctttgacaaaactctgcccaagtaacctccgttgcatctagacgggtcgccacgtagttatcccaccaggcagaagcgggaccttgcaactggtgtgtagcaaaagcaactttctcttggtcgttgcattgcagtaggttcagcttcttctcaatagcacggagccagtcattggcctccattgggttggtggtgcttgagaaagtgggtggctggatacgaagaaagtctaacagtttggacacgtgtgatggtggaggaccaaactgctggttctgttgcgcctgctgcaacatctgatggtaatgttgctgcatctgttgcatcatcattgtcatcatttgagtgactgttgggttttcgggcggtggagatggtctgctgccagatgcactactgacatgagctccatcggtctgctcttcgctgcccctggcgtcgctggagtcacggggatcattccttgtcttcaccatctggaggggataggtagaaataagagaaaggaagaaaacagatggctcggaaactaatctttcttatgaaattaagtgccattatcttaatcttgattaaaacactgaaaaagaggcacacaactcctaataaaggctgtcataccactcacacatgatatcgaccgccgactaacccacaagcaacaaacctaaacaccaaaaactagcacgcaaacagactaagaagacgataaagctaagggcggcgactctgaagcttggagcggcgcttgcgatcggagaataggtctgacatctaaagagtacagagggataggaaccaacacatgctaaaaccaaattaaataaagcaacgaatgactcaagtaacttgccgagcatgatgatttttatgcatagaacatttttcatgaacccggataaagacactaatgcgactgaccaaaccatagcttaatgcataaactagttgcatggaaaatgatgcgcataaaattgccccatcgaacatagacacgacctaatgcatatcacccgataaatccccaactgactgtcaaatataactccaaataaaatttttctaaaaccctagaccgagctaattttaaggatccgatccgaatgaacgaccaagatttttcccacaaaccaaagaggcaaaaccccaaatttttcccgaaacaaatccaattgcaaagaatatatgcaatgaaaaggattcagagggctcttaggtttttccatttggcttgtcctacggtcaaggtcggctctgataccaacttgtcacgcccagaaattcacgaaccagaatttctaagctgaatgtgcattaaacccctgtccaggaccagccagggtacacaaacgacaattgttgacatacagatccacgtcttacaaaaatataaaagattacaaatgcagcggaaaaagagaaaagcgagctaagcctgaagacttgactcctgcagcgggcgactccattccacaggcaatccttgacggcagcgacgaaaccaacctcttcgagacatcttcaactgagaaggacttcaactctggtgtgggggaaaagagagcaagactgagtactacccacggtactcagcaagtcacaccggaagaggaggtatgatgcaagatatatccaagggaggctaaaggttcttttgcataaagccggcatttcaaagcagtagttgaaagcagtaaaacagttgtagtaattaatccatattaaccaatcactgtccaacgttacaccacgttgcaacaggcccaaaccaccacctgaactagccagttcattaagctaaactaggggtgaaactaatcacggtgaatctggtcgaccgcccataaccgcgggcacggctattcgaatagttttactctgatcagaggtgtacaactgtacccacaagacacagccccacgacacgttcccgtgcgccgacatgccaccacgacataccggaaagaggccgtgacaggaccctt

SEQ ID NO: 17868 - DNA, 1935 bp, Oryza sativa
aggtttggattatttccatatctgttgatggaatgaagacgcctagtcaaatcaatctattttctcaaaatggttgagtttagacattcaaagattgctgtgagaagaacgtggtgtacttaattactttatatttagggtaccatcttgaattcttttgagaagtccagatggaattgaaccattgagttgatttcctgtcagatctctaaagaagccatatgcccataaggtatatgtagatgtttgttaatacaaatgatgctaggcaataaagtaaaatttgacagaagttgcgaaacttacaatactgtcaatgaaggtaactgtgaaagtgcatccggaatcgaacctgtcaaattgttgtttgacaaatccctagaagatatgaagcaagactttgcaaattttaatgcaaaattcttacaaacaaggttaacaaattaacattattcaactcagaacgtacaagtattgaagagccttgagatccccaaaagaagatgatatctcaccactcaaaccactggaggacaggtttctgcaaagagaatgtgatcagatgaccctgtttcatacttccgttatgcaactccaatattcagtacgtgtggactcaattacttacatttttattacgtgtttggagttttcatagctgcatgtcaaactttcccatgtaaattctgtcggaatgcacggatcacccatccaattcttcttcacctgatacttttccttgatcaccatcatggcagaagctgtcaagtgcaaagatgatttcgatcagtaacacgcgccaaaacaattaggccatttcacttgtgtgtgtgtgtgtgtgtgtgttctctatcgtctatgtacataccgtcctgaccatatgtgccaatggtggtggtggagaaaacggagtacacctccatggcgttgatgaacggtcgcatcgtcgagttataggtggcgttgatggagatattgtactgcgggtatcgtaggaaggggttggtgttgtagatggcgtgggcgtagagatacactggcttgtagcccttgctgtacatcatgttgccgttgaggttgatgtagaattctcgcacatcacggctgggggggctgagctccagctcggagaagtgcatgatggcgatgtaccccggcgacgggtccttgggctgtgtgtaggctacccatgcgagctcgatgttgtctgtggcaaacattgggacaatagccgtctgcatcaccgccgttggcacctcgaacaggtcgtcgtatgtctgctgcaccggcctcgtcgttgatatctcggtccaatttgatggcgagtcccaaggtgtccatactctgtcgcgtggatcgtcggggtacctggacatgaatctcttgaaaatatagcaccttgaattgactattcatcgattattttcaccagtgtataccggccaacaggcaaaagctgaaaatgtaaaccattttctgtcatccgaaactcaaactgaggtcatttatactataccatactaccgtatattagggtggtcatactaattactacctccgtcctagtaatcgctttgactttttttcttttaacgtttgaccattcgtcttatttaaaaaattagtgcaaatataaaaacggagaagtcatacttaaaaagtacttttgataataaagcaaatcataaaaaaaattccataattttttaataaaacgaaagatcaaaagttataaataaaaactcaaagcgacaagtattctgggacagaggtagtatccaatgattccattctattctattaaaattgacacttgttttatcggtattatagtacaccatcggtataaatattatatggatattatggggaaaatatgcatatttataatttgttgcgcgcgcgtgtgtttggagggacgacaacctccaccac

SEQ ID NO: 17869 - DNA, 1222 bp, Oryza sativa
ttcacctaaatggttaaatcaacatgcacgtaaaggactcaaactcggatggatcgttactcacctgatgatttcggtattactggtcggcccgaatttccatctaccgaacaaggacaggccttgcgtctcggttgcctgcgggtagagcttcttcttgagaggcctgaggtccaacccggagatgaacggtgtcccggtgccggtgttcacgaggcaaacctgcacgaagtcgtccggcacgacgacgatggcctccaggagcgtcgagccggcggggtccgtgatgttgaccatcatccagaagttgacgccgatgtagacgtcgaagattggcagcttgctgaggccgtcgtagttgccgtacatgaaggtggcgcggatgaggtacttgtgcccggccacgagcgaccggagcgtgtagcagttgcgcgcgccgtcggggaagctgcgcacgttgtagtagcgcgccgagagcgccggtgcgaagtactccgccgagatgttgtggaacgagccgccgtcggtgaagccgtcgtccgccgcgtaggaaatcttggtcttgtcgtccacgtagctcgtcttccccgggaggccacagtctacgctgatgaaacctacggcgagtcggcgacagcgacacacattagctagcgataactgcgaaattatggacaatctatgctagatcttagttcattgattggcatgggttgtacttgtagctttgctgtcaagctgggcacgagcttggagtatgccggcggtggcggcgagggcgaggcactagaacataataaaggctgaactctctttgtgatcgtgctctacctatttatagccagtcttaatccagtgagcgtaaccatgcaggtaatcaagttggaagaaaattgcgtaggactgaagtcctacccttatctgaaggacttgattcctctgcacgacacctgtcccacatgaatctcagaatagcctttctccctcatctctccagttcccatttatctatcttcctatcgtcggcgaggcgtcaaggtcaagcactcaagcccgagcaccaagcgcaacgcgctcgtgccctgtggcatcaagctcatgaggacagccgaaaattagagtcaaatttgcctgccgacctgccgcgagaaaaatctttggtttggaataagctgggttatcgattagatcgaatccatctccatgaacgggctgcaggaat

SEQ ID NO: 17870 - DNA, 2522 bp, Oryza sativa
attcctgcagcccgaagagaaaagagagttagcctattcaaagatttgcgcaagaggtgccggcggcgaggtgaccggcaggcggcggggcgtaggaggcggcggcgagccgtagagatcccgacggcgaggcggggctcgcctgcacacgggccgccggatctggctcctttctcgccggatccggcgcccccctccctccctcccactagatctggcctctccggcgaggaaggccagctcccgacgacgagacaggtacagcagaggaggcagtggcggcggggttgagggcgcggtggcacgtggtgaaggggcaggcggcagatgtggccctcggtgacggcatcaggcatggggagtccagcctgtgaggcccgcgtctacgtcagtgagtggcgccggaggcagtgaaaaggagaatgtgtggaggtacggcggtgcttgaggtgtagggggaggctggacgatgaggggtgacggagggaggctggcgcggcacaggtggcgccgacggcagcgggaggtcggcgtggcatgcgatgcggcgggcggaggcatgagcaagtgcatccatggccggcggggcacgcccagcgcgacgagtggctgtgaccagcggcgggatgtgtaggcgtggtggtgaccggcgatggtcgtggattgggcttaggtgctaaagggatggtgtggtggtcgggcaatggtcgttgtacaggatggttgtgtggagttttgattggaatcgctggcgaaagccttgccaggccatgggccggcatgacgacaacgacaccattaggcgtcgttccccttcttgaaggcgtcgttctggcgttgacctctcctggcaccaagaaccttcccccgtgcaacggtagtcattggtggactcctgcattgcctctgaagctctacaagcctaaggtgtttgacaaggtcttctctgtcttggttctgtttcttgctctacggcaagtgttcatcattcttatttggttactgctgggtagagtcagagctgcttcgctgtaggggtgcgacgaagttcggcaacgatgacacactgcaatctctttataagattgttgatgccagctgtatgtaggaagtggttccttggttgtttgggctaatgtccttcatgggtatcgtttatgcttgttcttttggcgttagggtagcattcgagtgaagtcgaagctgttgtgtcgtttgggcggcaagctcagtaacgaaaacatgtgtgggctgttgtgtcgccactatgacaagcttggtcgatgccttgtgtcgggctccgtcgttgtaatttaggttatgttagctgttagtgtggtgttgtagttgtggttttcgttcaattttccctaattaactggacactgtaaagtttggtcctgtttactccttaaattggggcaccttattcttaatataaaacgtcggcaatggcctgatcgttgaaaataaaattgtgtaagacatgtgtcaagtagagagacaagtcctttgaacgaggtgtaggacttcggtcctgctctgtaattttcttccgatcaaggagagatggattctaatatgtgatgtgaatgtacactcttttttttttcatgtaaactaaatggttataaaataattttttaaaaaaataacaagatagattatgtaatatattacttcacaaattaacatacaagtttaaatttgacttctctaagtaggaaaaaaataactagtcgattttgaagttgcatattcgtagagtgatacattacatattattaatacctatcctgtcaactttttttaaaaaaattcataaccatttagttgacatgtaaaaaagggtgaacgtccaaccaagtgcttaaaatagttttctataatcaagataattatatcactatcactagcaaatagttaccgtctccatgttttaatatcgggaatgctaggggacgggataccgtcccccaacgggatagctcctctccacaacacgattcgcgtccctcgccgctgccgcgcccgtcccccgtcgcctccgcgcccgtccgccgccgccgcgcccgtcccctgtcgacgccaccgccgccgccgctcccatcccccaccgccgtcgtcgctattctccgccgccgccatcgccgccgcggcgtccgtcccctgtcgtcgacgccgccgccgccgccgcgcccgtcccccgctaccaccaccgtcgccgcgcccgtcctctaccgccaccatcgccgtcctcgtctacaagggacggctgcagggggcgaccgcgtgtgtcggggtgctcctccccaacggtatgcccagctatatctagtaggaatcacctgatacctggtaagtatcatccgatacctcgcaagtatcacgtgagacatggtagaaatcgtctgatacctcatgagtatgacgtgatacgtggtagaaatcgtatgatagatgacatgtatcgtatgatacctcgtgagtatcacgtgatatgcggttggggctgcaggaat

SEQ ID NO: 17871 - DNA, 2923 bp, Oryza sativa
taaaaacattatgaatgaagttcattgattctgagttccaaactgaaaaaagttctactaaaaaatcttgaatatttgaaatttctacatttgcatttgctttggtgtaacatcatgtgaaagttccatagagatctctaccatgaaatggcattcaatcgaaatgagcaaaataatttatcgtgcagcaggaccgccagtgattgatggtatccttccaaaattttgctccatctctaatgtagagttgttctgacgcaaaccagtggattgttaagtggtgtagaagttagagtttagatcgccactattgccattataaaagccattgtttatatcactgacctggtgcttatcctctagctcgaggcactcttgcaactgtgccaccacgtcggtcatagtggggcggtgtgctgacgaaagcgccgtacacttgagtgcaatgtctgcaaccttccataggccattcacatcgtagtcaccatgcatgcttgcattcaccacaccctcaatgttaccccgtgctaagcgttgttgtgcccaatggatgatgctgatgggctctggatcacgcaagatagctggcttccctgttaccaactccaacaggacaacaccaaagctatagacatcactcttagtcgttggttgcattgttgattggtacctacgcatttggtcagtcccaataagtcttacaattagtatttctctaacaaaagaactttaaaaaaagggcttcaagaaagacaacatactctggatccacatatccaggtgtgccaacaagtttgttcgtagatacatgggtgccgttctcaggattgaaaaccttggacaaaccaaaatcagcaatcttggcctctagcctcgtgttcaacaaaatgttggttcccttcacatcacggtgaataagaggagggttgcaccctttgtgtaggtactctagccctgatcattaattcaccatgtaattgaaatactgatcaagcttctagagagagaaaaaatgtaaaatcaaactaaaaatagcattagaaattctaagtagttaccttgagcagattccagcgcaattcgaagcctctctttccaggttaagtatctcccatcatttccttttcctgcaaatataagaattggagatcatgaaaggactaaaaaaataagctggtagatgaagttagttcggacctgcaatgtgttcttgaagggttccttctgacatgtactcatacacaagtgccatatatttctcatccttacaatagccgatcatagagacaaggttcttgtgatgaatccgggttaaaatttgagcctaaagtggtgaaacttgtctatttaatgatgcccccatggagacttttcttgatagaaatttttacatagcaagaaaaagtgcagcttaaaaaattctacctctacaagaaactccttatcaccttggttggaagattcagtcctcactttgactgccacttcagtgccatcctccaagaagccatcatagacttttccaaagcctccttgtccaagaactcgctggaatttgttcgttatcttctccagttcattatatgtaaaccagcggttctcaagccgcagtgatgaattatgcccggagccattatttgttggcccatatctcattgtctcgttttgtcgctttacagaattgttcattgatcctttgtacgtgaagaatggaactagcatcagtagtattcaagaagatgaagtagagcagacaaatgatagcaagacccaccttgtttttttcttctcagtaggcaatagagtagtgtcgtcactgatactatcgcgaggaccagaactataggaacaacaatgtagatagctagcttgctcttgttttttggtggttgacatgagttgccattggtgcaaagatttgggttatttccatatctatatattaatgacataaatatgtttatgtccattttctgaaaaattgatctgcaccttttgctgaagaagactgctataagaagaatgtggtgtcattaccttagatttaaaaagccatcctgaattctcttgagaagtccaggcggaattgttccatttagttggtttcctgtcaaatctctaaaagaagacatacagtaggatattagttcaaaaggattctaaagagtacgtaggtaaaagagtaaagtacatggtcggtccttaaagttggagcgaggtgttacttaggtccatgatcttgaaaaatagacattagggtccgcgatcttgtttaagtgactcattgaggtccaaaggacctctgaccaggttgactggcttacgtgaccgtccagagtggcagtatatttgcatttcgcccccctcccccgcatccgatccaacccttcttccccatatcttctttcagtatgatttctatggtttgcggttgcaggggctggcggcggcagtgacgacgaggagggagacgggtacggcgacgagttggcgagcatgcgcaaagagggagaagggcgagtagggcggtggcggcggctggccagtggagcgagacggcgggcagcttttagggttttggagggttcgacttggggcggtgagggcgaggtggtgtcggagagggtgaggggacgatgaaggggttcgacgccaccaatgggttcggcttcatcactcccgacaacggcggtgaggacctcttcgtccaccggtcctccctcaagttcgacagctatcggagcctcaatgacggtgatgtcatcgagttatccatcggatccggcgacgacggccgcactaaggccgtggacatcaccgcgctaggcggcggcgcgcacaccggtggatcccgtcccagctgcggccagatccctacggctgcaagccgccgtctctcgacgtcccctcgttgtctcctggc

SEQ ID NO: 17872 - DNA, 3537 bp, Oryza sativa
aagtaccagcacgagggtgacctccggcgagctcgctcgtgtcgtccctgagctcagccgctgccgccaccataccccgagtcgtcgccggtccaacctccgccaccgtggcctcaagcttgtatagagctcagctgccggagcttgacgccctctgcccttaccgctgctcccttctccttcggccctcaaccgcgcgcgccgcgccttcaaccgtccgccatcgctgtcgttgtctaccaccagctgcgccatcgttgttgtccaccatcagccacccgtcgtcgtcctcaccaccagtgctgaaagaagatttggggaagaagggttggatcggatgtggaggagctcacatgcaaatatgttgccactctggatggccacataagctagtcaacccggtcagagatcctttagacctcaatgagtcacttaaacaagaccgtggatcctaatgtcgatttttcaagatcatggacctaagtgacacctcgctccaactttaaggaccgaccgtgtactttactctaggtaaaagttgataaaagaattgccaaacttacaagattgtcaatgaagacaactgtgaaagggcatttggaatcgagcctgtcaagttgttgtttgatagatccctgcaagatatggagcaagattttccaaattttaactcagattacgcaaacaagttaatacatccgacatcatgaactcataacatacaaatattggagggccttgagattcccaaaagaggacgatatctcaccactcaaaccaatttttgacaggtttctgcaaagagaatatgatcagcccaatttcattgcacagttaattagctcccattagatttaatttcctcttgctatttatgcatgtgctgatttggcattctgagggtgctaataataataataaaaaagatcaggctggtgattgatggtggtatcgaccaccatagattgtattaaaatttcatatcaaataaaaaattctattggaaataacatggggtcttaattaatttttactgccatgcatggcctctttagtttcattagtatcctaaaacttaataatttctaaattcacaagcaacaagtatatcatctcttttattaatttaattttgaactttaaattaataattagcaagttataattgatgggttctctttaattattttaatctaagccattaactatgcattgtgtatacaattaaaattttcatatttacaatagtttaacaatagccatacacgtttgcactctttttatttgggatggaggtaatagttttgttttttcatcacaatagtcatgttgtttttggctaatggaatgaattattacttacaagctcgtgattcttgcagggttagaaatggcatagctgcaggtcaaattatcccacgcaagatttctagggaggcacgggtcacccatccaattctttttcacctggtacttcgccttgatcgtcatgattgctgatactgtcaatcaccaaaaaatttcatcaatgcacatgacatgcttgaccatcagctagctcatgtatgtgcatatttcagtttttctcaaattttttatgaatttagtcaaattctgttaaattgtgtcaaaatttcagaaaatttcggtccaaaaatttctgaaattttcaaaattttaaaaattttaattctaccgaaatggctgaaattttagatgaaatcgaaattgaaaaccctgagcacataccatcttgtgagtcggtgccaatgttagcggtggagatgacagagtacacctcgacggcgttgatgagcggcggcatcgtcgagttggcggtggcgttaatggtgatgttgtactgcgggtgtcgcacaaagggtttggagctgtaggaggcctcggcgtagagaaacgatggtgtgaaaccatcgtcgaacaatatgccgttgatgttgatatagaattgccgtgtggcgttgttggggaggttctcaagctcggagaagtgaaagatggcgatgtaccctggcgctgggtcgttgggctgcggctgtgagttccagaagaagtcgatgttgttggaggcgttgattggcgtgaccgctgtctgcatcaccgccgtcggcgcctcgaacaggtcgttgtctatgttctgacccctgtttgtcgttgatatctcgttccacttggccgcatcaaaccaaggaaaccatactctgtcgtgcggatcatccggatacctggccattgaatcgatcagttgcatttcctacagataagggtaattttaccatccttaaaaaaaatattagaagatatcatattttctaatttaaaaattggtactttctcaaaaaccgtaaaatttatctacagagaattagagcaagtttaatagtatagccaactattagctccaatttatctatagccaatctaatagctcattcatacaatagtacatactacactattagtacctggacccacatgtcatacacactgtgtattggagtccatgctacagctggctataaatctgtagcccgcttcccttctctctcctcatctatttccttaaaatatgtttgcagctggcttatagcctgctattgtacctgctcttagctaaatatctggctcttatcgggaaaagtgatttcatcctttaagagatatcccctcattttgcatgttggtaatcagaaaaaatatatgaaagtatctgtaaatacgaatctaatattacgctatttatatcactaaacctatatattgtggaaaattttatgatatttgataaagtgcctaaagataccaagattttacaccaataattttgatacctcaaaatatttagtaccgggaggtaccaaattttacactaaaaaatatgatacctttcgataacttcttaagaatagtaaaattaccctatattgtgagactaacttttagttaaaatttatcgagtttgaattatcaccagtaatactgatgatagtataaataaatgatatgataataaatataaacagtctatacgcgtaggaaactttaacttagctcacctgatggaggtttcgtcagatgggccgaagttgagcctggcgagttggagtaggccctgagtggcgttcacctgcgggtagagcttgttcataagaggcctgaggtccaacccggagatgaacggtgtcccggcgccggtgttcaccaggcagacttgcacggagtcgtcgggcacgacgacgatggcctcccggttcaccggctggatcgggtccgtgatgttcaccaccgtccagaagttgacgccgatgtggaggtcaaacgacacgggcagcttgttgaggccgtcgtagttgccgtacatgaaggtggcgcggatgagatacttgaggccggccacgagcgaccggagcgtgtagcagttgcgcgcgccgtcggggaagctgcgcacgttgtagtagcgcgccgtgaccgccggcttgatgtactccggcgagacgttgtagtgcttgccgccgtcgg

SEQ ID NO: 17873 - DNA, 4402 bp, Oryza sativa
agtaaccaatcatagagacaagattcttgtgatgaatccgggttaaaatttgagcctaacaagtgaaattaaccaattatatcccactagcaacaacttggtgtaagtataggcaaagcaaaatatcaactgcagctgaagaaattttacctccgcgaggaactccttagcaccttgattggaagattcagaccgcaatttcactgccacttgagtgccatcctccaagaagccgtcgtaaacgtacccaaaccctccacggccaagcacccgctggaagttgttcgttatcttctcaagttcattgtacgtaaatcgacgattcttaagttgtagtgatgaactatgcccgtatccgccatttgacgacacattgctcactgtctcattttgtggcttcacagaattgctcattgctgctaaaatatgtgaataagcatcactagtgttaaaaggatgaacaagtagatggacaattactgtgtttataacaaacctcaccttgctttttccgtctcaacaggcaacaaagtagtactgccactgatattatcaccacaaccagaactataactattggaataactatgtagatagctagcttgctcttcttttttgctggctggcatgaatcgccattagtgcagaggtttggattatttccatatctatcaatgaaataaatatgctgagtcaaatataatttattttctaaaattgacctggggttttggcaacttgaaaatagaggtgttatggtccttaagaggtactccctccgtcccatacaaaataaacctagtatatgatgtggcacatctctgtctagaactccagattcgttgtgctatgatgcgtcatatttcgtactaagtttgtcttttatgagacaggggcagtaccaaattttgttatcaacttggtaccttctcaagtgttgtaaaagttctctttaattagaagatattgatgtgtatacttaccttagatttagagagccatcttgaattctcttgagaagaccagacgggatcgatccactgagttgatttcctgtcaaatctctaaaggatgccatatcggttagaaatgatgctaagtaaacaatacatgcagaatttggtaaacttgtcaagttactacaaacttacagaaatgtcaatgaaggtaactgtgaaagggcgtctggaattggacctgtcaatttattatttgacaaatccctacaagatattggacaagagatttttcaaatttaacacgaaattccacaaataattttaacaagtgaacatcgtgaactcggaacttacaagttttgaatagccttaagattcccgaaataggacgatacctcaccgctcaaaccactggaggacaggtttctgcaaaagacagtatgatcagatgacccagttgcaatttgcaattaataatctccaacttaaattttttcccccttttattttttttcatgaccacaaatccttactagctcgatacacatggactgaattacttacaggccaatgattcttgcagggttagaaatggcatagctgcaggtcaacttgtcccacgcaagcatcttcggaacacatgggtcacccatccagttcttcaccacctgatacttctccttgatcgccgtgattgcagccactgccaagtgcacacatattaattttcacaaacacgcatgacatgcttgataattaatcttacatgtgtctgcaaccaatgtgcacgcacgcacgtaccgtcctctgggtcagtgccaatggtggcagtggggatgacggagaacacctcgacggcgttgatgagcggcggcagcgtcgagttggcggtggcgttgatggagatgttgtactgcgggtaccgtaggaatgggttccggttgaaggtggcgtcgttgtagaggtactccggcttgaaggcggtcagggaccacggcttgccgttgaggttgatgtagaactcgcgcacggcgttgccggggaggagctgcagctcggagaagtggaagatggcgatgtacccgggcgtcgggtcgttgggcagcggcacggggtcccaggagaactcgatgttcctggaggcgttccgcggcgtgatcgccgtctgcatcaccgccgtcggcgtctcgtacatgtcgttgtctagatcctgcactttcttcgtcgatgatatctggctccatttggtcgagtccacccacgggaaccatatcctgtcgtgcggatcatccgggtacctgcagcaatgcagctcgatcaatcgatcagctaagatcttaatttttttttagataatggaaatggttaacgtaagatatgaatttaaattgaggcttggatttaccttatgacgtcggtgtaatcggtcgggccgaagttgagccggccgaggaggacaaggccctgcgtggcgttcgactgcgggtagagcgtgttcttgagaggcctcaggtccaacccggagatgaacggcgtcccggcgccggtgttcaccaggcagacctgcacgaagtcatccggcacgacgacgatggcctccacgatcaccgcgtcgccggggcccgtgatgttcaccatcgtccagtagttgacgccgacgtagagatcaaacacgggtagcttgttgaggccgtcgtagttgccgtaaaagaaggtggtgcggaaaaggtacttgagcccggcgacgagtgaccggagcgtgtagcagttgcgcttgccgtccgggaagctgcgcagggtgtggtagcgcttggcgagccccggcgtgatgtactccgccgagatgttgtggcacgcgccgccgtcggtgaagccgtcgtccgccgcgtaggatatcttggtcttgtcgtccacgaagcccgtcttccccgggaggccacagtctacgctgatgaaacctgcagccaagcatattacacacgctagcacattgatttcattgtgaagcagcactacctagttgcggatcaaaacttgaaagacaggacatggtggaatgtaccgttgctgtcaggttgggcacgagcttggagcactccggcggtggcgacggcgacgaagcagaggagaagcaaccacgaccgtgccgccattgttcccggcgttgaacgctccattgcacatgcaggcagcagcgagctaactgaactactgaagcataataatagggacgtacgtgctctttttatatccagcgttaatctgcccagtaaataagtatcaaatttaacattcttaatatcacttactacaactagccttttatcacaccatcgaggttagtttaaccacgtcagcactcagcacatctgtccagtcgtcgcttgccaattgtcgagcgccgtagtcgacgcgtcgcatatgtatggactgtttcctctgacgggtgggcctattctgaatttaccaaggccagtagggcagtaggccacctctttgtcaatgcctcgaccctctatggccctggaattttttttacccaaataaaatgaccctgcaactaactggggaattgacgagcaaatcacatattcacatgggttggagttgacttcagtgcagctgggcgcatgattggccagtggactcttgactttttcgccgcgccggaaactgcgaccagcattctgtgtgggcagttcgtgcagatcaaatcattggccatgatttcatgagagctcgttctgcattttgcgtactgcgtactggtaattgttttcttattatcatcaacgattttgccagcttggttgttgatcttgtggctcgtcccagaattcgtctgaatcttatccgggacatctggcagttcggcacgggactgacgggagacacgcagcatatgatgatattctctgacaaactcctgatctgctgtttgtgcgcagaatacttagtagtaagtggtatagtattccagtaaccaagcaggcctaatttgggtaccacaacataaacgcattgcactgcagtgacagagacagaaaaggtcaatatacgatcagctgacgaaacatatcttcagatcagcagcatatacaagacacaacacgagtgttgcttatgagaaatagcttcatcaatagcgcttttcttattacgcttgtagttaccagcaatccaggagagtatccgtggattcatacaggtgatattatgcatattaaatcaaaactgcgtagcgtggcccaggtttctcaacgggaatagcaacagcttctatatagaactacagattggattcatctcgctgttcgaggacgatgacgcagactggtcgaaagggtttgccacatgatggagttcatatctggctgttcgacgaagatgatgcagactggtcgaaagagtttgccacatgatggctggggctgcaggaatta

SEQ ID NO: 17874 - DNA, 1009 bp, Oryza sativa
cagtagacattgtctgatgcattgcttggaatagctcggatcatgtaggtaggatctgcaaataataatagggaacttcacaacttagtacaatagagaccagtaataagatgtgtaacaaccttatcctgtgtgaagcaaacatagttacctatatatttaatagtcatctccatctttttgctcttgaagtggtcctacaatagaagttatgaatagtgagtagaagaaaaagatgcatgcaagaagtgagtaaaaggagtgatacttgaaagtcaaagtgaactgtatggcaaaagtcatcacagttttcagtgggaattgcttagtgttttagttacctatattaacaagagcagcagacctgaattcagaagcaaaattaagtgttttgtgtacctttatcttgtgagtcagccaaagaccaatatcaagcagtagcttatttcctgatgcatcttgctgctcagaagtagataaacttttggctataagatcctgccctgctccctcagcaacaacaataaccatgtgcttgttctctttcagccttctctctacatattgaagcaacccaccttcaccatccatataaaatggggactctggaattaagcagcagtcctgtggagatttgagatccaaaaaataaataagtacaactcttaggtagacctcggaaaaaaaaaactactcttaggtagaagtagatttgtggggtaaaccagaaaagtaggaatctcactactgtatgaagaggggggataaaatatacaggaattagacagaatggttgcatctgcttaccacatctcgacttgcaagagtagcatacattgcaatgaaccctgcaagatgaatataacagtttaagggcaatagactgaaatacatactagagaacagatagcagagtaatcaagcattcaagcttgaaatacagaaaaatcaagagatcttctgcatgagtacaatcacaggcaaaaggccaaaatgggctgcaggaatt

SEQ ID NO: 17875 - DNA, 3117 bp, Oryza sativa
gccaccaatatgaaaacaatgaggtaacgataaaataatatttaaatagatataccgtatgctactgcaatgcattgatgaataggatctattatcacattctttcagcaaacagcatacatagcacttgtacggttgtaccacagtggtaaattaccttgaagatctcatatgcacccttctgtgttccatctcctccaatgatatagacctgggtaatgtacataagcacatgagacaatgaccaatcagaagagctatatcacataggtgcaaacaaccgcatttacctgattaattccacgatcctgaatgttgtcaacaatcttttttgtatcatggccacctcgtgatgtgccaagaactgtcccacccctcttgtggatgtcatcgacactctttggcgtcagagtaaggtaattgctagaatagaagcccttgtatccattctatgataggtaatataaggtattaagaggtagaagatctggaaatataatgagaactgaacgcagtaatgattcatgtttatagttgccatggcaagcccttgtcagaacacatatccattgttctaaacttataatacaagtatacaaatttataattgcattttactaaaacaatccaaagcagcttattcaatttgccactattttagtagaataatactataaggtttgaatatttatggaaatggacattatgcaatacaaaatgattgataagcagtgataagaatctgaagatcttatggtaagctggcatatcctttctggaccaaagaaaaattagaaagatggatcaagcatgtctggaaaatgcaagagtagtatttaactagagtatttagggcctattcactttgatgccattttcaaccttaccaaattttagcaactggcgggatttcttatatagttaccaaaatttggcagtaaactaaatgtagccacttttttggcaactttaccaaaatttggtaaggttgaaaatagcatcaaagtgaacaggtccttaacatgcgcaagctgtctttctcagtgaaaaaatatgatactgtaagggcctgatcactttgatgctatttttaaccatactattttttggcaaagttaccaaaattttggctacgtttagtttgttgccaaattttagtaagtgcatatgaaatgttgccaaaattttggctaccaaaatttaacaatgccaaaacttggtaaggttgaaaatggtagcaaagtgaacaagcccttaactatctattgaagtattatgtaaccatttagagaagggcccacacctgtataccatagattttgctgacattatacatgtgcgccaaaccacagacgagctctctgatgacagtgttaagaccagggcaaaggcctccacaagttacaatgcatgctttcacttcatctgactcaaaataaacctaaaggttcaagtccaaatgtttctgttagcccacgcgcaagtgatgagtttcaatagttaaaagagggggcagcatatcataccttctgacgaggtccagcacgacggaagtgaaccccccgccggctgttcttctgaacgaccacctgtaagcacagaaatagctacctgtaaattcaccatcgactacaacatcacagtgtaaaccataattaacactgctttaccttttggggtacagtgtcatcttcattaacaaaatattgcctgataacgataagaacaaaagtttcaggattacacatggcacaaattacaagctcagatattagaagaagaaaaaaagtggaagatcaaagccttacttgacagttgaataggctggatgatcttgtagtggattgggataagtctgcacatatgaacaaaatagcaaatcatcagctcaattcacatggaccatggtttcacctttccagaaacaattcaatccagcacagtgaattggctataactaactcatgctttggcagtgataagcaaccagccaatagtgacagttcttccagtggagatatcctccaatctactcaatcaaatttcctatcccaaaagcagagaccaaaaagcccaaagcaacaacttattctgttactacataacataaagcgtcaatagcattgcagcgaaattttgacaacttaattgctctgttctatcatgccccctttcgctcctaacagactaattggctcactgcatgtccaagctcaaattcgacagtctaaaatcagcacagtatccaaaatggatttccaaaccagaaaatctgatagaaaaaaatcccgcaaacatcgcaaatgacagcccccaatcagggatccccacccagatcacttcgctattcgagtatacttagctagagctgcacttcacacagtggcacagttcaacaacgcaaaggccatcacaaaccggaacgatcggagcatcaccgcagcagcagcttgcgaatcgaagcaacgggaagggagtgtcgggagggggccactcacgggggcatcggggaggtggtcgacgaggtgcggcacgtcgtcgaggacgtagccgaagtccccctcggagatcttcacgtaggcggcgtcggcgaggctgacggaggaggcgttgcggagggcgcggaggttggggtaggagtcgcgggagatccgcacgcacgtcgcggagaacggcagcgccgccttcatcgcgtgctccggcgccgcggggggaggcccgctccgcgcccacggatcctcgtcctcctcctcctccagccggcgctgctcctcgtcgtcgtcgtccggcggaaggatgatgtgggaggacgccatgagaagagcaagtggtcgggatcggaggaactcgctttcgcttcgtttcgcggcgggtttggggaggcgtaatcgaggtttagccttttgcgggcgagaagcgaacgaggtcgtctgtttttcctggggtttaataatggcgctcgatgtgtgagtgagcggcggtggtggtggtggggtcggagcgtcagcgaggggtccggtgcgggccgtgcggcggcgctggttttgtgagccgcgcgtggcggtttttcggaggttgggctaagtttgacgccgtggaaacgtgtgggctgcagga

SEQ ID NO: 17876 - DNA, 3865 bp, Oryza sativa
ccgattcgcatggatgcacatcatgcgctgccagtgccatcccgtgcgagatggcctttaggtctatctatttacctgtttctttaggccttcatttaatccctctacaagagaattgagttaaatttaaagagagtatcttaggaaaagaaaaaaaatacggtatcggtatgtcatacgtgaaaatgatattttagctgtgattgtgaatcacgttctggtgtgcttcgaatttgcacccggtgtatgcatatcttaggaaaagaaaaattagctctacggatcaaccacctggaatcaggcaggataaattcagtaaaatcaaatcccagtgccgtcgcccacaggctgacaggcatacgtatgctggttttaggaagagggcacggtcggccggccccataccgcatcgccgcccgccatgtcgtccacgtccagaagcaaagccgagtcaattcccggcgtcgcgtaactggcttgcgccgcaggaaacgaaagctgcagatcccatgtagacagatcatttattgacctttgcttacgaaacagcacaataggcggcggatgaggggattataaactcagagtttgttttcatcttgtttgcattctcaaattccaaaacgttactaccaaatatacatacagtttttcatttccgaggggaaatcaaatttgtgttccgctattaatccgggaagttggctgactaagctccatacgcaagtacgcaacacacagactgacaaatagaaatactctttttactcgtatatgtttacagcttgttggtacaaatgggcaaacacgctaataaaaaaaacacctgacaccgatgaataggcaaatggcttaaccatgaggccataacatctgattctatattaaaatgtaaaacaggaaggacgatattggcgtgcgtctgaacaaaaacgcagcatgccactgaacaaaacgcagcatgccgccgaatgatttaggggccgcggaattgtggcagcatgatcacatgcttagttgagaacatgaatagggagggtagttgatcatgcacccctcatctgtccagcaaaaattgtgtatgggctctatttattccagtcgatggccatttggccactgcaaagctgcggcttgaaattccagaacaacccacgcaggtccaggtgctgaatgctcacttggaatggaacttgcgcctgacagattcgtagctaggcacatgaataactgcaacacgagcgtttcaattagtcagtgctcagactctcagagcttgcatagggccatgctttaacttccaagtttcgacataccatcaccccatgatgccaatgtaagcggcgaagaaataatcttctttgcagttgaagaaatgtcatttaaagtgatctcctcaacagttttcaggaagtactcaataggtttcctgcacaacacaaagcactccaagataaacaaggttctctggcaaatggaagtgactatctaaattaataccctatgcaattgctggattacttagaaaaaatgctagcttaacagatttagcactgctgcatgcgtcaaatgtatgaacctctgcctcatggtactaaaacttctggctcacttctaccatgtatgtgcaccttttctagatgcaacggcatggtgatgacaataagtttatagcaccaatgggcacgcagaagaaactatagaaataaatcctgaatatatgcttggacgtgctggcagtctgacacccaaaatactttgggtgataccataaaaaagcatctaccacaccataaccacagcatcactttggaaaaggaacaccacaaccacagtaagtgtgtccagaacacagtattataggtgacttgtcaaactttgggacatgattgcaggaaaaaaccacaagacaactttagttgcctatgtaatatggtcaacatatattgcccaaccagcttggaaacataataatttacgcaagcgtacatagattgtgatagttcatggtgatgactcattattttacgcacattagtaaaaagatttgcattccatgcatataaacatgacatggaaatatgctatttaattaggaacatagggattaataggaaattgactccattaatgtactagcgattacttataagcatacctttcaccataagtcagtacctgtcttccaatatcttcagaggccacgatctgcgataaggaggaagtacaattaaaaaaacatttcagggaagaagcatgaaattcatgcgattggaacttgatcaggagtaagaacaacatactcttgattccaagtccatcagacttgaagacttggtagcctctttagcacgatcaagttgttcttgtgtaactgaacaaagtaaaagacagggaaaggacaacacataatgaccagtctaatctgaaaatagattgtaactttgaggtaaaaaattaaagaaaccttttccaggagttgcaacttcatggagttcccttgctgcaaatccacagcacttgatacaaaatctgggttctggtaaattaacatgacagtcaaaagcaaagtggaatgtatgaaaatccatgataaatgcagaaacttctatagaagcttgagtaaatcattgagcctttgacttgtatttcaatctgactgttcggatggttataattaaagaccagggcataattactggcctgaaatgtgcatttattagttactaccctcttgaaacatttgaaaccacaaaattgtacacgagatgaaatgagcattgatgtacataggaagaaactaaatactcagtttcagtgagtgctttctgcatttcttactgaggtacaatataacttcggttttagttactactacttactagcataagccaccaactccttattttaaacagtaagataaaattacagttgtttgtataaggcattaatccagaattcaggtaggacaaatgtaatggtgtggtaagagggacagacattacttagaatagaaagggtattatatttacagtagtttgagaatgatattcaaaaaaaaaagggaaagaattcacaagcagatttgattctgttcattgcttgaatatagaagggaaaacatatcattggttatgctccaaaagagacttacagtggttgcatgtattccaaaaaggccagaattgttgtaaatactgctgaaagcagagaatgattcgatctgtccataattgttcaagacacggagatctgtcggtacagaatcacagctgatgttaagacactttaccaaggtatatgcttattgatgctctgatatgcataatggttaaaagagaagcattaagcttacacaaccaagaatgcattcctttcccagggccaccggtcgagaaggaccctcctccacccatgagcacctacaatttatattaatcttatgtttcagtacaatagatttgaataatagagcttgcaacgcaataaaatatgaaataatccatcaattcctatatagtacagaatcaacagaccatataggttagccataaataattggatcacttcaacatattgttaggcatacctgaagcacagtcacaatcattgcagttttctcttgacgccagccacctggaacctcaaaggcaagtgcaatgtgtgtactctaacaaaaaatacattaggaacaagaaaagtaactgtgaagacagacttgagcccttgagaatgataatagaagaggccaactcactgtagaatctgcttggcaatgataatcccctcctacatacactgattttggctcttcaggacgtttcacactgggaaggtctgatagaagtggttctgcgactgaaac

SEQ ID NO: 17877 - DNA, 680 bp, Oryza sativa
cgcaggactggtacaaccccttcagatcccggaatggaaatgggaagaaatcggaatggatttcataacaggtttgcccagaacatcgtcggggcacgattcaatctgggtggtcgtggatcgactcaccaaagttgctcattttattccagtacacaccacctatactgggaaaaggttggcagagctttatctttcaagaatcatgtgtttgcatggggtacctaagaagattgtatctgatcgaggaagccaattcacttcaaaattttggcagaaactgcaagaagaattggggactcgtttgaatttcagcacggcttatcatccgcaaactgatggtcagaccgaaagggtcaatcagatcttggaagatatgttgagagcttgtgcacttgattttggtggagcctgggataaaagtctgccttatgcggaattctcttacaacaacagttatcaggctagtttgcaaatggcaccgtttgaagcattgtatggccggaagtgtcgtacgccactcttctgggatcaaacaggtgagcgccaactgtttgggacagaagtgttaaccgaagcagaggagaaagtcaggaccgtcagggaaagactgcgaatcgcccagtctcggcaaaagagttatgctgataaccgccgaagagagcttactttcgaagcag

SEQ ID NO: 17878 - DNA, 1525 bp, Oryza sativa
tgggcgaagctgcaggaggcgcggttgcactcgccttgcctccacagcgcgcacagcttcgtcttgtacgccgggccgcggcggggaggacccatcatctccctcatctctctttcaccaacccaacccttctcccgcggcggcggcggcggcggcgaggaggaggaggagacgagacgtggcggcggccagtggggagacgagaagagcaaagcacgagtgccgcacggcgagttcgggagacgggacgacgacgacgacgacgacgaaatgggcctcatagcaaagtccggcccatgtggcccggcaaatcaggcccatgttctctgcgcaccattagcggcccaaccaaacaagcccaaaccaatgataatattccttccgtaccaaattataggtggtctttttttttttacacaatcttcaattgcatacttgaaccattaatttattctatgctatattcccgatgaatgcttcaaaatatgaatctagtaagataacgtgtataatatttagcactgttaatacgacgattaggggcaattgttattagtcaaacatttaccgagttatttttttcttgtaaaagaacaccctataaactgtgacaaggagtaataagtttccgggcaggagtagagaatgaagagtacatacgatacatgagctgatactgctagcagacaggagtacatttttttcatactacacatcatccagatccagttattgcaggaaggcatctcaacaccacgaacacagcattccatgcgagataggactggcacgattcaggaaggtcgtatacatcaggaggattcagggaggtcgtcacatcaggaagaagggcgagccgattccgaataagggagagttgcagactccacgcatgttgaagcctcggagacgctccaggttcatcacgtcggagtgatccacgaacagattcacctacattcacaacgcaacacgttagatacacctggaaatgcctcatgaacgagtctaagcttcttgcttgcaaaatggtctgtcagcatagcattgtaataagcatagcattgtgcacagcttcagggtctcagggaagaattgaagattcgtttacccgtggcccgtatcttctgacaaccactcggaggtgttggggttggaagcctcgaacatggtcttctcgagcccgagccggcctacaatcttggcgacgatgtctgcccgtagagagtcagcgcgctggcaaatgtcgtcggcatcgatcatgatcatgtctgcccctgcttccaagcacctctcggccctccttatcaacaggtcaacatcctcgactctttctgcaccacatcaaagtgaggaaggcatcataggaaaatgtagacagtacaatcacagagccaacagcatagccaaataaacatacggtgatagtattaaattgctttgtaactaaattccccaaggaaaaactgatgttgacaaatgtatgttgagcaacttttcccttaatgctgttttcttgcgtttg

SEQ ID NO: 17879 - DNA, 1000 bp, Oryza sativa
attcctgcagcccgagtttctccaggtctatacgaccgggatcgaggccgctgggggagacgacagggtcatggcgaatttctttcccatggccctgaagggacaggcgcggggttggctaatgaacctgccacccgcgtcggtccactcctgggaggatctgtgccagcagttcaccatgaactttcaaggcacctatccacgcccaggtgaagaagcggacttacacgcagtacagcgaggggatgatgaatcccttcgctcgtacattcagcgtttctgccaagtccgcaatactataccttgcatccctgcacacgcggtgatctacgcgttcagggggggtgtgcggcacaaccgcatgctcgaaaagattgcctccaaagagccccagactaccgcagagctttttcagctcgcggaccgagtggctcgtaaggaggaggcctggacctggaacccctccggtttcggtgtggcagcttcggccgcccccggatccgccgctcagacagggcggcgtgacaggaggaggaagaaaaggtcggtccattccggcgacgagggtcacgtcctcgccgtcgagggcgctccgcgggccacccgaaaggggaggcctgcgagcgacaaaaagaaagaggctggtactcccagcagggagcgcccagccagcaagtggtgctccgtccacaacacctccctccacgatctcgcggactgtcgcgcagtcaaaaacttggctgagcgaacgaggaagtgggaggaggacaggaggcaggaacgccgtgagggcaagtccgcggcagttccctccggtaaacggcgaagtgaggccagacagaaggcccccgccgttgacatcgatgacggtgatgatgacctaggtttccaagaacctggggccaccattgccactgtcgacgggggagcgtgtgctcacgtttctcgccggagtttcaaggccatgaggcgagagcttctcgccgcggcccctactcat

SEQ ID NO: 17880 - DNA, 668 bp, Oryza sativa
tcaagccagaagcaatgctcctattacgagctacattgttccatttagatatgaactccctcttggtttcagaatcagggaagtgctgacgaagaacaattaatccttgcatatagctcatggttttaagatctccagacatggaggagtccatgacagcagctagccaatcggttactatccagacatagccactgtccatcatccggagcttgttagctatagaaaatattctcatccctgcgtcaggattgacgtgcacaacaaacactcttgattccatcatgtttgctctaaacagtacatcattgattgtagctgcatttgaatttggaggaaccgctgctttgtatgaaattcttgcccgacttaatgcaagcgcatcactaagggctgccaccgcacctctcccataatcatcatcaacaaaaatagcagtgacctctttccattgatagtagtcaacgatgctagcaacggcatgcatttggaagtagtcactcatggtactccttaaaaagtacggatactctgatgcagaaagtgttggatcagttgctgcgaacgataaaagaggaacatgtagctcattaacaacatgtgaaataacatggcctattccagaggattgtggaccaatgacagcaaccacgtttttctccattaac

SEQ ID NO: 17881 - DNA, 1447 bp, Oryza sativa
aagaaggttttgtgctagctggagatcatcgcatactactcgatacatctgccaaaattaaattaagtttttttttaataaaatttggtccaatttcaccagtagtgaatggtttcgaaactattcgggagcggttcttttgatagttcagttttataaaccttggctatcccacatcatcctttaattaaactgtatattccttccaaaacaaagatgcaaattaatcatataaggcagggtaaaggctatgggcgttcatatgaatgaacacatgtttacgagtatgtgtttgcaccgtgttttgcaaaaaaaactaattaacataggtatttctcgacttggaaaccaatatatatatgagcagatcaagcagcagtaggtacacttaatcctggataaaaacaagagagaaaagaaaaaagagatccactaataaaacaaaaaaaaatcaaagaagaagaagatatcaagagaacactctatttaagtaaaaatttaagacatcatctgcatatccatccatccgtccgtccatccgccatccaacggacagcagctaccgaagtatttatatcgtagtacttaattaggcggacgcggcggcgccgcctccgccgccggtggcgagctcgccgccgacgcggcgctcgacgagggcggcgcggagcgggttcttcatgacgacggtgaaggcgaaggtctcggtggggtcgggggggccctcgccggcgggcgggacccagcggaactcgcggaccatgttggcgagcatgagctggatgtggaggacgccgagggtggcggcggggcagatgcggcggccggcgccgaacggcatcatgcggagggcgcgggtggcggtgatgtcggtgtcgaagccctcgccgccctcgaggaaccgctcggggcgccacgcctccgggtccggccacgtcgccgggttctccgtcacccacgccgtgtagaactccacgctggcgtccgccggcacgcggtacccgccgagctccgtgtccctcgtcgccgcgtgcgacagcacgaagtggctcggcgggtgtcgccggaatgtctccttcaccaccgcctgcacatgcgcacgccggcgatcgagcgccgcgaatccatccatttcggttagcaattcagcatatccccaattccccatcacccgtatcttcttttttttttcatttttttttcattttattatacaatgaaatgaagcgaactgcttctctgtctcacaagaaaaacaaattataggtatgagtttggacaggcgtataaccagattcaaaactacgatacaacttttttttttaagaatggttttactcccgttgtttcataaaaaaacaaaactaatatatgatgtgatacattatagttaatacttatatagataccaagagattagttctcaacaattaatactacacgttat

SEQ ID NO: 17882 - DNA, 631 bp, Oryza sativa
ttttcacggccactaagtgacactccttaggagcggcttgaaaccgtgcacacatgcaaacactaaacatgatatccggcctagatgcggtaaggtaaaacaagctaccaatcatagaacgataaagctttaaatctacctgtttacctccctcatcaaggtcgagatgcccgttggttgccataggtgtcttgatgggctttgcatcctccaagccaaatctcttgagtagatccttgatgtacttggtttggctaacgaacgtcccatccttgagttgcttgatttgaagtccaagaaagaagctcaactctccaatcatggacatctcaaattccctagacatcatatcaccaaattccttacaaaatacctcattagtagaaccgaatatgatgtcatcaacataaatttgacacacaaagaaatcatcaccaatgatttttgtgaaaagggtggtgtcaacttttccaattttgaaattctttgacaaaagaaaatctctcaatctttcataccaagccctaggagcttgttttaagagagaatcccttatatgccactagaatttgaccagttcccttatatgccactcaaaattggctgctcccttatatgccactagttcaag

SEQ ID NO: 17883 - DNA, 1192 bp, Oryza sativa
tcctgcagcccagctaggattgatctagcttcgatcggaacgtacaaaaaaaatcccaattcacgaatacgagacaccaaaaccacatgaagatcaaatgggagattatagttccattctcttcggatcaccactaggcgcaattttcgggggaatctgattttcgtacaaacatcataaaaagaattcgcacatttcctaccatcccatcaaaaggtcagtcggtcctaatcagagcacggagataaattcccacggttacgcgcgtcactactagatttgttcccgaacgattcgcatcaatacgagacctttcccaattccaaactttttagatcacaaagttccaaacccataatactaaaaacgaaaggaaacataatacgaaaaacgaaaggaatcagacatcagatcggaatcgaggcgcttacccggtggggaggttgtcgacgtaggtgatgagcatcttaaccatggcgtggctgtccccgcgcaggcctcgctccatctcggtgaccatggcgtccgagatgccccgcagcagcgccgtcggggtcgacagcgcgtgctccacgtcctcgatcaccgccgccaccttcctcttcctctccgccgcggctccctccaccagctccaggtccctcctcctccgcctccgcgccagcaccaccgccaccccgaccgccgcggccaccaccaccgccgtccccaccgccgccgccttccccatcaccgctgctccgccttcccttcctccgatcgatccaggtgcccgagacctccaccgaattccgcttctggatccgaggctatggcgctctgcgagatcctctcttcccccctcctctctccggccgcgtaggagaaaggaggacgagagccactgacttgggcgttttaaccggtagcctcgagtacccttcgcctttgcgccataagcggatccgcactcaggatttgtacggctcagatccgctcttgtttgggaatggacggcctggattgggtgtttgtcgtaagtagatctggggtggttggcttgacaattgtgcgattggtttttggtcttttggttataaattatcttttgaggtgagtgatttttctaaagataaaagataatttataacggatttttgggaggccaacacggacaagtgcggtgcggcgtgatccaattaacaagaaaaca

SEQ ID NO: 17884 - DNA, 2332 bp, Oryza sativa
ttgctatagggcaatcttttagcctcgtaccccacgcatccccgcatcattgcgcgaatagagcttggtgatgatatggggacacgataccaggtgcgtcgttgaaatgtcagctcgttaagtactgatgatagtccttcactggagaaagtgatgttcaaattcagtggtcttagactttgggtaagatcatgcaaagggagaagcttcaacaataatcgaatgccatttttcttgttgcaacaacaatctgactaagacagaagctgtagccttaaaagaaaattttcaacaacatgtctacaccttttgagcggcagaaattgtgtgctttgttggccaagagtgacagccatggcggccaaccgtgaagctacgcagaaataggagcaaggaaacagaggaagaagaaaggaactggggggacgattttggatcgtcggatgataacgaacggtggatagagcagaactgcacgcctgtgactttgcaacccaaagtcagaggatccgcttccccagatgagccacgcccatgcgcacgcggcggagacgcaacggccaacggctcgtgcaacggcggatgctcgcggttttggggcggtgaaactcagggaaacccgctgagccgtagtacaaattcgacacgcaccggtgtcgtacaaatccgagagacacgatggtttccgcgcaagatgcacttccgcacgggcgcgctgccgaggatctcaattctaaaccgtatccagatgaattttactctgcttgttaccctatctatgtctgactaggttggatatacttatccatataaaggcgaaatgctatacgtatgacttgagcatctgacttctggacgactgcgtagtacacaacgtcagtaacaaatagaatatcttacaaagcctcacaccgtcacgcatcgcattgttcttataaaaggtaagtggaacccgttcaatattagatttgaagtcaatatccccaagccaataattcatcataactaaagtttaagttgcttttagaaaatttaggagtaactagcgacattattgactttcacatatactcggcaaagaagaaaaaaaaagatgatgtctcaaaatcaggttatctttaacctataactcataatatatgtggtagtaattactccctccctctcataataacttcgttttagacccttccattccatttgccctataataagtttatttttttaaagacattattacgtcagagtttataaaaatagagtataaatatattttgagtatataaagagagaaatgattacattgaaatttgataaaacgggagtatcatagacttttggggttttgtattgatatgtatgggatagataaaaaatgaaattattttagaacgggggaatatataaggctaaagggacttatattttggatcatatactatataagttactctcatgtactaccattaatgctccgttagcattggcgtccatcatatgttagagtcccagcttggttgaggcagggctgtgccgtcaaatttgtatgccctgtacaatgctctaagtgagacctaaatcaagtaccaaatatagctaaaataagggataatttcgtttttgcccccattttcatctctaatattgattttgcccctactttttggggttttcgtttttgcccccactttttttttgaactgaaagagatgtttgcccctgttttggatggaggttagtgggactgaatttatggaagaaaataaagaatttttgatttagtgaactacctttttacccctgtgaaatgtttcccaggagtgaaccgaggctgcagcaggttcatggaccaaccccgcgcttggcccctgagggccaaggagaagacgttcgccatgacccggtcgccaccctccgccgcctctatgatcgccgtgcagatctggagggactcggaggggtcggcgccatcatcgtacttctcggtgaggcagggctggagctttgggggtcctcggacattccgaagactcgccacaaagacatggtagccaagcttacctggtggggatgtggggggccttgccccctgcctggggtggcgcgacactcctgaggatgctgcgccttcccccgtagcggcggtgcgacactcaccacgccggcgctcgaaagaacctcaaaaatcacaacacgtcccctacctggcgtgccagaggtgtcggagaatgaactcctccaccagggaaccgtgaggcccccctttgtgagttcggccgggggcagcgggtgagattcgagggcttggtgagcggagctgtgtggtcttgat

SEQ ID NO: 17885 - DNA, 950 bp, Oryza sativa
cgtaggtatcatccttcagtgaggaatagggcagccataagtgagatagctactaatgagagagccactattgagataggcacaaatgagatagccacaaatgagagagccacaaatgtgatagccactaatgagagagccacaaatgtgacagccactaatgagagagccaagaaatccaaaaaaaggggtccatgtgatgaggaggcagtcggagttgttgatgagggcatatactctgacaccgaatcacttgtggcacagagtgatagcagctatgactctgacttggcggaatcatttgattctgaatttgactgctctgaccctgagtttgatcctgatcaagaaatagttgatgaggatgacgacgatgatgtccctgtctttgcatatgatgttcatgatccatgtattgatgttggtgtggtgttcccagatgtgaatcaatgcaagtcagcagttacacatcattgtatcttgaatgatcatgcttttgacattatcaagaaagacaagaaaagatttagagccaaatgcaagagtgcggatcaaggttgcaagtggctgtttttgcatctactagtcccaagtacattggatgtaaggtaagttcagatttgtatttttttagttcttttctgcattaagtaatttcagccttgtccttacttaacatgaattttgtctatgcactctatggctgcaggttaagataagtggaccaaagcacacttgtggttcttttaataattgcggtgaaacaatggcttcaaataaatgggtagctgaccgagtagttgagttgctgcgggatgacccctcattaggacctaagaaactgaaggaagagctgaagaagaaatactcagtgaatataccttatttaagggttttcggaggcaaggagagagcacttgacatgataaatgtgaggtgggatgacagct

SEQ ID NO: 17886 - DNA, 1521 bp, Oryza sativa
gatggcgagacccaaagcatccatattctgtcgtgtggatcgtcggggtacctggccattaatcggttgtgttccgtttgatcaattcattgtaccctcttggattgactatttatcatctttctttttcaactgtgtgtgcccaatggtaaagatcaaagatgtaaaccatttctattatctagaaaaaaacttggatgaatcttttaattactcacctgatgaactcggtagtactaattgggccaaagttccatctgccgaacaaggacaggccccgcttgtcgttcgcctgcgggtagagcttcttctcgagaggcctgaggtccagcccggagatgaacggtgtcccggtgccggtgttcacgaggcaaacctgcacgaagtcgtccggcacgacgacgatggcctccaggagcgtcgcgccggaggggtccgagatgttgaccatcatccagaagttgacgccgatgtagacgtcgaagattggcagcttgctgaggccgtcgtagttgccgtacatgaaggtggcgcggatgaggtacttgaggccggccacgagcgaccggagcgtgtagcagttgcgcgcgccgtcggggaagctgcgcacgttgtggtagcgcgccgagagcgccggcgtgatgtactccgccgagatgttgtggaacgagccgccgtcggtgaagccgtcgtccgccgcgtaggatatcttggtcttgtcgtccacgtagctcgggttccccggaggccgcagtctacgctaatgaaacctggagttcacttgtcgtagagtcagcaaggggtccggtgcgggccgtgggcccgattcctttcactgtgaagcgctacttaatgcccgatgaaaatttgtgtttgtacctttgctatcaggctgggcacgagcttggagcacgccggcggtggcggcggcgacgaggcatagtagaattaaccacgaccatgccgccattgttcccggcgttgaacgccccattgcacatgcaggcggtgagctactagaactgtaatctctatgtgaccgtgctctagctatttatagctagccttttttttttcgggctatgttcgttggtgggtattgggaacccatctcccacgtactaaaaacgaaacggtctaacgtaggattaattaagtattgtttttttaaaaaaaatggatcaatatgattttttaaataactttcgtacataattttttttttgaaaaaacataccgtttagcagtttgaaaagcgtatgtgtgtgcagaaaatgagatggagggagttgggaacctaattgaaacgaacgcaaccttaggctgtgtttgagggagaggtgattgagaagattgggaagatacgtaaagcgatgtgagccattaacgcatgattaattgagtattaactattttaaatttcaaaaatagactaatataattttttaaagcaactttcatatagaatttttttgcaaaacatataccgtttagtagtttgggaagcgtgcgcgcggaaaa

SEQ ID NO: 17887 - DNA, 724 bp, Oryza sativa
ttgtttctcttgaaacttctttctgtgctgcttctagctagtgtcgtatatatagtttcagatgcctgatcgttaacctatggttgttggtgttttctttgatcagattgaaggccccattcacagctcaaatgtgatgctctactcaaaggaaaagaatgtggcgagtagggttggacacaaattccttgaggatggaacgaaggttcggtacctggtcaagactggtgaaataattgacagtgctgagaattgggtcaaggtgttcaaggaaggaagttcggagtgatcatggtagcatgggagtcctgcacattttctgaactgcactttttgtatgcccaaatgagttgatgcttttctagattcagatttcagagtcttgtaaatttctatacagttgccaacatttttttgtatccaatgacatgcttggcttgttaaccagctactagaatggttcagctacattcgctcatacaaatgattttgtaatgttgttgctgtcccctgtcctgagctattattcgcaaccattgactaatttggtccatttccatatagaaatatagatgagatgtacatataaaacccatgaatgattgataagttcttttttttaaggagtagtaagataggagtatcataaaagaaacaagcttagcaattttttttttgaaacaacccgcagcgatgtttctattgatataggggctgcaggaat

SEQ ID NO: 17888 - DNA, 634 bp, Oryza sativa
cagagtttcagtgatggaaaacaacaggtttttttttcagatgggaaaaacagcagctgcaagagttttgaggagaaagttcggacaaagaaaaaatcaatcaatattttagcagcatactgaaccaaggtaaccaattgaacaagtagtttcagtaaacatgtatgcacaatgcaaaaggatatagcttctccctcaggcaggttaggggcatcaaagatcttgcagacacgctgctctcctttgcctttcctcagcatcaaccggatggtggctgcatgcgccagaacgtggcctcccgcaggtttcttcgggtcagttatgaacattccaccacctgggtccgcaatcactgaaacaaagacacttgtaatttgaaattccttattgagttactctttcttgggatagacaggattagtcctgaaagcacaccttggttggtgatgtacactgcaacattgaactcctcagctatcttagtaaggcgggagagcatctgtgccaatttttgctgcaagttcagagtaattagtacataactttaggccttcaactactttatgattatttatttgtgtgtgttttagccaacacaaatattggcaatacctggcgctctgcaagttcaccc

SEQ ID NO: 17889 - DNA, 702 bp, Oryza sativa
tgaaaagagaaccacaccagaagcttttcagctgcttcacagatcttgtctacctttgcttcagataatcccttgattcctgtcaggctctacaagatggatccatatattgaaacaatatcagataattatattgtaagacagaaatgggacaattgaaagaatataatcgtcataaaccagaaatagaacaagtgggagatagcatgaagatttgggaacccaattttgcaaccttctttgtatgcatcatgaggccattgcaagtgtagataccagcatcctgcagcttcttcacatctccagagtttatcccttgcgagattactgtggacaagtgcacgagagatggataataatgcagagattatgctcaattgctcatagttcgaattcatggatatgaatgaataatttgcaggaagaaccatatgaagaatgaaacccagggagaagtcaggatcacaccaaaacaacttactaatattgaactcgctagaattagggagccaccagaaatcgtaaaagtacaagagggactcaagcttaaaccctaaaccctccaagtacacaactggttcaactaatatacactcaagttcaccaaaacacaactggttcaactaatgggcagaaccccacatgtttgaactagccgggggcgaattccgacgagttccaccaaacgcgggctgcaggaat

SEQ ID NO: 17890 - DNA, 945 bp, Oryza sativa
tgccacacggacatgacgtggcatcattttaactgacaaatgcgacccatttaaaatatttcctttttttccttctcttttttccctttcttctcctttctataagaagaaaggaaaaaaaagaagaatgagaagaaaacgaaaaagaaaataagaaaaaaaaagacacgtcacgtcaatgtggcatgccacatcagcgtcacataggatcttagaggggatgtgtcaatttaggacctagatgatacactttgacaagttctgggatttggatatacattttgagagtttagggatttatatgacacaaccctataagtttaagaaccgccaatacattttactcatttgacccgcttgtttagttccaaagtttttcttcaaacttccaacttttccatcacatcaaaactttcctacacacataatcttccaacttttctatcacatcattccaatttcaaccaaacttccaattttggtgtgaactaaacacagcctaagagtcatttgaatagtagaaactgaaaaccataggaatggaaaaaacacatgttctaacaagaattcaagtgcaaaaaaagagaattttaaaacacataaaaaaacacattaatgtccttttcattagaccgcaggagaaacgcatgaatcagatgagagtgatagactcaaaggaagattttcaataagttaaaactcttgctaaattttctctaaaatctctataggatcattcatttcataggaattccaaaggataggatatgatccaatgctttattgtaaaggttttcataggaatttttctatagtattaaaatctttcaaaattatcctttgtttttcctataaattaaagtgatcctaaattaagttgtttcgggctcgtcagctggaacgcaaaaatttcacacgacaatgttttatttcgatgacatttga

SEQ ID NO: 17891 - DNA, 1212 bp, Oryza sativa
tcctttgtgaattcctgtcctacaattctgaagttacaatggtatgacaggaagatctcgatatatggcatctcatcaacaattgcagcaacaccaccatctttgggtccacgattaagggcatcagcgtactcgtcgattgtgtttagcggtaccaagtgagattcaggaacattgagctcttcaatcaggtaatttctagtaaactttccagcctggtatccaataggtaaagcacttgaaagcaaactgtcaagcccagttattccagttgcaagctgttggactgtgagaatcgacgtcagactagcagtataacttgaattgatgatcagcacgacaaacagccatatgatcagcacaaaccgcccaagcgcacttacagtgttctgtcctgaagagagttggatgatatataagtccattgaaatgggaaaacatggaatagtttaacacgatgtcataaaatgcatcaaatggacttactgtgtgcaaaaaacattgttgagaaactaaacctgaaaaggaagaaaaaaaataatctgttactttcttactattaatatttacacaaattaacaagataaaaatattaaactatttgttgctcacgaataaaaaaaaagtaataaaggtgtttttttttttgcctccattgaataaggtttcacaaatgctcccagtctgagttctggttccagaaagatatgctgacctatgatataaccaaattcttttctttttaacaaaaaatagacatatccttaagaggagcaacggaaacgtaccaaaatattgttatcatctgccgtcttggagagcctcgaaactcctcattggtccgatgttcaagaatccaaacaactattccgacaaaaataaaaagaacacctgttacacaccacatttctaatgtgaagggtttaaggaaagcccaggcacttgaacttgcttctttcaccggcactactatcacaagccctgactcaatataaggctgtgagaattctgcaatctttgtcctgtttctcacaatagcaaagtcgcctacagcagcatcaagggactacaagaaaataaatacaaatcagaggaataaaatcaaacttttagaagaagaaagagcaaagaccaaggacatacattggcagcaaccatgttaataatgtcatcacagttaggattctttaaaccatccccaattactatgaa

SEQ ID NO: 17892 - DNA, 895 bp, Oryza sativa
aaaatgccatttggactgcgccggctttgttagtgccagatcagtgccttaatttctgtggtgaacttaattagtagccgcaatcttggtttgcagctcgggatccagctcaagaacaaaagaaattaaacatggtacttaattactactgatcgattgacagtgacactccttttagttgtgacaaaagtttggttggtagctgattggtctgccaatgattgacaacaagaacaattgtccatttgactcctagtgtgagtcccactaacctttttaccataaaatttctataaacctcaactcattcaaatttttaagaaaacatgtttcattttgtccttgaacagtgcattctaatacatggccacaaaatttgagtttttttaggaaaaaaacagtcaaaattgtcagatcaagtttgatactaatatatgcagctacaattaggtagtggattaagtagtaattaaaccagaagagtagaagtaataataatttggttggttaataaataaataaatattacctgcaagtagggcatggcctcgacgtcggcctcggtgatgcgcgcggtggtgccgaccttggagacgacctcgccgtagagcttgtcctggacgccggcgtcgaggacgaggtgcatcatggcccactccagcgcggtggcgctggtgtccgtgccggcgctcatcacctcggagcagagcgtcaccagctcgtcctcgccgagcctcttcccccgccccggcggctccaggtcgaacagcgagtccacgtacgcctcgccgggcgcgctcaccatctccacgccgccgaccaccgtgttcccgtcggcgttcctctcgccgccgcccctgatgaactcccggcgcgcgcgcaccagcggcgccag

SEQ ID NO: 17893 - DNA, 688 bp, Oryza sativa
aaatcggcggcgaaccgtaccggcgccgaagcttctcaggttgcagtttgccatcgggtttgccgtcgccggccacctccgtcttctcctcgccgtagagtcctcattagtgagcccgccatcctctcctctccttccctatgagctctccatcatccgttgtggcacaaaacgccggcgagccctggctcccatgccgccggacgccggtgccggtctccagccttacctgcttggcaccgcgtggggccgacatgacgcaataaacattgttttgtaatatataaaaaataatttaagaaatttggaacatccattttaacaaccataaaaattcaattggtaatatctttgccgtttgaattccgaattaacccatttaagtgtctgatttttcctaacaatgaaaataacctattatgagctttgctgcttgtatagtttttcttaacctagtacccctctgacggagcgtggggctcctcaccgggagaccgcgcaggcccccctttgccggttcggccgggggcgctaagtgaggttcttcgccctcgatctgaggaatgtcagcgagagaggaaatgcacaagacacgggcgacgtagacaggttcgggccgctgagaagcgtaataccctactcctgtgttctggtggatctgtgtgtgaaggaatacagagagctctgg

SEQ ID NO: 17894 - DNA, 710 bp, Oryza sativa
ctagttatgctttcttgcatgagcaaaggtttcagacatcattagcgtcccgtcccgactgaaaacttcatgaagagcaaacactgaaaaaggagcgcataagtggacagaaggaagagatcgagggagatacttgccttgagatgcccaggatgtcttccttgactgtgcaaaggagcccatggagcctgctgacaactcttccaatcctctgaattcactcatctagtaaaattgccataaaaaatcacaaccagagaataggaaaatgtatagatcattgcaaagaagattacttggagaaaccttccagctatgagatatgagatccttacccagcttgggcatgaatcactagtgcccacgcctatgtgagacacatgcctgacgtctgtagggcacccgatttccatctcttgttgcttctgcagtgctggataaccgaaagggagcaatggtcatactggtatataaccaatggtatagaaactgtgcattgctattgtggttcagctaattcatcaaaaactgaaaatagaggtagatgcagcaaagataaacaatctgcttcgcttaccgaatatttgagagattatcttcaaacctttgaatatccccttcatctttatctccattggtgaggtgcctcagtactccaaacaaagaaagaacataagtgtcctgaaggaaatactcacgaactagtgtat

SEQ ID NO: 17895 - DNA, 1104 bp, Oryza sativa
ttcacggtataatggctcggacgccagatgatattcttctgatgtgtggtcatatcctgattgttggcgttcttggtgccagtctaatcctggaaacgccacatatatttacatagtatttttttcgtttatgtgaattttgtcttttggggatctaaatgatgcgaaactctgaaaggaaagcgtccaatctgcggattgtggcgttccatgacatttctttcatattgaataggaagatctgatagattcctcaattgatatgattttgtttaaggttatttgctttgtgatttttgttaaattctttgtgcttttttttcagatgtggatgatgaaatcacaagtgaaaatacagttatccctgtctgattccttcataagggtgctgagaatactttaatctgacacagttttgatgaacctatatctccttttaaattctatggctgttcgtgcagattaatcttttgtgagttgaatgcgaattgttggattggatctgatgcctttgatgacatgatggtttcagaactggcacacatcgttgttgccagagctatgttgatattgctcatgaactaggacggtctgaggcctttccaatccgatactatagaaaaataagagttcaaaagttttttttctgagtatgttttattgcttgcttgctttgatattgtttctgagtatattttgccgtcccaactgtgcatggtcagaagtgaagaatcggcagggatttcatattggagcattctgcaatcagagcaaatggaccacggagaatggaatgtgtttgtcaataagtaaaattgtactaaagtaaattgtggcaaatctgtatgttgatttgtactatgtactggtatcttgctctaaaacattgttaagttttaccagcatctttgcccaaattgaattcgtcaattcttctctggcgtcttagacggaatttggactataaacaacaatttgctctgctggttaaatttcgtacttcgtagcctaagaaggatgcttagttcgtgggcctgcttaacgatataggtggtgttattaagagttccacgcattatcacaaatttgaaaaatagattaatc

SEQ ID NO: 17896 - DNA, 675 bp, Oryza sativa
aatagataagtgtattgattacaaattccacacggtaaaagctctagatcttgattgtttgaaactttatgcgcttgcatttactttggtaaattaaagcaacaatattgtttcagttctgcatgtatctattttaggactagcagtctcggatcagattggcaaaggcctttatcgtgcaactggccctgtagccatggttggcactctttcaaaattatgctccatcgtgttgttttgactcacatcagtggactggtccgtgttgtacatgttataacttgagttgggatcattgttgttgccggcatagaagttgttatatgtatcttccatgccacatcgcctatcctcgagctctaggcactcctgcagctgagctaccacatcggtcatagtgggtcgttgtgtcgatgtctgtgcggtgcatttaagggcaatgtctgcggccttccacacaccattcacatcatggtcaccatgcatgtgtgcatccaccacaccttcgatgttacctcgtgccaaacgttgccgtgcccactggatgatgctaatgggccctggttcacgtagaatagacggcttccctgtgatcaactccaataagacaacaccaaagctatagacgtcgctcttggtggttggttgcattgttgcttggtacctacatgttca

SEQ ID NO: 17897 - DNA, 7654 bp, Oryza sativa
ggcacagatggtcaggatggtatgtagatagacagccggtagaatacataagagtaaaacgtacggtgtgatggtttgtgcgtgttactgatcgaaaacatgggtgcacttgacagcttccgccatgatggtgatcaaggaaaagtatcaggtgaagaagaactggatgggtgatccgtgcgttccaaagacgcttgcgtgggataagttgacatgcagctatgacagctccaaacctgcaagaatcacagacatgtaagtaattcagtccacatgtactccctccgtccaaaaaaaaccaactagacacggatatgacactacatagtacaacgaatctggacatgagcatgtccagattcgttgtactatgttgtgtcacatccgtgtttaagtgggtttttttttaggacggagggagtactgaatattggacttgcataatggaattatggaagtatggaactcgcggtcatctgatcatattccttttgcagaaatctgtcatccggtggtttaagtggtgagatatcgtccgcttttgcgaatctcaaggctcttcaaaacttgtatgttatgaggttcagaatgttaatttgttgaccgtttgtggaattttgcgttaaaagacttgcttcatatcttgcagggatctgtcaaacaacaatttgacaggttcgattccagatgcactttcacagttgccttcgttggcagtattgtaagtttggcaactcctgtcaaattttactttattgcctagcatcatttgtaactgacatatgtatataatttatgggcatatggcttctttagagatttgacaggaaatcaactcaatggttcaattccatctggacttctcaaaagaattcaagatggtaccctaaatataaagtaattaagtacacccccactcttctcttagtaatctttgaatgtccaaattcagtcaatttgacaaaatagactgatttggctaaacatcttcattccatcaacagatacggaaataacccaaacctctgcaccaacgacaattcatgtcagccagcaaaacacaagagcaagcttgccatctatgtagctgttcctgtagttctggttttggtgatagtatcagtcacaatactgctcttttgccttctgggacgaaaaaagaagcaaggtgaggcttgttacaaacatagcaattatcaactctatttctctgtccttgaacatttctgatgctagtagttccattcttcgcttatgaaggatcaatgaacacttccgtaaagccgcagaatgagacagcgagctatgtgccgacaaatggcagccatgggcatggctcatcaatgcagcttgagaaccgacggtttacttacaatgatttagagaagataacaaacaactttcagcgagtgctcggcgaaggagggtttgggaaggtctacgatggcttcttggaagatggcactcaagtggcagtcaaattaaggtctgaatcttccaaccaaggggataaggaatttctcgcagaggtagaatttcttcggttgaatttgatcttgctacataaagattctactaagaaaagtatgattaattagtcaagttttgcttgtctaggctcagattttaactcggattcaccacaagagccttgtatctatgatcggttattgcaaggatgggaaatacatggcacttgtctatgagtacatgtcagaaggaacccttcgagaacatatttcaggtatgtacttaagttgttgttcccgatcaattcgcagggtacattgtaaaacttcatctagtggctcatttgatagtcctcatgatatctcccccttctgtgttctcttcctatttgcaggtaaaagaaacaacgggagatacttaacctggagagagaggcttcgaatcgcgctggaatccgctcaaggtaactactttaaaattgtaatactgtttcgtgaggtttgattttacattttctctagaaggttgatcagtaattaaatttcctggttaatggtcagggctagagtacctacacaagtggtgcaatccgcctcttattcacagagatgtgaaggctaccaacattctattgaatgcgaagctagaggctaagattgctgattttggcttatccaagacgttcaatcttgagaatggcacacatgtatctacgaacacgcttgttggcacacctggatacgtggatccagagtatgttaatccatatgtatttcttgatgttgttatttagtgttttatgtgagaaacacaaagtttaaggcttgtggaactaattgaatgtgcaggtaccaggcaacaatgcaaccaacgaccaagagtgacgtctatagctttggtgttgtcctattggagctggtcacagggaagccggctgtcctacgtgatccagagcccataagtatcattcattgggcgcaacagcgcctagcacagggtaatattgagggagtggtggatgcacgtatgcatggtgaccatgatgtaaatggtgtatggaaggctacggacatcgcactcaagtgtaccacacaagtatcggcacaacggcccactatgaccgatgtggtggcacaactgcaagagtgcctcgagctcgaggaggggcgttgtgccatcagcaatgcgaacaacaatttctataccgacaataacagcaactctaactcaagttatgacatgtatgccactgaccactctattgatgtaagtcagaacagcgctgcatttgagacggagcgtaattttggaaggatgccatcaacggccaccggtccagctgcacgataaatcattttgcccatctgatctgaatgctgtcattttctgggaaagatcttcatggaagttttaacaatgttgttttaccaaagtaaatgcaaatgtacaaattaatttcaaaaactcaagatcctcagtataaaccctttcggttatgaactcagaattcatatacttgtctcttctttgagtggcattattgtcctgtactattctttaggaagagaaacaccaatttatctgttcattcatgatgttttgtagtaaccagaatccacattttctattttttctaaatgctctttgctttgatgttggaaataaactcataagcctagtgttgggatgccaaaatttatggaatctgcatagcttagtaggctagcataccacaatttgcatgcattttttttcctgaagggtttagtttcgatggaactgaagctaactttattcgccaagatggactataatctagtgactttactcatcttctattggtagtctaccacctgtctatttgcggtacatttagctgttattaaaaaaaattcctttgggtggatttcaggtggatggagtcacacattgtataccttcctaagaccttgttcggtaatccccatgagatatggattaaaagagattgatgaggaataattccacatgtattgaggtgtgccccccctcaatccccttgttggtgggattaaccgaataaggcctaagggagaacacaaaagtaagatccatttgacagaactctatgtgcatgtacttgaagtgaaaatgctaatattttccttcaatagagttataaaaggatgaatgctcaattattgaacaagaactttctagccagcctttgacttctttaaggagcccatcccttactagggttggtatgcttccagatccagtcgtggggaactccatgacgagtggagtagtggtcccatgtgcgagaggggtcggagggggatctagcccttttgagttctgactagtgtgatggtcgagctatgctaggtcgtgagatgtcgttgtgcagaggtgaagtgttgaaggtggcccgggggggggggagggggtggctgacaaagaggcgtatggtggtgcgatgtcacgcccagaaatttagcccaaatttccagactattttgtgtattaaatccctgtccaggaccagccagggtacacaaaacgacaagtaataaacagttccaaacgtaaataacgcgtaaaatacttacagaagaggcacttagtcctcacaccgaaacaaaagcagcagcagcggaaaaaggcgatcctagcggggcttcagctccactccacaggcaaaactcaactggggtctgagccttggtcctctaactccatcttcagctcagaagcactacacttctgaaaagggggaataatagcaaggctgagtacaaccaccgtactcagcaagccacaccaacgatgcagacgtgcaaggggaacacaaggacggtttgtggctatttgcataaaggcggttgtaaaacattttattgagcgaaacagtaaaacagttgagtaattaaagtaatattgaatctccactgatcaacgctacaccacgttgaacaggcccaaccaacccacctgaactacagtgcattgggtcgatttattaaggtgggactaatcacggtgaatctggtcgaccgcccataaccgcgggcacggctattcgaatagttttactctgatcagaggtgtacaactgtacccacaagacacagccccacgacacgtttccgtgcgccgacatgccaccacgacataccggaaagaggccgtgacaggacccttcgcataaccccctctaaccaagcacaccacacctcaggtttcacccccactcctcgcaaggcagcgggcagtcccctctcgtgcctaggtgaatccggaagccgcataggccgtcgcagggcccatccaaactccatcacgcccacccttgcctggatgcgtcggctagaggaaagctacactacaagcccagccgttgcccacgctggcttgtggtaagtacgataagttcttccagggcatcccgcgaaccggtccttaattgccatgggtgcgactagcaaaaccatgcacccacagcccaccattcagttgcattttagttggataattacgaccatgaagcatggccagatgtctcgagcacgcagctcatcaagatactagaatgtctaatactgcaattatcccatcaactgagctagtggtaattaagcatggctaagcatatagttctagctaggtcacataagtaacatgagctagtcgattcattacccaaggttgacaaagaacagatatcaagtaaacatggcacaagcgagcagataggtaaaaccctgaccccatgtaattagcaaaacatgcatatttgtttgcaaacagtaaaacatttgtaaattaggatcaaaatgctcaaggggaatgtgtgacttgccttgcttctccactttgatctcccgaactcttttcctcgcgaccgcggacttccgaaacgacggaaactacacgctggcacgcaaaacgaggaaaaactctaataaaaaccaaagaaacagtacataaaaagtaaacaaacatgtagagctcaattttagatgaattttgcaatttgaatggctcaattcggagttcgaatgaattagatatgaattttagaagttttgagccatttaaatgaatttctagaattaaactcgatttattgcgcaattattatttatttttacaaaggaaatggtccttgctgacgtcagcaaggggcggccggcgccgacacgcgggccccacacgtcagcgagtcaaagggggagggcacacggtggaccgcgtccaccgcgacctcgggcgcgcgtccaccacgtggacggcccagatcggccaaggccgatcggacggcttggggacagccgggtggcgcggcccggccagcgctcacacaaagcgggcggcggcggcggccgggaccgaagcgacggcggcacacgggctgggcggccaccggcggcggcacacggcgcgcgcaagcacgggaggcggccggccaaggggagaaagagggaggggagaggagtgctcaccgagggcggcgacggcgagacgaccacggagaggcgaccggcggcggaaaggatggcggcggtcggcacgggaggcgacgagaacggcgttccgatgacgcccgaccacggcggagccacggccgagggacggtgggatgcagcgaatgcggtggaggcggtggcgcggcgtgaggtagatggggatggcggcaagaggcggccgacggagggaggcgagatggcggcagcgcgagagaggtggtgcgcgaggcggcgattttccggaggcggagaggggagatggagtaggggccggggtagagcttggcacggcgttgccgacggcgcaagcggcgaggtgcggcgacgactaacgtggcggcagcggccggctgaaggcggtgtgtggcggtagtggctcggcctcgcgatgggaaggtggttccggcggtggaggagggagatggagtggatgccggggtgcggtggggtgctgtgatgctataggtggcggcggcacagcgcggcagcgacgggagcggcggtggcgggcggctggagatcgctggcgagcggcggcgaaggggatcggcgtggagagctcggtagagggcgcggcggcttggggaaaatgggggaaatggatgaggggaggccggggattgtttttataggggaggggaggcgggatcgaggccggacgtggcggaatcggccggcgaagtggggcgccgacgtggggtggtggaggggttaaccggcgccgattttcgcggggagagtgggggaaatggtggaggacgtggaggggatcgtgcccacgtcgttggatgcgagctcgggtgcgggagggcgccggattttgcggcgacgtggacggctatggcggttggcgtcggccggcgagaggtaggaggaggagctgacgggtgggaccgccggtcccacctgtcggcgaagggagagaaggagggacgcaaaacagacttttgcgagcgggccaaggaagaagggagccggcccgagagagggaggaggcgcgcgggccgcgggagaggaaggagggggaggaatttgggccgaaaatggcccaaagagatgaaggaggattttatttgttctctttttattttaattgattaaatgatcttcgtgactttaaaactatttctcgagctccgaaaattcacggaaaattccggagagtacattagggcacaaagaatattacaaaatattcccggccaatgatttttaagggaaaattttaattctcccattattttacttgattaaattgatttaacttttatttaatttctagaaaatgcattatttaatgatttttaaacccgaacgaaaatcggggcgttacatgcgacagggcacattgttggtgcaggttggatagcgggagaacatggggttacgatgttagggtggtcgcaatgccttaatttgggtgcctcatttcccccatggggcattgctgagaaacatccatctctcccttcatggtgggatcctccaggtaaaaatcttgtctaggtcttgggtgggcgggtgggcgggcgggcgggcgacgtggcgacgtcacgaccttcatggaagcatatattgtctaggagatcacattttctatctttctagtctccaatcgatttggtctacgatggtactctaggatgtcttcaggttatgcgggctgcaggaat

SEQ ID NO: 17898 - DNA, 684 bp, Oryza sativa
gctccgcgagggaaacctgacacctgtccagatcccatgagacgaagatgcaacccatcaaggtcacgaaaacaacgggaagtcggcaacctgtgctgcacagtgcacacagcctttgacagcacgtgcgcagcgcgcgagccagatctagctggtagtacagatgggcagcatcggcggcggcggctcgccggaggagcgcgcggcggccggtgggccggtgtgcgtgacggggtcgaccggctacgtcggctcgtggctcgtccgcgccctgctccgccgcggctaccgcgtccacgccaccgcccgcgacccaggtacgccgtacgcgcgagctcgctcgctagcatcgatgaagctcgtggcgtggtgaaactgacgatcatggcggccggcggccggggtttggtggcagacaaggcgtggcgggtgttctccgccgtggaggaggggaaggaccagctgcgggtgttccgggcggacatggccggcgaggggagcttcgacgccgccgcgaccggctgcgtggcgttcttccatgtcgccgcctccatggacatccacgtcccaccccagaatggcaacgacaacaacatcggtaatttacgaagtttaatctccgccaaatcaagattacttccatcaatcgctactaaccgcatgcacatttggattagaccgtaa

SEQ ID NO: 17899 - DNA, 1018 bp, Oryza sativa
aattcctgcagcccgcttcttgaagttggtggtctgctgagctttgtatttccccttgctcttgttctgggccttgtgcacaacattggcactggactgcccaccatcgcccttagacgcggcatctttttcccgagctttctcctcaacatcaagagacgcaatcaacccctcaacggagtattcctgtctcttgtgtttgagtgcagtaccgaaactcctccaagatggaggtagttttgcaataatgcacccggccacaaatttgtcgggtaagacacacttaaggagttcgagttccttagccatggtttgtatctcatgagcctgttcgactacagaacggttgtcagccattttgtagtcatgaaactgctccatgatatacagatcattgctagcatcagtagcaccgaatttagtattcagtgcatcccataactccttagcgtcggtcatatgcatatacacctcgaccagacgatcgccaagaacgctaagaatgcatcccacaaagagagtagtggcttcctcgaattgcttctgctgttcagcagtaagaactccttcaggtttgccagtactcacccagaagcatttcatagctgtcagccacagagtgaccctgatctgccatctcttaaaatgcacaccggtgaatttatccggcctcagtgcatcggcaaaaccagccatagtaaaatcacagtgcctataataaggtttttggattgttgagattatgggcatataatgatttaatttattccataaataaatcatgacattacagatgaaaactagcatgaacgcatcattagatctacacatgtaaactacgtagaaaaacatgaacagatcaaatatgcgcaacatattgaacacgtaccgaggtgacgaaaagaccggctgcttggtcgaaacttttcgcaggtgtctacgaaggcacgaaacacgcgagcgaagaggaaggcgagccgtcgcgaacgaacagggagcagtcgcgcgaagcgcttcc

SEQ ID NO: 17900 - DNA, 2898 bp, Oryza sativa
cggcgacgcggacccgtcgctggacgcggagtacgcggcgaacctgcggcggagcaagtgcgcggcgccgtcggacaacacgacgatcgtggagatggacccgggcagcttcctcaccttcgacctgggctactaccgcggcctcctcaggcgccgcggtctcttccagtccgacgccgccctcgtcaccgacgccgccgcggaggccaacatcgccagcgtggtgtccagcccgccggaggtgttcttccaggtgttcgcgaggtccatggcgaagctgggcatggtcggcgtcaagaccggctccgagggcgagatcaggaagcactgcgccctcgtcaacgacatccactactagtattatcactagctcatcgatcttcagctcctcggtgcttgataaatttcagtagaaatatatatacatgtaacttaattcgatcgtcatcctgtttattctctctctctatgtaattttgtttccaaattgtaactgttttattttggagcaactgtaactatttctgtatgtgcccatgaatatatttcaattatagaaaataattcactttttagtcatagatatttaatgtttaggataatattcagattaattatcattaatattatattaaaataaattttaaaatgttttgatatatttacgattttacttttctactagacaaatttacgtatattgattttttaaactagaatttgagatcctactactagttaaagtttaaaaaattaactaagttttattattctaaagttaaattgctcccctctttctctctctctcttaatatctgacaccattacattttcaacgtactaatcattcatcttacttaaaataatataataaattgtcttattaaaattatataattattaattatcttgttatgaattgtacgtttaaacattgaagataatcttagcataacttatatattcttgtatttattttacataatttaaataataaaaagtaaaacgtatatttaaaattcgacgccatacaatactgaaaatcaaaggagtatttatgaccatataatcgtatttgcacgtggtcctccttgtcggcggctcggtggctgtcgccgtccacgcgctgccttctcgacagggcggtactccacccggtaggtaggcacccgtacggagctcggctaatccagctgaccattcaataattttagatatttaaatataaacttttgtagtgaggctgtgatcagttgttttggcaaaaaaaaaaaatgtatacgacacatatttaaagtattaaacgtaaactataaacaaaacaaattacagattccgcctgtaaactgcgagacaaatatattaagcctaattaatatgttattactaaatgtttactgtagcaccacattattaaattatggtgtaattaggctcaaaagatttgtctcgcaatttgcatgcaaactgtgcaattggtttttttttgtccacatttaatgttacatgcatgtgtccaaacatttgatgtgacggaaaagttggaagtttgaaggaactaaacacagcctgattctctgaaactaataacagctttcaaatggtctcctaaattcaactttaaccattacttcttaaaccaactaaaaatataatattgtgcaattattttgtaagaaaaaattgtggctttcatgcatccaatttaagcaatttactatattatggtagctaacgtttaaagtttttatcagataaacaaaacaccatatttcactttgggccacattttatcacctatatttcgctttggatcacatttcaactaatgttttattttggatcaagtaattttacctccatgatgtttggaccatcctgataacttttttatccaactatatccaatttattatataaaaatagattaaaggatgatccaaagcacatatcaatagtaaaatgtgaagcaaagtgaaatttactcaaaacgaaagttcactctgtgaagtgtcaaattatcaaatccctcctcctattcgttgtgttgtaagaccagtttaaaacaattgatgaagtggagaattaccaaattccccctaatctctgtctccccctccctcacggcctcacctcttctccctccaaattctccatccccggatccccctctcctcctcctcctccgccgctcgtcggagccggaggcgcggcggccttctcccgcgcccttcgtctcctcacacccgcggcggccggcgagaaggcccagaggcaaaggcgtgaagcggcctcctcccccggcgcggcaccctcggacgcacggcggccggtgagcaggagcaggttcggagggggcgacgcggccgggctccttccaccggccagcatcctggctcgagtcgaattttgaaggtattgattactctcgtagcctccctccctccacctctccgcgatttcatgagccagtgtagattggggttgcagatcccctggagtttgacctccaaatccaccggggtggatttcagctgatgatttctatggatggcggattaagcaagtcactttgttccccatctactcggggtggccacatcatttcaatcctatactgctttgcgacatgtcaatctgtatcttattagctttcctgggctatcagtagttgacaaccagaacttgattggagaagaaacatcttgtgtgaaatacatatgacactgggaacatcatcatatgatagttatgtattacttacttttcagaaacttggggcaccagtatttaccgcaattgattgaatactagtactcccgacggcaaatataaggaaagggtgggagtatattattagcagatcaacagcgaaaattataaaatacggcacaagca

SEQ ID NO: 17901 - DNA, 701 bp, Oryza sativa
tcaccttgatacggaaaaagctgcctgatgagaaagaaggtcaaggcgaagtgagcatggctcagtttcttggattccttggactgtttaacatgttatttttctttccttttgcattgttcttgaatttcaccaagctggagccattccacaggctgacatgggagcaagttggtcttattgttggaaaaggtaggtttgcagtttacgcatgaccataatgtgagctataataatgcattgtgtttgtgtgtgtaaacctttgcgttgttttaaatataacattgtaggaagtcataacggaataacttcgtaaaagatcataaaagctcaaactatccatggactagcactaacatcaagctgttgtgttctttacaggtttgttagataatgttttgagtgactacttgtgggcaaaagcaatccttctcacaacaacaacagtagccacggctggtctcacgatccaagttccaattgctgccattgtggatacactaacaggtcatgctcctcatctattggactacatcggagctgctgctgtgttggtcggttttgctggcatcaacatacctgtaggcactccacagggttctcagcaagagcaggaaactcctatcgtcagtatggttgatgatccagtccatttaccaagtgatagaaatgctactagcatggttgagggctgcaggaat

SEQ ID NO: 17902 - DNA, 691 bp, Oryza sativa
attcctgcagcccgtttttggggcctctttcttatgtgcgctctgatatgcgtattcgctctcgtgatgttctttgcaagagtctgctggcaatattccaagtactcaggttctgaagaacctgatgagcccaaagacgatagtgctggcaccgccgagattgcagctgaagccgttgctgaaatgcagcggaggaggccaaagcgtcttggtagcttcaaagaactcatgcagtttgttgataaaaaggaagaagaagtcaggaaatcgatgaagcggagaccaagtgagaaagataatcagggtgttggttcttcagatgcgcagtcagtggcttaaccgtagaagattctttcaggttcagtccttccttcgttctgcacatcacaaaaatgaaaaacatactaaagtagataacagcagtatacttgtagaatctagaaatccattttttctcaggattactcgaattatgtctgatatatactcttaatatgttcagcaattttcccatttttttcccatttgggaatgccatgaactgtgaaaagtgtatctgtttaggtgcttctctgaagcacatgtatgacttctcttttgctttattttttttatctttgacaccatgaatttgtggattactgaattgcctcgctggcattggatatttgagatcaaaagtaagaactac

SEQ ID NO: 17903 - DNA, 1130 bp, Oryza sativa
aattcctgcaccccagcaagcggagataaatactacctaaggatgctactgaacacagtgaaaggacccagaacattcgaagaaatcagaactgtagatggagttgtacacccatcattcaaatcagcttgcgaagcattaggatttcttgacgatgacagggagtgggttgaatgcatccgagaggcatccaactacgcatcagggaaccaactacgacatcttttcacaacaattttatgtcactgtgaggtaactgatccgaagagaatatgggaaagctgttgggaggatctaagtgaagacatgaatacaaacagagaaaaaatctcaactatcctacgcttcgcctaacagagcaacaaaaaaagggacatgctctgatagaaatagaaaagctgatgagacaagctggaaaaacacttgaggaataccctgatatagagctaccaaaatgtgctgaactacgggaacttggaaacagacttctgaatgaagaaatgagctatgacaaagacaagcagaaagaggaacatgatagcatatttggtaaacttaatgcagaacaaaaggtagcatttgattcaataatagagtcaaccaacaaggggttgggaaaactaatgtttgtcgatggctacggtggaacaggaaagacttacctgtggagagctatcacaaccaaactacgttcagaaggaaagatagtactcacggttgcatcatgtggtatagcagccttacttcttcatggggggagaacagctcactcaagattccacatcccactaattgttacagaagagtcaacatgtgacatcaaacaaggatcgcacctggcggaactacttaaaaaaacatcactcatactgtgggacgaggctccaatggcaaacagaatttgcttcgaggcgctagacagaagtctaagggacatactaaggtccaagggtgaagataacagcacaaagccattcggcggtatgactgtggttctaggaggagacttccgccagattcttcctgttgtgcgaaagggaagacgcacgcaaatagtaaatgcatcaataaaacggtcctacctatggcagcacttccacatcttcaaacttacaaggaacatgcgcctg

SEQ ID NO: 17904 - DNA, 16154 bp, Oryza sativa
acccacccactgagctaggagataattcaaggaggatgttgaggtgaggacggaacatgggaggtggatatggacatggcgctgcaagcctgcaacagccactggagggagggagacaggaaactacaggagacccacgccgtccccgccacccgctgctctccgcccgcggaccacgccatccccgcctcctaccatatgaagttttgtgaaggtctggtatggtaattatatataaaattatcaaagttacaagctttttttactacaattagttaactacgaaagctcaattatacagagtcatacagacacccttcatgatggcccaaaaaatctcaaatatgcagtacaagagggataacttgaacgtaaagcagagacaaatcgatacagagcaaagacatgggaacagagcaacaggacattagtgcagtacacattgacgatgcagggatgcacgatgcaatacctgaggacagcgcccgttgtacagcccaatcgcgagtgaagcggttggcgatgcagtagctcggcggcgcaaccagctcggcctcgcactccacaaccttgcgggagcgcacgtcagatcgagacctccgtccccgccacccacgtcgccgtccccccgtccacaccgcctgcagctctccgctagcgctctctgcccgcaacccacgccatccccgccgcccgtcgccgtccccgccatctacgccagcaacccacgccatccccgccgtctgtcgccgtccccgccgcctacgccgccaacccaagccatccctgccgcctgcgccgccgtcccccctgcccaaagctctccgctcgcacctccggcccgcgccatccgccctcctcgtccgcccttcccctcagacctcatcctttccattttcccctcttctgtcactctctccttgctatccatacgtatactcgtatagcggaatagaaaagaagagcaaaaaaaattagctagagttacagagtattagttgcctactactaattagtattttagtcaaagcaaagtgatgcaaaatttgtttggttaagtgcagttttttttcacaaatgcataattatttcatctacatagattaacaaaatttaacaatcatctgtgtttttcctgtacttgcgagacgaaacttttaaaactaattgcgccatgatctaacaatgccgtgctacagtaaccatttgctaatgacggattatttacgcttaataaatttgtctcacagtttatatgcggattatgtaatttgttttgttaataatctatgtgttaataattcagataaccacttttctctatcctctattttacacatgcttctaaaaaatcctacgctaccacatgatttaaaatcttagacctattattttggaccattacattatatcttttcaaaataaaaaacatatataaaatataagaaaaaaaatatgaccattgtaactttaatcggtaaaacaattatttacatccgatagaccaatccttaaaaatacaaatccattccacctccctcccgtacataatcactcatctctccacaatatctgtacgtacatgcaagatatatatcttgcatataacggaattttaaaaaattaccatcgagacaatcgtcaagctactaatgcaaaggttgtttgattattatttgtgcagatgataatttgatctaactgggttaatacatttaaaattttttacactctatccaaacatccattatattccatactatattttaaacattcatttctatcatatttatataccattttcttttcttttctcaaaatcatttatataccattttctattcttttctaaaaatcctgtgttacaaaggaaaccctaaattctttctaataacaacaaaaattatgatagtttaaataatatgcccgcgcaactgcgcgggctaccttcctagttatagtaatgttgacaaaaatttcagcttgtttctaaggtgcagtgtcatattaattagtccagaattctagacccaggaaattagatagtaatttctattgctaaagtgctaaatgctgattgtcttgcaaagaaaaagttcatctggaaactgaacttgtgcatgctgagttcaccaattctgcaggcttttttgaaaaattgtgaatcaatgtccgaaatctgaaaactgatcctagaaaggtctatctctgaaccaagaacttcctgtgtgattcacagtagcggtcctcgtatgatcgtatcaatatccaatgtctgatgaaaaaggaaaatagtagtatcgagtagccgacacaacctcagtttcgtgttacaagtcactttagcttttgccacaagtcgaacttcctattaacagcattcatattaaaatacactaacattcacaacaataaaactatacaattggtcgatgttagatatgtttaacttaagacaaaagctaaagtgacttaaaatatggaaccgaaggaataatagcgagtaggaagacaaggaaattaatttgtgcagttcaagtcagaacgtagcaggcggagacgatggtttttacaggtgcaggtccagagagctcctggagattttattcaggtagtgcgccgggtaagggcacctgcttgcccccttgcaagttgtcaccgggagattttcggtcgcgtgtggcgacatggtctggcagcgaagattgcaaggaacccagattataatgactaaaaatctaccctattagctccgcctgcgtcgctcgccctaggcgacacgggcagcgacaacacgcgccgacagcccgcttcctccccctctcttccgccttgccgccgcccgagcagctgccggcaaagccacgcagcagcaaggatggtggcggcggggcctcttttcttctctcaaggagtacggcggggcaccggtgggacttgagcgactgaggcggcggcggcggtgccgccagatccgcgccgctccggccggatctggcgggatggcggctggcggcggggaaggtgatggcggcgggggtgatgatggcgtcggggatggcgagctgcgtctgttattgggggccgtcgacggcggggatggaggtggcggcgaggctggcgacggcgggccggatccaggcacgccggaggcggatccggccccccgtgggtggatccggccccccatatgggcggatctggcgcgggagctccacgtgcttggcggctggtggctggtggcggtcgcggcagctggtggcggtcccgacggctggtggcggcgtcggggctgtcgcggcggcggctttggctggcgacgtcgacagaggacatggcggctgcgtcagggtggttgctggcagcggctgcgttggcggtggcggcggttcgcgatggcggtggctggcgtcggcggctggtgacagcggccggcttgcggcggccatgactgaggaggcagcggcgacatcggcggatgtggcagtggaggcggggaaggagtctgtttggtggcggcgggcgacggcgcagctgttttgcggaggcggaggctggcgtcggtggcagcggtgacgtcggctgtagccgtgaaggtggtggcaacgtcggaggatgcgggtcgctggcaacagcaagtggaggcggggaaggagtcgggtgcgaggtgaggatggcgtcggcgaggtggctgggtgttcggcaacagcggctgcggtggtggtgaccgtgtctgcggccaccgaaggcatggcggcctcggacggctagccgagggcgtgggagacgactacatctagctggtgcagcatcgtttgggtggaggggtcggagaccagcttggcgcagagaagcgcagccgatggcagcggaggctggctcggcgcgagaggcgcgggcggcggagatggaggccggcttggcacggaaggcatggccgatggagggaggctggattggcgcgagaggcgcttccggtggaggaggccggcttgacgcagagtggcgtggccggcggtggaggaggcgacctaggtgtgaggaggagctgtcggtgggtgtggcgcggtcttcggcgcacgaaggctggccggcaggggacgccggtgcagaggtcccacatgtcggcaaagcttgtgtggtggtggagcatcagtgcgtcagccgtggattcacaggtggtgaacggtgggtgaaaacccagtccagccttggtcggactgacaacgatgtcctgagggagttgttgcgctgtctcacccctcaaggatgattgccgagcgaaagcccagtcttggctcttttaagtcttgacagacgacggcagcagtttttccgtcgcttctcttcttgaagacgttgttttggcatcctataggggcaatctcgcatgtgtccctttgttggtctagtggcggtcggtcacgcttagcagcggccggtccggtgttagccttctcctgggcttgttgttggcgatgtcgccgtgtgggtggtggtatatttggttgtaatcttgtaattttttcctgctctatcaatagaacttcgcaccgtctcgtgcgagtcgttcaaaaaaaaaaaactttctagcaaaggaaagagatctaagatagtagagagtccagcattggaagagtggagctagtatggagaggacaggctacctgcagtgatgaacggcgtcgatcaccaccggtcgccagacaaagtggggagcgagaggataaattagctagaggcatttcggtatgggcatatgtgaggaaaattgggttaccattttaatttggaagaaatttcgaaatgtcattctggcatcggcccctaagttggaaatagcattccacgaaatcaaattggaatttttacaacggcatttcggcgaagcctacttttgatgatggcatgtatccaaatttctcatgacgcgcagagtccacggatcggtcactagtgtgcaatgcgccgtagacaagtgtctaaccagaaccgaacatccggatcggggcaatggtggtgtcgaccggagcgggagctgatcggcgggaagaccgccggcagcgcacgggggtgtgtgccgtgcgcgcgcggctccccttctagcccaaaaaggaaaaaaaactagcagttttgggccccgaaatatccagcccaccaaaactatcaaggccgaaaccgaagcccacaatgatgaagggctcccggattcaccggtcgatcgcgtcgcgcgatccctcggcgaggccctgatcggcggcaggagcagagccatgatcgacgacgacgaggaggcagcgctatggtcgcgacgaaacacgccagtggagcaccccatccgccgcgcgtacgaccgcgtcgccgccgccctcagggagaagcgatccaacgagcggctcgcccgggagtgcctggaccactacaacgccctgcacccgggcgacgagcacgacctcgcacccggcggcgacgtgacgctgtcccgctcgcactgcagcaccggcgcctggacgcacggcaacttcgtggctcgccgccgccggcggcaatggcgccgctgcctcgccttcgtcctccccgccacgcggacgctcttcttcttcgagcacatgtccggcgacgactacctcggcgtcatcacgtgcatcccgatgccggacgagccggtcggcggcttcctcgccagaatccctgtcatccgccggtgggcgacccctcgccggagcggcaggtgggactgcgtctgcaagacgtgccgccgcggcctccgcgtgacgcaccactggctgaagaggaaggtgatcggcgagttcccgtgcgggcacatggtggcggagagcgtctgcaagatgtgctaccactactccgacgtcgtccatccgagcccgggcaagttcgcgcgcgggtacctggagcacgaagacgaatttggccactacggccgtaatggcttgagggattatccatgttaactaaccccagcgtgtttctcttcgcttgcaatgctcacattagaagatctacactaataaatacgtatgtaacagatatttttgtcacttacaggtaggagtagaaatttgacatgttgcagcaaacaattcgtcatgcatgttagagctgcacaatttcagattttgctatatatatttcagaatttgatgcttgtgttggataatttcgtaggtgaaggcgtccagcacgctgtcatgatgcgataatgcttctctttggacaatttcgtatgagtgaaggcgtccagcatgctgtcatgatggtattatgaactgcactgtaatattattagtccaaaattctagaccccaggaaattggatattaatttcctattaccaaagtgctaaatgctgaatgtcctgcagagaaagctaataatcaggaaaaatccgccgtccgcccattacttgccttgctcaactgggcttgagcacatcctgatcaattctacgggcttctagaaaaactgtgaagcgaggcttaaaatctgaattttgattctaggactagaaggtgtttctttcagaacgatgaattcttgttagtgacctgtcctcatatcaacatctgaagccttgtgaaatcgaggagtagcatctagcagatagtgccgttctagaatcttgatggttacaatccctgtctggatctcgcgtgcggttttctcaaaagtcaaaaacacaagctgttactctctggaagcgaatcaatcatatagtcttcgggtacacttggaccatacagtagcttgcatctctgtccacaacctttttactcaaaactcaaaaaagtcgttgaagtttcagtacagaaggaactgacagagtagtgccgaactcttaacgaaaaaccaaattcgctacatctgcagcgcaatttttcctttgcggacagtgtgctaagcggtgaattctgcaacacaacgagtttcagagtctacaatgtcctagcctactacaccaaaactcagactaatcatggacttactgccagaatagttagtactaatgtttagcaatataaaacgcaacaatgtgctggtaggtagtaggagttgtacagacagtgggcatcagagtgacatcctttatgtgtttttctgaagctagtctacgcacaagtccacagtcagcaaaggcgagccgggctctttgaaattttcttcagtttctgacgttgcacatgagacttcctgctcctttccttcgtggccactctcactcatcgctagccactggatcaccgaacgtgcggctgagatcgaagctgggatctctctgtgggagacgggtcaatgggctgcacagctgcatcatccagaagcatttcctgtcgctgccagcattgtcatcgagcacctatacggtgtgcattttcaggttaaaaaaaaaaacggagtatccaaagctatactcggtattctagaagtgaagaaaccggataaacttttcactgtggtatttatccatatataccgactatatactgtatgcacgtgtggtattgagtgcagtatcttatgctccctttcacttaccgtttcaggcctacgactagtcaacgaatgaccacaaagagtttaaagacaacccagaggcgccagagccacatcattatctaagacttttctgtttgactcaactttagaccagggatttgtgcacgagtacatctagatgtgacactgacatcgtgggcccaactcaccctgaacccgtgacctcgtgctgacgactcacattcccggcctcaggtggatgatccccctgtaaaatcagtggaaacaaaaagcttatcatcatttgctaattgcttccactttaaatttacttgccgtgcttgaccggttataatctcgactctcgtaatagttttctttttctttgaagactaataaatagtgtgatactagttctaatcggtttgaagatatactaaaagaaatggtttcaacagcgacaatacggccagtggagcaaaattagatgtttaaattattggtggccatgggtgatagcaataagatcgcgcgatctgcaacatcttccactcctctttgtcgcaagtgatcgacacctctgtgcttccgaatagtttgaccattcatccgacggcagagtaatgtgccggcacatgctacagtccaagccaacggagcatattgtcgtaccttgatcatgaaaagatcgcaaaactcccataaagaaaccatgtcacgagctgtgcaattcgtacacgttgctcagcttagtccttaacttaacttagtagtagctgcataaacaaaccatctagaacatatccctttcaaacaacgccaccatctgaccagcaaaaaccaaacaaaagatgagctaaaccaccaactggtgaactagtatcaaattataaaggaaagcatggctgaaacttccaagcaagcagcacccaaaaactaatcctaaattcctaacaaattcaatcatttaaccaaacaggataatggaggaagaaaagtctgcacgtgccgttcacactgcatataaatggcccacccatgtttctcacggtggagtccgcgatggctgcttgcctcaccgagtgaacgcacgcgctcgccggcggcgaccaagaaaccacgcgaagacatggcattcccgagcggcaaagcctactacctccacctcctcctgctcgcgatcctgccaagcctcgtcgcgcggcgcggcgcggcgcagcagggcggcgtcgacgagaagcagctcctgctccaggtcaagcgcgcgtggggggaccccgcggcgctcgcgtcgtggacggacgcggcgccgcactgccgctgggtgtacgtgtcctgcgacggcggcggcaccggccgcgtcacgtcgctgtccctccccaacgtcgcggtcgccggcgccgtccccgacgccatcggcgggctgacggcgctcacggtgctcaacctccagaacaccagcgtcggcggcgtgttcccggcgttcctctacaacctcaccgcgatcacctccatcgacctctcgatgaacagtatcggcggcgagctccccgccgacattgaccggctcggcaagaacctgacctacctcgccttgaacaacaacaacttcaccggcgtgataccggcggcggtgtcgaagctcaagaacctgaaggtgtttaccctcaactgcaaccagctcaccggcacgatcccggcggcgctcggcgagctcactagcctcgagacgctcaagctcgaggtgaatcagttcacccccggcgagctgccgggatcgttcaagaacttgacgagcctgaagacggtctggctggcgcagtgcaacctcaccggcgatttccccagctacgtcacagagatgatggagatggagtatctcgacctgtcccagaattcattcaccggaagcatacctcctgggatttggaacattccaaagctgcagtacttgttcctgtacaccaaccagctcaccggcgacgtcgtcgtcaatggcaagattggagcagcgagcttaatttatctcgacatatctgagaaccagctgactggaacgatcccagagagctttggaagtttgatgaacctaactaacttagccttgatgacgaacaacttctccggcgagataccggcgagccttgctcagcttccatcgctggtgataatgaagctgttcgagaacaatctcaccggtcagattccggcggagctcgggaagcactcgccatttctgagagacatcgaggtcgacaacaacgacctcaccgggccaataccggagggggtctgcgacaaccgccggttgtggatcatctccgccgccggcaaccggttgaacggctcaattccggcgagtcttgccacttgcccggcgctgctgagtctccagctccaggacaacgagctttccggcgaggtgccggcggcgctgtggacggagacgaggctgatcaccgtgctcctgcagaacaatggacacctcaccggaagcctgccggagaagctgtattggaatctgacgaggctttacatccacaacaaccgtttcagtggccggcttccggcgacggccaccaagctccagaagttcaacgccgagaacaacttgttctccggcgagatacctgacgggttcgccgccgggatgccattgctgcaggagctggacctgtcaaggaatcagctctccggggccatcccggtgagcatcgcgtcgctcagtggcttgtcgcagatgaacttcagcaggaaccagttcaccggcgatattccggcgggattgggctccatgccggtgctcaccctgctcgacctttcgtcgaacaagctctccggcggtattccgacgtcgctgggatcgctgaagattaaccagcttaacctgtcgtcaaatcagctcaccggcgagatcccggccgcgctcgccatctccgcctacgaccagagcttcctcggcaaccccggtctctgcgtatcggcggcgccggcgggtaacttcgcgggcctgcgctcgtgcgccgcgaaggcatccgacggcgtatcgccgggtctccggtcgggtctcctcgccgccggcgcggccctcgtcgtcttgatcggggcgctcgccttcttcgtcgtccgcgacatcaagaggcggaagcggctcgcgcggacagagccggcatggaagatgaccccattccagcccctcgacttcagcgaggcctcccttgtgcgcgggctcgccgacgagaacctcatcggcaagggcggcgcggggcgcgtgtaccgcgtcgcgtacgccagccggagcagcggcggcgccggcggcaccgtcgccgtgaagcgcatatggaccggcggcaagctggacaagaacctggagcgcgagttcgattcggaggtggacatcctcggccatgtccgccacaccaacatcgtgaagctcctctgctgcctctcccgcgcggagacgaagctcctcgtgtacgagtacatggagaacggcagcctcgacaagtggctccacgggaacaaattgctggccggtggcgcgacggcgagggcgccgtcggtccggcgagcgccgctggactggctggcgagggtcagggtggccgtcggcgcggcgaggggcctctgctacatgcaccacgagtgctcgccgccgatcgtgcaccgggacatcaagtccagcaacatcctgctcgacgctgagctcatggccaaggtcgccgacttcgggctcgcccggatgctggtccaggccgggacgccggacaccatgaccgccgtcgccggatcgttcggctacatggctcccggtaattcacctcaaccaacctcgctgctcgtctcacgattctcccttgatttcttctcttagcacagcgacttaccttgtgctgaccacgatcgtctcgtgcagagtgcgcgtacacgaggaaggtgaacgagaaggtcgacgtgtacagcttcggggtggtgctcctcgagctgatcaccggcagggaagcccacgacggcggcgagcacggctcgctggcggagtgggcgtggcggcacctgcaatcgggcaggagcatcgccgacgcggtggacaggtgcatcaccgactccgggtacggcgacgacgccgaggtcgtgttcaagctcggcatcatctgcaccggcgcgcagccggcgacgaggccgacaatgagggacgttctgcagattctggtgaggtgcgagcaggcgctccagaacaccgtggacgggaaggtggcggagtacgacggcgacggcgcgccgtttctgccgatcaggggtggcagccgccggaagcagctttcggacaccaaaggcatcgacgacggcaacggcagcttggacagcatagtatgagaacaatggtcaataagaagtataacctgatccaatggttaccatctaggagagatggcacgctagttaggagagcaggtagataccagacaaatacattcgccatccttcagttatttgcatgtaatgagtattgtaactttgtaaatgcatctataaaattttgggacagtgagagtgcagtcacatacatatatgagatcaaacaagagcaattagattatgtccccttctttattacgaagagaaaatacagagcaaaaaaatcttggttctcaacatcaattaagggggaaaagaatctgacagaacaggaatggaaattgcctgtgcctccatttccctgttagtctgctactgccatccaacgttttatgccattagaaaacctccaaactcattggcgctatactagctatatcccgctgcagaggcacttatgtttgccctcagaatagccaaaaaaagatggtaagatttcaaggggggagccaggagtattatgtggattttgaagggggaaatgagaacctacaaacggagtttgattcatcattcatcaagatcatccttaaagctagtcgatctcggcatactgggagtgcgaggctgcgagaagagcagctccaatgccagaaccatcgttggccagcttggtaaccaccgaagacgagacatcatccccaagaaggtctgttagagttgattctaagcaactgctgaacttcttgtaatgttcatagagcccaccatccaaggcaatgacagtcctaggcatcttactgccgtcttttggcatcttgtcccgacctagcttctttaggaccccatatatgccagcagcagccaagcgtgcagcacgctctgcaactatgtcacaaatgtgactggtaatgtatcttacttccagggaagtatctgggacctgaataaaagatcaaatcataaataagcaaccagtactcattgaacagtgttggatgttgcgtatccactttgggtcaagaaatttcataccccgacgatatcctttagcttagctccaacagttttaaggtcatgtgacgagtcatgatgcatggctgacatatccggtgtcctgtgatacaacaattgagatacttataaaaaattctaccagagttgcataagattgaggggttagaagcataaagaaaaactggtgagcaaaaaccaaaccaccctaattatccaagctagataacttctagttgcacacaattatgagaatcaaccagaaccagaagaaagtagtaatggataaaacaacaaagtgtatgtttgtcaccttccatggatttgctaactgatttagcatgataatttcaagatatacaaacaacttccccttccataatctatctgggtatattatcaacagtgcgaatattataatggaaacgatgccaacgtctttatatcatgtgcactcttatccaaggggtagtcacagaaatcgtgaaaaaaaaaacttgaccagcatgatagttaacaacaaagtaaaacggcttttgccatgacaaaaggaaggaatgaagatcaaaagagagatggtacagaaatataccttagtacaaacggttgctctagcttagatggaacaacatccccaaacaaagctgcatcatgagcaagcttcagcaagattcttcgcactatctctccaagatacatgccagaaatcaacttttcatatatctgttggaaaatacatacaagttaatgcggtccacctaaaaggctaaaactaaaaggagaggaaaatactggggatagaatacctgctctccaggattcaagctttcaaaatccattgctttatcgaattctgaaagaggaagcttatctgatttaaagctcccccattctgtgttgattacctagagaataccaaataattccacgtttacatatttttttaagtagggttaacattcaagagtgttggcattgatcatctataagacatagacaactaatgataatcccaagcataaggtattcacacactaaccatatttccggacctaggcagtaaaccggtccatttaggaattgcattagcattctcaacatatgctgcatttgtaccagtgcccaatattatagcagcaacaacactgttatccgcatacctcccaccagccaatgtgccgacagtgtcattaacctaacatcagtggtaaatcatgtaacaatgtttgcatcacatcatcagatgtgaataccccaaaagcagcatcaggatacaaatgattatcaatgcctcagataacggagctgagcatagatatagtgtggaagtaagaaattgacgaaattaatatatattaacttaccaatgctgcaattttcatatctaatccctgcctctccatggccttgcccaactcagatacaacatcttcgccaacctaattcaggagataatatagcaaaatcaaattattcttattggatgcttgacagttcacacagatatgatcaaccaggcaaacataatactgagtactattaaagatcctcaaattaaatatgcttcctgatcaaggtcgatatttcttttcactaacctagttaagttgattacaatgtacacaaagggagattgtagcaaatagctaattgaaatactccattgccatattcaatcaagctttatcaaggaaccttgtgacataattcatgtgtttaaagaaggatcaggattgtgttctagtcagggtatgtccaaaagttatttttgattttaccgcgtcattgatggagaaaccctttgtccacttgatgagcgttcctgacgatattgatgtctggctcactgggaaggaaaaggtgaagcccagctctctctgtctcccttctgggaggtggaaatcatcaccttcagtatcaacaaattttgacaatgcagaagcaataaaatcaaacagttcctgcattaatagtcagaaaatacataagacaagcatggaatgtacagctccaagaaatttaaaatcaagcagcaaatgcttaccatggaagttccaaccatcagatgtggtggaattgagacttcctcgtactgttgttggacgacacgtttctccttgccaccgagttggactcgcaggacgcggaagttggttcctccaagatccaatgcataaaacaacccctgttcatttctgcaaagggaaatcattatgatcaaagaatgaaattactacttttggaagaaggcagcaggaaacattgtatgcttatgggtgagtgagttctaacagactggtagaaggatccgatagaataagaatgaatcattatatttaagaaacttccttcaggatgtgcctgccacatttagcttaacgatgtggaggttacagagaaacttattaccagaccaactataccatgagataagctcgactgatggatctaattggtcagattgctaacaaggaaaccacaatgcaaagaaactctctgccatacattagttaattacctgtcactgaagccttaacaaatcaaaccaacaagaaattaattaatcacatatcataatcagaaatcctaaagagccaaagtaggaacaaatggacgatcaaattaattaatcacatatcataatcagaaatcctaaagagccaaattaggaacaaatggacgatctactatagatcacaaaaccgaagatcatctgagaacgataggatatgttgacgggagacctatctttcctagcttagataggccaatttatctatcttgtttgagttctatgtagaatcctgtttacacaaggacatgaggggtacagttcgtaatccggtaccccgcaaattgttttagcaaacaaatgtgatctataatctataacatgtatgtatagtatgtgtatgcacaatcagctaaattaaaacaatcattttcaagcacaaaaatcatccttgtcaagagtattatcattttctcttggctactttatatttttttctataacaatgatttatgtttgtgttaataacacatactagcacttcattttttttctcattgcatgatgctttagtaactctgtacccccatcaccgaaatcctgcgtcctggtgcatgagaagcaatttcagatgcccacgactccacatttttccttcaatcactggtatgagccaatttgccttggctctcctcagcagagtccgagagcaagcgtttccttgtggttacataacttatttcagttataacaaatg

SEQ ID NO: 17905 - DNA, 766 bp, Oryza sativa
attcctgcagccctgcaatgtgaagttggggcgtgtcctcatagatggaggagcggctctcaacatcatttcccccgcggcctttgatgctatcaaggccccggggatggtgctccagccgtctcaaccgatcattggtgtgacgccggggcacacatggccgttaggtcacatcgacctaccggtcacctttggtggatcagccaacttccgcacggagcgggtgaacttcgatgtggcggacctcagtctgccctacaacgcggtcctggggaggcccgcgttggtgaagtttatggcggcggtccactacgcctacctccagatgaagatgccgggccctggtggccccatctctgtccgtggcgaccttaaagtcgcgctcgcttgcatggagcagcgcgcggaccacctcgctgctgcgaccaagcccgagggtggtgacgagaggcttggcacctccgcccccaccgccccgaggcagcggattgccacatgcgacgaggtcccggtcaaggaggttgccttgggcgacggcccatccaagaccacacggatcggtggtcttctggatggcaaataggaagacgcgctcgtctccttcctgcgggcaaacgctgacgtcttcgcatggagaccagcggacatgcccggggtccccagggaggtgattgagcaccgtctcgccgtgcggccgggcgcaaggccggtccggcagaaagtgcggcggcaggccccggaacgtcaagccttcatccgcgaggag

SEQ ID NO: 17906 - DNA, 2268 bp, Oryza sativa
ctagtcgccccggagccaaatgagcccctgctactttacttagcggcgaccccccaagtagttagtgcagcgttggttgtggagcgcgatgaagacaatcctcatttcgtgcacccccattctgtgctaacttggcccgggagcgagcggggaggagaagcccccgagtcggacggtggcctacggcccctgacgaccggagtcggccctctgcccgcttgtcagacggtgctaggtgcccccgaccctcaggagggccccaaggccactgcgggaaggccgcacttaacgccctctgaccccgaggctaaccctgtgctgactcgacccgggaaagagcagggagaagaggcccccgagtcgaacggaggccagaggcccctgacgaccggagttggccctttgcccgcttgtccgacgatgccaggagcccccgacccccaggacggccccgaggccactgagggaaggccgcccctttcatcctccgaccccgaggtcatcggcacagaagacaagtgcgccccgaaaggccacttgaacgaagaacgccccggggatacggcccctagcagaggggatcggccccaccgaaaggtgcagtggcctgtctactttgttagtgaggccctccgggacgctaagacccgataccctcaggcccagaagatgctttacgctattctgatggcctcgaggaaactgcgccattattttcaggcacatagggtcactgtggttacgtcttaccccctcggtcaaatcttgcataatcgagagggtacaggacgggtggtaaaatgggcaatcgagctttccgaattcgatctgcactttgaaccacgccacgctatcaagagccaggccctcgccgattttgtggcagagtggaccccggctccagagaccgtctcaatccccgaggccagcacgaacccctcgcagctgcctcacaccacccactgggtgatgcagttcgatggttctctgtccctccagggtgccggtgcgggggtcacgttgacctccccgacaggagacgtccttagatatctggtccgccttgactttcgagcgaccaataatatggcagagtatgagggactccttgccggactcagggtggcagccggactggggatccgccgtctcctggtgttaggcgattcccagctggtcgttaaccaggtctgtaaggagtaccggtgctctgacccgcaaatggacgcctatgtacgccaagtgcggcgtatggagcgccattttgacggaatagagcttcggcatgtgcccagacgggataacatgatagccgacgaactctcacggctcgcgtcctcgcgagcccagaccccaccaggcgcctttgaagaaaggcttacccggccgtcggcgcgacccgaccccttaggggagacggatgcgcctgaccgacccccgaggcccgtcggagtccaggcctcgggacccgaagggagcgctccaagctcccttagattgatcgcttggatctctgagatccaaacatacctcacagataagactctacctgaggaccgcgaagggagtgaacgcgtacaacgcatttccaaacgctatgtgctggtagaagggaccctctatcggcgcgcggctaacggaatcctcctgaagtgcattcctcaggaacaaggcgttgagcttcttgctgacatccatgagggcgagtgcggagcccattccgcctcgcgcacccaggttggcaaggcctttcgtcaaggattttattggccgacagctctcaatgatgcagtcgatctggtccggcgatgcagagcgtgtcagttccacgccaagcaaatccatcagccggcccaggccctgcagatcataccactgtcatggccatttgctgtctgggggcttgatatcctgggaccgatcaaacgggccccgggcgggtttgagtatctgtatgttgcgatcgacaagttcactaagtggcccgaggcttatccggttgtcaagatcgataagcactctgctcttaaattcattaagggcatcacggcccgttttggagtgcctaaccgtattattacggataatggcacccaattcactagtgaactcttcggcgactactgcgaagacatgggcatcaagctctgcttcgcctcacctgcccaccccagaagcaatggccaagtggagcgcgccaatgcagaaatcctcaaaggccttaaaaccaagaccttcaatattctcaagaagcagggctgcaggaat

SEQ ID NO: 17907 - DNA, 717 bp, Oryza sativa
attcctgcagcccgttgcgagtatatggattgctgcaagctacattgttcagtctgttgtggatgagggtgtttctccattcttgattacctacatatgcaattctctatttgttatttacatcccaatagttgaggctgcacgatactttgaggattctatcaacaacttttggacaaagttgaaaggcaaggatgttgcggacctggagcagtctgctgatctggagagcataaatcttctccatggaagtgaacaagagggcaatacagcctcaccaacaaggttgcctgaagacatattggcttcagaagcagtcttccctgtccaggccgagctgaatgtagcagatggcagcaaagggttggatgcaaaagggcgctggacacgtgctcgtgtggctagagtcagcatggtagtctgccctttctggtttctcgctcagcttacattcaacctgtctctaagatacaccactgttacagtaagtgttactaaggcctgcatttccatgccattatttaacctcgctcctgtccattggtaacatgtccttgtttctttgtacctgcagtcaaatacgatattgagcagcacgtctagcctcttcactttcttggttgcactagtatttcttggagaaacattcacgtggttgaaactaatcagtgtacttctctgcatgggaggaacgataattgttagcctagctgattc

SEQ ID NO: 17908 - DNA, 2107 bp, Oryza sativa
cccattatgcttgtctttttcgcaatccctctcgctgatactcccttccaaatatccctcgctgacgggtgattctttttagtgaaacacttgcattgtgctagttctagattaaaaaaaaaaaaggttagaataactttcgctggctgtcgtccgctgccgcgccatcgtctcccccccccccccccccatctcgtgcagccgtccgccgccttgaagccaccggcgtcgcctcgtcggcgcgctacatgatcgagcacgcctcggcgtcggaggctgcgccgaagctttcgttgccgccgccgccgtaaaggtcgtcgttgccgccgatgtcgccgccattggtcccgatgctgctgctgccgtcgagtccgccgccgccattggcgctgtgcccgccaccgccgttggcgccatagtgatggtgatgatggtgtacggtgacgtcgggtcgaccgtctccagccggcggcggacgcggacgatacagaggaagcggcggcggtggcttcttcttcttcttcaagctcttccagcactggctccggtagatgtaggcgccaccgcacgccgagaagagagacgcgatcatcgtaacgaacacttgaacccatgaccatgacttgcagttgcagacgaacacgcgacgctcatccccgccggaatggccgtcgccgccagaaccatcattgccgccgccgccgccgccagtgcatgcagggaagccagcatagcaggggagcgcgggtggagagaagtacgaaacgtctggtggagagtagaaaatgggtggaggtggcggcggcggtgagagaggtggtgggcagaagatcgcagggggagggggagcaccggagatgatataatccatctgagctacgcggtggagaggatgaagctagggcgacagagtcgcggagagagagagacagagcgcacgccggcgaagaagaagatgggagggttttgtagtcttcctccctctgctcacggtgggccaaaaaaaacccagcaaaacagggtttccttcccagaatgtgtaggttcctccctctgctcatgatgggtcaaaaaaaaccaggttttcctcttctcatagtgggtcaaaaacctagcaaaacaggttttccttcccagaatgagtaggttcctccctctgctcatggtgtcttggtgtgtccaaaacccagcagaacaggttttccttcccagattagaatgggtaggttgggctaaaattgacccacctagctctgctgcctctgcatccccaggccagcctctccaggctccactattctcttgttttgggcctgttctttcttttcttttctttttttttcaaatgcagcattaggccactggcttccatactagtgctatatatggaggggggagggaggtatatatggatggttgaatgtgacacctcttggagcatctcaactgtttattccgatcatcgagccaaaaggccagtacaggccaaggtttagatcagctgaaagagacgcttcagatcagttgaaagagacagggtctttctgatagaaaaatatatgatgacgtgccatgagcctcttaatatcttgtactagtggctaatcaaatatggttagatttggaagtggcctgcatggtagtggcacaccgggctctcctagtacttctctcggcaagagtgacattgacgctggcactacaaactcatccgctgactgctggatcatcatatgttgaccatcatcattatttctatatagcaaatcttttcgcaataccattatataattttttttcgacatgaaactatattacatcttcacatgataatgctgtatagtaatacatacgttattcgttataaaatgttttcttattattatctaaaaaaaggttttcttattgaaacataagcttattgctaacaatacagtaatagtattagaagtactactaccgcgtttgaacaaaatatcaaattactcctctaaactattgtgacaatttaccaactgaacggttacaccaggctacccaaactcgttaatccaaataaattatcctttgaacactcttttaggcggttttggcatgagatgacaca

SEQ ID NO: 17909 - DNA, 702 bp, Oryza sativa
atttgccggcatgcaacgagccggcgtgacgccgaacgaggtgaccctcctcggcgtcctcacggcgtgctgtcatgccggacttgtcgaggaggggctccagcaactcgacgccatgccggaacctcgcatcgagcactacggctgcgtcgtcgacatgctcgaccgcgccgggagactagacgaggcagaggagctcgtcgcggcaatgccagcacaccccgacgcgctcatctggggctcgctgctcgccgcatgccgcgcacatgacgacgtcgagcgcgccgagcgggtgatgtggcggcgcaccaccgacgccgacgcggacgccggcgactacgtgctgatgtcgaacacatacgcgtcgaatggccgccacggcgaggtggtgaaggtgaggaggcagatgaggaggaacgagatcgacaaggtccccgactgcagcctcatcgagatcgacggcgtcgtgcacgaattcaaagcaatcccagcaaattccatccgataaaaacacaacaagattcatcaaagaacaggttatccgattgatcgattgatcactgtagataacaagattcatagaaccaaggatgcaagatttccactggaaattttctacttctagctgtacatgagatttcagaaggcattatttggctttattggttattgctgcaagaagttgatgctcatttgggcttg

SEQ ID NO: 17910 - DNA, 754 bp, Oryza sativa
attcctgcagccccggctcgtcagccatcgggacgcacgtgacgacgccgaggaagtccttgctggacatgtgctcgaagaagaagagcgtccgcggccgggagggcaggaacaacgacgcgaggcagccggagcggcggcgagccacgaagttgccgtgcgtccaggtggtggagttgcatggcgcgctgcacagcgtcacgtcgcccggcgcgaggtcgtgctcgtcgcccgggtgcagggcgttgtagtgatccaggcactcccgcgcgagccgctcgttggactcctcctccctgagggcggcggcgcggcgccggtcgtgctcgcgggcgcggcgccgtctggagtagtagtcctcctccagcatgatcggccgcggccatagcgccgcctcctcgtcgccgtcacgtaccccgccgccgaccatggctgcgtccaggatttgcgtcgcgatcgatcggagaatccgggagcctttcaatctcgggaagaaaacgtcaaatatcagagaagaaatcacccaatagagcaaaatcgctcgggagatcgtttgattcgtttcggactcgttgccgttggagacaaactgggccttgaaataggttggcagcatggcatgatgggccccggcacgctgagcttcttttgggcctgagaggccttgtgggcctacatctatgggcccaaattgctatacttttacggagaaaattgcatatctagaatggcttcaatataataccattataaa

SEQ ID NO: 17911 - DNA, 9432 bp, Oryza sativa
tgtttatgactgcaactttcgcagtcatacaaccattgttggatcaaatatcaagggctcaaatcacacaaaagtactgttcatcagatactgtagcagatgaatcctgtagcgcgtactgtagcaagtgataacaaacagtactggtactaaatcatggccgttgaaatcttcgatccgatggtattgaagacctaagactgctaattttgcagtccatgttcaaactgcgtgggatcccaatccgatctagcgacgcctacggggttatggcttatccaggcaagtggggggattggtgatgtgatggatgcggggtttgttagtattggtttattatatcatcgtgtagttgttgtcggatggtggtggtgtcatggtgacacatgctgcaatgcttcttgttctttcttactacactgcccttctgggaccactgtcggcgttgggagaatgcgttttctcttgatttgattttctgatcgctgtccactttgcatgtgctgattgctgaaactatgattttgatccatgctgatgaagaacacgtacctccggagctacggtgttacttactcttatatagcaacctaatactagattgaacagattttaatcgtacgaatttaatcaagtactaagttgttatataatttttgaaacaaagggagggagtaatttaatttcgttcataaagagagcatgggttcccatccttcacaactgctgcaacttgtaggaacgttcgcaacttcgcatgaaggtatagtgcacgcctacgtgttgccgctgcaggacgatgtatgctcctttcccttgcttgcccatgacgagaactcaacagaggccagaaaacagctagtgcaccggaaacacagatgcatggttgcgagtagtgcaccggacgcacgcacgcgccatgacatggagtatattactgtagcacactacgggatagtggactttgtggcagctagcctcgccctggcgcgcgacgcgaccacgcgagagaggcagagataaggagtggacttttgcgcgcgtgcggcgcgtccgccactgcgtctcgtggtcgccgatcacgcgcgcgccggtgtaagatcgagagatcagatggacggtgtggtacggtactccgtatccagtggtggtcctggtctacagcgctggcgcgctctttcctcgctcgtgcacgcaacgcacgcgcgagcaccaccgcggctagctgcgcacatcgacgaggaatcagtgcgttcggtaggcggtagcccctgtagacggtagtgtggctccgcaccgcagcgacgactcgcggcgccgaggtgcgctttggcgcagacggccgaccggcccatgcgggcaccgaatggcgctatcgaatatcgatcttggagacttggacatgcaggctaagactgtgccggcagtgtcctgtgtcccggtctttcttttctgcgattttggacatctacagttctacactttcatggacacggctctgttgatttgcaactgcagggttccgaggtacaccgaccgtgttttccaactcgacctgttcgtttttgccaggaaggcccatgaggagcctgaaggccaaatcataccaggtgccagtagcccaccacataataacgacatccagtttcaacagcgtccattaagcaagaaaccaagtacaatgcttcactctattcttagaaccagtgtaaatatactctcaaaaccaggcagtattgagaatagttttgggtgatgtgacatctaagtgggccaggtggcacttacaatcaacaaaaagaaatgaaatacagtgggacccacgtgtcagacgcaacaaaatccctacccctctcttccctatctccctctccttctctctctttagctcttctcctgtaggccggcgcaccatgaaggtgatactggtggcagtcccaaaggtggtatcacgaccaacagggagagggccaccatccctgccgatttcggttctccctcaccttcgctgaccccgcgcgcctccctcatcgttgtgcaccgtgctcatccacggggttgtcctggtcgttccctagcggcgtaggcgcaatgctcgcctcgtcgatatggcaagaatctgtggtgccctctacgaccctaccaacaccgagggggaggctgactacaccgtagctccgtccgtctccaccgtaccctacattctaccagcccccaccatccagttgtgttttggcactgccattagttgcgacgccccacgtcgcgtaccaccattggccacaacgtcaacgtgcctatctgtgcccccacgtcgtgtcgtggtgtccaccgcatgccaagttgtgagaggtcaacccggccattgaatctagctgtccccttcgactcctaattagaagattggggtagggttttttttgtgtgaatttgacatgtgggtcctaccatgtttcatcacctaaaagagttttggaactatatatttacaccggttttaacaattgagtatgtgttgtacttggtttttcgatgggctttagtttggggtctatctataatacattcgatagtttttggaggaaaaaaacttgtactaaactatagtataattaaagtgtaactaaaatatgtaaatttattttgaaatcaaaacttgcactattactccagtgagtaggagggtgcgggttcgagtccacaaccaattcaacagcctaaaatcaaaagtttttccctaaaaaaatattgcaagttacctggcaatttctttggtttgtactgccgtgtcggcgaacaagtaagacgtgatcattaccgtgcagcaaacgcatgcgcttttcccttttttttttcatggcacagtttttttttcctgctaagtgtgtatacatcaagagtttgtatttctaagagtaaatttcacaaaatcacaaattctttattcaaaatatcacaaaactacatatttaaaacggtgtatcacaaaaccatagatttaacaacaaattcgccatgaaactacatgtttaagataaagtactataaaattatagatctagtaataacaaaattatcacaaaactatgagtctagcaccaatttaatcgcaaaagtacaacatttacatcttcaatataacattagttctaagagtttaaactctaaaatatgcaattttgtgataacatcaatattaaatatgtagttttatgatacttggtattaatttgtaattttgggataatgcctttaaatctctagttttgcgatagttttgttaaagtatatagttttataaaatttactctttctaattcctgttcggatttcaattcaaattcagatttacatgttttatatctatattataaggtttagcttataaagtttttttatataaactttctatgacaacttatcatgatgggccagacgcacgtggggtcggccgaaacatattcgtgttcctggccgcgcccgaacattcacacattagatctaccgtcttttttttttttgaaaactaaacatccattaatataaaccgacagagttcacgggaataaatcccagtacattgccaaatagataaagagagagcgtaaaaccatccgtttctaaagaatggaaacctgcactaaggctacaaacttcataatgaaaccacacagcagataaggtgcacatcgatagggagctgcggcaatgccgcgacgaatgcaaccttgggcctccttcggcgtgcagcccgcttgacaaaccggtaatccccatccggttgactccacaaagactgcacaaaacggaggtctgctgctgagccatagattttggagtaagcaacaccggactcagcaagaggtgtccacggagttcgtcgttaaatctgaggagcgtgagctcaacccaaacaacaaaccctgcatggaacaagctgataggaaacatataggaagaaggagcccaaatccagatctccaaacccactgaaaaactcgaatggtggcaaacgaactgctgtcttcttggatcgacgtatggggatggggaagagtaatcctacgaatcttgactgatggaacctaagcattgggagctctcgaactggcaccagtgaaatcgtcgccaccacgccgacgggttgtcatcaagcaccacgagcagcaagctctgggcgacgatagcaccggacgacgcaagccacgagaagtcaccgcagccatcacacgagatggggcgatgacctcccagccactgacgacgaagcagccgacgctgtggccatagatgacgaagcagccaacaccgtggccactgacgacgaaacagccgacgccgtggccactgacgacgaagtagtcgacgccgaggccgcaggcgacgaagaagccgacgccgcggccacaggcgatgaagccgacgccgccgcaagaagccagctccaaccgtcaattcatccacaggtctacggatctcacacctccaccgccaccaaccgccgccgccgcctaccacaccggcgcccatggagctcgctagccaaaagtaccaaatagggacaaaccctaactacaggagagacctaacaacctaaaaacaaacctagaaacacaatactagtagggggaggtggccggacccctcctccaaccttcgccgatggcgagccgccggaatcgaaggggaagaggggccggagaggaagaaatttgggggaagaactgtagagagaggatgggaacgagagaagggtcgcgaagcgccgtggtagcagtctagatctaccgtcataattatccgttcgagcttcgttatctctaaatccagtgtgccatttttctattttaacttattccttcgctgcgatcaaacacataggagggatgggacttgatcaaactcgacaattttgtacgaccgatgaaggtagcatggctcaattgttggctacatcccacggccacacatgtcatatggccctataattgagagagaaccttcatgtccagtagttggccactatttgtccaaggacccaggatagaccaaaagtggctgcctaactgttgggcttttatggccaggcgtatttaatcggttgaatcggtttgtcatgaatatcctagcggaccatgggaaatctccaggtttaataatgattttgaatgttgatgctcagctcatcagtttgtgagttgtgacattgatcccgagtttgatggttaacctgctgaaagcgtgttcttgcttaggctcaatctggaggcacttgacacacggccatggaccgaccttcgcctaaccatgcgcacatctcgcgtaaggcaagtgcgcactgagctcgtctttgtttagtcatggaaaccgcatgccttaatttgttaggagctggggtaatttttttccctgactagcgcgggatggcggtgcgttgcaatgcgaatggaaaagagaaccccatcacacatttaaagcctcaaaagttttagaaaaaattaaggtcacatttatcatcattttgtacctcacttcaatattttttttaagggatataaagtctaccaaacctgtcgatagcaccactatataggtacatgaatgtacatctaaggctgtaacactggtggagaaaccatctttacttccggttgggaaccccgtttagtcccgatttttcaaccgggagtaatgattcgggactaaagatacatctttaatcctggttagtaccaccaaccgggactaaagagaggggatctttagtccaaccgggactaaagagacaatagcgacagtaccagatggtccctttttctatttctttttttctttttattttctcccgaatcaagtaggcaaatccccaaatcaaagtaacatcccaaattcacatcaccaaatccacatcacaaatcataaagttacttatacacacaaatcaaatacatcacaatatcctaagaaattgctcaaatacatcacagatccaaacaatgaatcatgaatttttaacttctcagtcaaatacatctaagtgaatcatcacattttttttttaaaaaaaagaatgccgccgctagccacgaccgccgggcgcggcccagccgcccgccgccgcgcgcggcgccgtcgccaggccgccgggcgcggccccgccggccttcgccccgcctgtagaatcgagatgtcgactagaggggggtgaataggcgatttaaaactaaatgacacctaatcaaaactaacttaagttgctaggcttggtgagggtcaactctaactaagcaactaagttatgttttgcaaacctagggtgatagtggctcaattatatctttagggaagtaagtcacactcctatgtcaatgtttagcaatcctagggtgatatgatctcaagtatgtctctaaaaatgtaaattgcacaaatgtaaatgcgacaatcaaatgagacaaggagacaagagatttttcaccaaggttcggaaattcgccggtttcctactccccgttgaggcgagcccaactccaccgctcaaccacgaagccaccgcacgcccccttcgtcaaggggtgggcaaggcgggagccggcccacggagaggactacccaagcctcgatcactagggtagttcttccttcactccgaaggtggtgaactccaaaccactcgcaaaccggcgccgggcctcctccataatcttctcggagaggtcaccgggcaactcctccacaagccgtctaggaggcggcaacctccaagagtaacaagcaatgacccggcgtgaagatgatcaatcaagtgccacactagctctacaaatggaagcaatgcacttgactcttggctaatcaaccctctaacacactagatggatgaacacaaagctcaagtgggtgtgagagaggtacaaggggtgtatgcaattgaattgggtgccaagagagcccccttgcagctagagggggagtatttatactcccaccaaccaaaactagccattgggggcgaaatcccccaactttgtgctctgccggtctgatcggaggtatgtgggtggtcagaccgtgctactctgcaacggctagaaaactagccgttgtagtgttgtcagagggccccatcggcctggccggtcagaccaaaattgattggccagtcagaccagcctcggctcggtcagaccggcctcggctcggtctgaccgaatacggctccgtcggctctgtatcgaccatcccgagcagcaccatcccggcctccagggggccggtctgatggcgcatgtgccgccggtcagactgctgttgtgaggccggtctgaccgcccctggtcaggctgagcccagtgaaagtaaaggtgattgtgtgtgtgtgatgaaaatgtgagcacaagtgaaaatgcaatgacctaatgtggcaatttaatcatttctttgctaggtcataccccccttgatagtacggcgaaactaacaaagaaactcgcaaatttgatcgcccttcacctcgatcaattttaaaattaaaacactagttttaccgttttcttttcttcgcttcgcgccatcaaattttaatccatcgatagtcatccatgcgcacacatgacgtggacctaacttaaaatatatctcaatagcaatggttagtccataattatcgcttgtcattaattaccaaaattaacaacgggggcctagatgcttcaatctccccctttttggtaattgatgacaaacaccacaaatatatataatcaaacatagaacacatggatatatactgcaaaggaaatcaaaagcttcccctaaacatgtgcataacaatcacaaatagcaaatatggagccaatgcacatttcaatttcacaattcaacatatcacaaacacaagagcaatatctcaatgtgaagttcaagaaatattcatccatgagtataagatggtcacatatatatcaatatcacatacaccatccatcatcgcacaagttcacatcacaaaagtcataaatcatcctaaaagggctcacaaataaacataggctattacaagaccacgagtggtccaaatgacataaagtttataacaaaacgacaaataatacacaatatagagtaatagcacatacccatacaaaatatagcccaaaccaccttaatctattagatatgagggcactatcctcactactactagtcccaatccacaaaaggtaaagcacacttttctcccccttttggcattaagcaccaaaaaggtcttcactcttgtggaggagaaggaggacgcgccgaagtggaaggatgaggagcatcacgacgacgatgatacacaaatgcttgggagctctccaacatttggactcgagaatccaatgtacctactctagtgtgcaatctccccatggaagcattcaagtctccaacatccgtgcgcaagccacgaacatcctcatgcaaagcttcatacccggtagacaagcgttgaatgctttcacttagggtattaatagccccaagtaccgggttgaagtactcgttgggttgcattctaaaataagcatactgtggatggaagaaagtatttggatcatacccaggaggaggaggaggtgctgagcttgagctagctccaggatgagaggagggcgccgccctaggagcatggagagctccaagctgaaggcggggcttgtactgcttgtgcttcttcaaattttgcccaacagccccaagcttgtcttgaatcaacctcgtgatgtaaggggcataatagattccctgagtgaaggtccccttggagatggcaatctcttgcatcatgagagacacaatgtcgaactgacggccctgaatgattgcatcgttgacgtgccaagccaccccctaatgtcatcattgttgccaaggtgagggaggatggtagctctcacaatcctgttaaccacactggggatagtcctcaagccggcaaccttcccatgtgtgtaccgcactccatcttcataaaactgagagagatagtctaaggagagcggattgtgggtgtgctcctcatacaagtcatctccaaagtccaagcgaatattgaggagccgccggaattgcctcctagagatagaacactggagggtatcggacatccacttcatctcactatagtctccagccacccacactgtagcataaaactgccggatcaaatcttcattgtagtcttgcttgagggtcacaatccagtcaatgccaacagtcttgaagagatcctgcaatccctcaagctctgtagtctcattgatgtctctccaagagatccacttatgctctgcaaatgctttccctgcataaacctactcatacacagactactggaaagcggtgtgaaaacggggatccggggtgtcccgaggcctcaaaaactaa

SEQ ID NO: 17912 - DNA, 1197 bp, Oryza sativa
gtggctagggtttgggagaggagagaggagggtttttttttcgagttggggaagaagacggctgaatgggaggagatggagtcgggtaggggaagaagagagaagaaaaaggacaaaagtcctgggcccacctgccggccggtcagaccggccctatgtggccggtcagaccgccgcacctggccggtcagaacgcgcatatagcgccggtcagaccgccaggcccccagcctactgtgcacagcccttgcacagttcggctacccccactcagtaaaaatcaataaaaaatttatttttggagcaattttgaaatatgtgagttgaaatattgccaaccattcataacatttgaaaattatgaagatttgcaacaaaactcgcttgagtgctaggaggtgaccttttatggtctatatgggttttgggcgaatttgattttcaaacaacttttgaaatatttgatttttgaaataggtttgaataccaaaaacattttaaatcttcttctctaccaacattgttttgaaacttttctcaaatttcttctcaatctcattttggggataaatctcattttagccaaaactaagaatctagtttcttcaaaagagagccaaaatggcattttcattcaaaaatcatttttcttgcaatgagaggcttggaaaacatatagggaaccttttaaaatattttccaagagatagttttcaaattacattgattttgcaaaagttttgacttatgttgacttgggcattttgaaaatactactagcacaactagttgatttgctcacatataaagggaagtagagcaaatgcaagagtgcaaaactcccccttaatgtgacatgctccatttttgcaatgaagaaccaaatggcaacaaatccaaagcataagagcaaatgagagcaaatatacataatgcaaaaagaagcaactatggtgcaccatctcaagccacattagagaagtctataacatttaactcattcctcaatttgcaaaagcgggtttcatcaagagacttggtaaagatgtcggctagttgatcctcggttcttatgtggctaatgactatgtcacacttggcaacatggtcttgtaggaagtgatggcgtatgtcaatatgcttggttctagaatgttggaccgggttattggctatctttatgggggctgcaggaat

SEQ ID NO: 17913 - DNA, 718 bp, Oryza sativa
attcctgcagcccgcagaagttttctttgatatgtaggattgttgcaggtggtgcccttaaaatctcatctctgaagcacctcaaattccacagtgactgcgcatgttcatagttaatcagaactcagaagttagcacatgacaaaacatactgcatgcaactttgtactacctgtatgatcacatgcaagataaacatgtctttgtccttgttttctttgttgggaacatcaatacttggcatttcctcagcagattggccaggagttactggatgataagaacacacaatcaccatggatagatcggttggagctctgctttcgttggtttccttgttcccagcgggaggcctaggtagacgatggggaagtcttcaactcggcaagagaggatggattcaaccagaactcgttgttcattgctgcactgaatcggtgtaatagcgctcttgcagaagttggttttgagtcccgttgcctcaccaaaaagagtcagcaatctcttgatagtgttggcttcagtggttgttggcttgaagaacagcaccgcgtcatcggcatacaccgagagcaaatctcttcttgcatttagaggcgaaagcaaaccagccagctttgcccgagaaaccaaagcttgcagagcatccatgactaagataaaaagcaacggcgatagagggtcgccttgtctcagtcctcgagccggtttaattgga

SEQ ID NO: 17914 - DNA, 772 bp, Oryza sativa
gtggatagcaccgaccccttttgcattctgtatgtcaagatggcgcggttgagtaagatcttgtctaagtggggtcagaagaaaatgagtaatttcaggctacaacttcagattgcgaatgaaatcattctccgttttgatgtggcacaggaaattagaattctatctgacttggagcggcagctgcgagctgcgctcaaagggcgctgtttggctcttgcatcacttgaaagaattaggattcggcagcgtgccagggtcagaaaccttcgagagggagacgccagcactgcttacttcttcatgaaaatgaaatcacaccaaaggaaattgaagatactctggctggagcatgatggcgtcattgccaccacgcaggaggatatggaacagatggcgaagacccatttcgaatatgtgatgggggcctcacagggtgatttaaaacaaatccttttccaagaaattcatttggctagggcaaacttatctgagctggatgatgccttcacggaggaagaggtctgggctacaatcaaggccatgcagaatgagaaatcccctggtcctgacggcttcactggcctcttctatcagagatgctgggatgtaataaaaaaagaagtcctagaagctcttcataaattttgcacaggcaactcacaaaatcttgaactcttgaatacggccatcattacccttctcccgaagaaagatgcaccgacacttttgaaggatttcagaccaataagtcttattcacagctttgcta

SEQ ID NO: 17915 - DNA, 604 bp, Oryza sativa
gtaaacctgtggggtgcaagtgggtgttcaagaagaagcttaggcctgacggtactattgaaaagtacaaggctcggcttgttgctaagggctatactcagaaagaaggcgaagatttctttgacacttactcacctgttgctagattgaccacaattcgtgtgctactttccctaccagcctcacatggtcttctcgttcatcaaatggacgttaagacagcttttcttaatggagagctggatgaggagatctatatggatcaacctgatgggtttgtacttgaaggtcaagaaggcaaagtgtgcaaattgttgaagtctttgtatggtctgaaacaagctcctaagcaatggcatgagaaatttgacaaaacattgacatctgcaggctttgcagtcaatgaggcagataaatgtgtgtactatcaccatggtgggggtgagggagttattttgtgcttgtatgttgacgacatactgatatttgggacaaaccttgaggtgataaatgaggttaaatcattcttgtctcaaaattttgatatgaaagatttgggagtagctgatgttattttaaacattaagctaattagaggtgagaa

SEQ ID NO: 17916 - DNA, 7531 bp, Oryza sativa
caagacaagaaacaaacgagtaatgttcacaaatcgaagcgacacgagatcgagtttgaacacccttactaatgtcacccaacacttagtcaattgggtgatccttggaaagaacggtgtgtatccttggtggcataggtggattttgtgccttctcctcctccacttcaacttgagcttgacttggcgtagcggaagtagatggctcatcttgagtggaggtggatggcttgtcttctacttcaataggcttgacatctccaattgacatgttcttcatagctctcatcaagccttcatcacctacatcatccaaattctcgtgcccctcttgggagccattagtctcatcaaattgaacatcggcggtttcttccacaatacctttgttcttgttgtagacccggtatgccttgctatttgaggcataacctagaagaaacccttcatcacaccgactttcaaatttggttagtctaacaccctttcgataaatataacacttgcaaccaaaaactcgaaaataggcaacatttggcttcctcccaacaattagctcataggaagtctttttcaagagacgatgcaaataaagcctattgattgcatggcaagcggtatttatggcttccgcccaaaagaaatcggaaacaccatattcatcaagcatagtccttgccatctcaatcaatgtacgatttttcctctccactacaccattttgttgaggtgagtaggtagcggaaagttcgtgtttaataccaagatcatcacaatagtcctcgatattggtattcttaaactcggaaccattgtcacttctaattttcacaagagtgcaactaaattcattttgggccttttttgcaaactttttgaaaagctcggcaacaatagacttatcatgcaaaaagaacacccaagtatagcgagaataatcatcaacaatcacaagacaatgactatttccaccaatgctcttataggttgttgggccaaacaaatccatatgcaagagctccaatggtctagatgtggacatgatacttttagtaggatgagaacatgcaacttgcttgccggcttgacaagcactacaaagcttatctttctcaaacttcacatctttcaagcccacaactagatcacattttgaaagtttgctcaattgattcatgccaacatgggctagcctcctatgccaaagccatcccaatgaagtttttgcaactaaacaatttttcaaatttgcttcactagaattgaaatcaaccaaataaagatttccatatctaaaacctttgaacacacaagacttgtcaagaaggctagaaacaataacttcttgtggcaagaaagcacatgacaagccaagatcacaaatttgagcaaccgaaagcaaattgaaacttagagatttaacaaaagagacattatcaattgacaaatcattggagatagcaattttacctaacccaattacctttcctttgctattgtcttcaaaagtcactttctcttgttcattccctcctacttcaaatgtggtgaacatagccctatcaccggtcatgtgttaagtgcatccactatcaagcatccaatggctctgtcacgcctagaaattcccgaatagaattccaagcagaatgtgcattaaaacccccgtccaggaccggccagggtacacaaacgacaaagttgacatacagatccacgtcttacaaatatcataaaagtcttacataaatgcagcggaaaattaaatgataactggagctaagccttgacttggactgcagcgggaacaccactccacatgcatcattgacggcacggacgaagcctactcttcggagaagccaccatctgacacgtactcaaactctggggtttgggagaaaatagagcaagactgagtactacccactgtactcagcaaatcataccggaataggggtatgatgcaggatataaccaaaggataggtagagcggttcatttgcataaagcgagcatttaaaaacagtagttgaaagcagtaaaacagttgtagtaactaatcaatattaatcatccactgtccaacgctacaccacgttgcgacaagcccaaccatccacctgaactaaccaattccattagactagactagggtgagactaatcacagtgaatctggttgatcgcccataaccgcgggcacgactattcgaatagttttactctgatcagaggtgtacaattgtacccacaacacacagccccacgacacgttaccgtgcgccgacatgccaccacgacataccggaaagaggccgtgacaggatctttcgcataaccccctctagccaagcacaccacacctcaggtttcacccccgtccgcagcgggcaacgggcagtcccctctcgtgcctaggtgaatctggaagcgacagaggccgtcgcagggcccgccccgctccatcacgcccacccttgcctggatgcgtcaactagaggaaagctacactacaagcccagccgttgcccacgctggcttgtggtaagtacgataagttcttccagggcatcccgcgaaccgatccttaagtgctatgggcgcgaccatcaaaaccatgcacccacagcccaccatttaatgcattttaattgactaacaccaggacggaggctttaatccaacaccaacactagaacctgaagtctatgcattaatgtgattcccccattgtgtgctagttgaactaagcatggctaagcaatccctagtccaatatctagtcatgttatatcccaagctaacaaaggagcatggtacaaaaatagcatggctgtacagtaggtatacatcccatagtaacattataaaacaatacagtatttaagggaaaacgatagaacatttgtaatatgggatcaacatgttcaagtgacaagcatgacttgccttgctctgctgctggtggaacctcggcgactatttcaaagtacaccggagcgtcgggagagccggaatctaatcaacatacaaagcaaacaatacaaacatgccataagactactgaaacagagaacaaaaccatttttaatggattctatgcatttttcttgatttactgagacttgcatgggtttaaacgaagctcggatgaattttctatgaattttagaagattcactgtgtttttactataaactgaaaaatccttaattgatttattgcgtaataaataaaatcctggggagagagaggggcggcgccgacatgcgggccccacatggcagtgactcgggtggcgatccgcggtggaccgggtccacagaccggggagggagcggcgcaccacgtggtgctgacgtggcgccgaagtggcgtacacgtggcagccacgcggcagccacgcgggcagccgaaccgacggcggcggggagcgcgcggccggcgcgcacaggcggctcaagctggcctggcagccatggcgtacagcggcgctaccgcgaggcggcggcggcagacggcggcgacccacggagagcggtggcgacgcgacgagcggcggcggcgcgatgcgacgactaggcagtggtgctaccagaggaaaagagagggggaagatggagggggtgtcctcatcgaagaggtccgaccggcgtggagggagacgacggtgaacggtggtgagactctacggagggaagtcgacaagcgacggacggggtccgggacgacctaagaaacaaaatgggagaagttagaggggaagagaaagatcaccgagggcaggaacgccggccaaaggcggcggccatggccgaacacaccggcgcacggtgcggagtgggtttcggcggcggaatccgacgggaggggagtggacggggtggcccgcacgacggcgaacgtgacggcgtcgacggcgcgactcggcgcagcggctagcgacggctagcggcggccggaacggtggcggcggcggtggaaagaagggcaacgacgctagggcggtagagtgcatgggagcgggcgattgcaaaacgaaaaagagagagggggaaacgggggtgctttatatcggctcacgagggtcgatcgtggccagggtggtcgcgatttcgccggcggagtggagagaggtggggaggagagagaggtgagattcaaaaattgaatcccggccgtctcgagcgcgggcgcgggcggaagagagagggagtgggcgcgggcggcgtcgtgggtgacgtggcccgggagacgcgggagcgagtggggcggcggttgcgggatacggcggcgccggttggaggtgggagacgggcccgacaagtgggccccacctgtcggcgacccgaagggaggagggaggcggccggctcggctgggccgtggccttcggccggcccaacggggagggggagaggaagagaatgggccggcggcccattcgaaaaagaaaaaggagggaaaagaaaagaaaaggaaggaaatgaatttcctaggattaaatattgcttgtgctcgattttaattggttaaaattatttctagagctctgaaaattccactaaaaatcttgttagcacatttcgacatgtagatctcaagaaaaattccacatgccaattccgactattattcgcattaatttatttagggtttctctcttgcttttacaccgatattttcttgaggccaattaaatattcaatttaggcttgggaaaagaacttcagggtgtgacaggctcccaccggtgcggtagttcacctacaaaagaagatcaagctcttttaggtaccaaacttgtttgggtctttggagattagagactaaagctttgggcacccaaatggcattctttttaccaccgagtataggggaatccacatatctagcaacaatgctaccatcataagccttcctaagcatataatgggaatcaaacatgcatgtcttagggggcttactaccggggcaatcattcaccaaatgcccaacctcacgacacttggagcaatacttaccattgctcttgacaaaacgagtggcacggtgagaaggtttcttacccttctttggaatgaatccaagtctctccttgttaaggatgcaccgttgctcactcaaaatcttgttaagagtgttcttacccttgaagcacctctccaaactcttgttgagcttagccacttgctccttaagcttattgttctcaacaacaagtgaggcatcacaaatagaaacacaagggctagagccagagctaggcatatccacaagatcattaaaagaggtagaaatgctagatgatgcaacatgagcaatatggcaagtagcactatcatcaagcaaatcacaagatatgccaacatcaatgagagctctatgttaagtagtggaaaggaggttgtcatgagcttccttaagcttctcatgagaaatggtgagtctctcatgagaagtctttagctcctcatacaagacctccaaagaagcatgatccttctttagatccttgaacttgacaatctccttctcactataagcatagagctcctcaaacatactcacaagctcatcataggaaacatcatcacaatcatcatcactcccaccatcactaagagatattaccttagaggagccctttgccatgagacaaagtggagcaaagagtgatggagcctccttgatggcaacaacggccatcttcttcttcttggagcttgcatcatcaccaccttcttcctcggacccggatgaggtggagctctcctcatttgagtctcattccccgatgaaggcctcaatcttcttgccttccttcttgagcttcttcctgagcttgtagcctccacttttcttcttggatgacttgtcttcatcatcatccttggaagtgcacttggaagcaaagtgtcctttctcaccacactcaaagcacctcaagttggagagagtcttcttgggtcttctatttcttctcctattggagttagagcctcttcctctctcctttctccttcccaagagatcattgaaccttctagcaagaagggcaatctcttcctccaagtcctcattggcttcatttaccttgcccttgcccttgtcttcaacttcggcttggagagcaatgcacttcttggaaggtgaggcttccttcatctcctccttcttcaacttgtacatgtcattggtgttgatcttccccaagaggcttgcgagtgtcatccttgacatgtcggagttgatgagcatggtgacaagggtctcatacttctccggtagaggtctaagcatcttttgggcaacctcaagatcgatgtagtttgccccaagccccttgagatcattcacaatgacattgagcctcccatacatgtcatttacactctcatgaggcaacatggagaatgtctcatattggatctttaggaaatgaagcttggcatccttgtactcgcttgtgccctcatggatctccgccaacttgttccaaatctcatatgcggtcttaaggttgctcactctatcgaactcctcttggctcaaagagttgaacaaagcattcatagcttgggcattgagttggaggttgtggtgatcaatctccgtcaagggcgtgtcggtgatagtaaagcctacatccacaatactccaaatatggaaactcatagctttgaggtgagtagacattttaattttccaagtggagtagtttgtgccattaaacatgggagccttccctacatggttcacctcgttcgacatcttctctctaggcggtaaagcccaatcaagagagaccaagctctgataccacttgtaggatcgagatgtcgactagaggggggtgaataggcgatttaaaactaaatgacacctaatcaaaactaacctaagttactaggcttggtgagggtcaactctaactaagaaactaagttatgttttgcaaacctagggtgatagtagctcaattatatctttagggatgtaagtcacactcctatgtcaatgtttagcaatcctagggtgatatgatctcaagtatgtctctagaaatgtaaattgcacaaatgtaaatgcgacaatcaaatgagacaaggagacaagagatttttcactgaggttcagaaactcgccggtttcctactccccgtcgaggcgagcccaactccacctctcaaccacgaagccactgcacgcccccttcgtcaaggggtgggcaaggcgggagccggcccacggagaggactacccaagcctcgatcactaggatagttcttccttcactccgaaggtggtgaactccaaaccactcacaaaccggcgccgagcctcctccacaatcttctcggagaagtcaccgggcaactcctccacaagccgtctaggaggcggctaacaagcaatgacccggcgtggagatgatcaatcaagtgccacactagctctacaaatggaagcaatgcacttgactcttggctaatcaacactcttaacacactaggggctgcaggaat

SEQ ID NO: 17917 - DNA, 7673 bp, Oryza sativa
cctgcagcccccgcgtccaaacgcgtgctggactgagcaagctctcaccaatgtgggagggtccgtatcgagtgatcggcgtcccccggccgggctccgtacggctggccacgggcgacggcactgagctgccgaacccgtggaacatcgaacaccttcgtcgcttctacccctgaggggggggtcgggtgtcaggtttcgggctcgggctaaccacgcacctccctcgggtgtgcagggttagccgggggctaccacacatgcacaaccttacttttcttatttcagcatttcaataaaagcagtttcaatttcctaaaggttgtgtctgtgccgtttttccttctaaagaatcttaacttgaaataaggtcactcgtgctcaaccttgccctcgggggctcggttcggtcagctaaaatcgccaagcggggcccagaaccgagccgtgccccggggcgtggtgaactccgggggggaatcggcaaaaacccacaatcgggtcacccataaccctcggtcaccatgttcccggcctggccagtctcgacatgtggatctccccaggcactagccccgacccgagccatttgaggatcgggacttgagcacgagcccttaaatcaagctaaaatgcaaaaggaccacggcacaaatcatcctcaactcatatgcataacaaaacaaagttaacatagaaatttttcatcatttttgattgcagattaagttgatctatacaaaaagaagaaagaaaaagaaaaaattggagattggcgggggcctgggggctcattccaatgcgcccgggtcgctggcctcgtcgccaccgtcgtcctcgccgctggcgtcgccctcctcgtcggagctgggggcgaacgcgagccgaggggccgacccctcgaagctttggacgatgtggttggcggcatcccggacccacgcgcgcgcatcgtcctcggtcccgggagggaactcctccagcgccatccatggggagaagccggggtccctgacctggtaactcgctaacacgagttccaccgctccttgggcgaggtccctcgaggatgacttgatggtcttctcgagctcctcggggagttgttggacagcccaggccatcctcctaaggtgcggggcgaggccttccagattggtggagcgcgaaattgtctggcctttccagaggcccgcttcccgaccggcgcgatccagccgggagactgcatcccaaagcatgccgggccctatctcacccgacaagcggagggcctcggcttccccggtggatgagtctagggcgcgctgcatgtccgcgacgttgtgttcggcagctgcgaggcgggcgactaagtcgctttcgcccgtagccgccccgccgctgcgcttcctcgcatccagctccttttctcgcgcctcgaggttagcagcctgctgctccagcgcggctctctcggcgcggatgcattccagattgcggcgcgcctgctcctcctgcgctgcctcgcggagggacaggctgtccgccagccgttgtgtcgcggcctcggactcctcaagagctcgctcccgctcagcaagcgcgtcctcgcggagccggagcgcggactcctcttcggcgcaggcggcctcgtgcgccgccagcgtcgcctcccggatagcggcggcggcctcgcggtccgccaagctggtctccacggcgccggcatgatcctccagcgccatggcacgggcttcaagggcctcttcgcgccgccgggacgccgcttcagcctccgttgctcgctgctctcgggcagcggcggcgtcgaggaccccctgggcggcgtcgagctttttctttagctccgcctcccagctcccgtgttgaaggcggagggagtcctgcgcctcaatcatcgcggtggtggcgacgagggcggcctctcgctcttcctccacctctcgggcgatctccgccagtgccgccttgcgggcttcaagctccgagatgtggcggcggtgagccttacggcccacctccaccatggcgtccaccgagcgccgcccctcctcgacgcgcgcccatgcggcctcgagctccgctcgttccgctcgcaaggcctccacctgggcgctgaatccatctagcacctcggtgtttgcggcggccaaggcttgcagaaggggctcggcactcagcggggtggcagaagacgaggagaagagccgccttggagaaaatgcgacgcggctcggcccgccagaagacgcactgagctcggggatgtcccccggacccgtttggtcctgggcgtcgcccgagggagcgggcccaggcgatgcgcccgcggccttgtcgcaagccgccccggaggttgtcgcctgagcgtcgcccgagggagcgggcccaggcgatgcgcccgcggccttgtcgcaagccgccccggaggttgtcgcctgagcgtcacccgagggagtgggcccgagcgacgcgccggcggtcttgtcgtaaaccgcctcggaagacgccatcgcctccgcctggcgagcccgggcggtttcctcccgggtgacttcttcagcttggcgagcccgggcggcctcctcccgagcggtatcctccgcctgccgaacccgagcggcctcccgggcggcctcttcagcttcccgaaggcgatctgcggcctctcgccggtcagattctcgcctccgttcctctgcggccgccggatcttcggcctcggattgaccggacttgggatggcgggagggacgcgacgggacatcgctgaagcagaagaaaaaaccagaaggcaaacaagatgggtaaggtaaaacttgcttttgggatagaagaaaagacggtcgcaaagagagcgggacgaacctgcgagggggtcggttaaatgaccaccttggaggggaaattaggtttccctgggatggttctgtctcccccatcttgcgcagccgtttcttcttgcgctccccctcgggctgcgatgttggcgcggccccctccgggcgcctgctgctggcacgcgccgccccgccccctcggggaggagatgggggaggtgttcctcccagtttcctcttcccccgggcgtcggtagggcggttgctccccgagcccccgacgcggggcccagaagcacgaccccctccgggggtagattgatccccccgacggctcccacctgcgccgccatggcccttaggagcctgctcctctgaggccccgaccgccgtcataatggtcaagatggagacgcgatctgggtcgctgcagagggggaggataccgtgggggatgagggacgcctccacggagttgagatttagcacccgttggatcagtatcttgaagtcctcgggggcccaatcccatctgaccccctggtgggtccgcatatagtcttcgggcccgatgtactcccaggcggcccgagcgcgccgctggagcggcgcaatccgacgacggaggtagtcgccgtacaccatggccccggtgagcccctgggatcgcaggcccgcgaggcgatcgaggacggcgtcatagccatcccccagatctaccggcgcccgccagctggaggcctgcaccgggggctggctcggaagtcggagatgcgcttcgtcggcgaggggggtgtagaaccagtcgctcttccagtcatcccactttttgcggaggacgcaggggatgtagcggttcaacaccggcccccgcggcaggaagtagcagccgccgaccaccgacggcggcgacaccgactgcacggtgaagaaccaccggaacagccgaagagatgggcgcaccccaatgaacatctcgcacaggtgcgcgaagatggccaaagtcatcactgcgttgggggtgaggtgcgccatctgaagatcgtagaactccagaacatccataaagaaagaagaaaaaggaggaaccaacccggccattgcgaaggggagaaagaagacggaccgccccgggtagtctggcgccgggcgtccctcacccagcattactatctcacggccggtggcggattccggcatgaagcggcgcggcagcccagcctgcctctcgctcacaatgcgggaaggcggtagtacgctaccgtcgagcagagcggagccccgtgccatgtcgtcggagaaagagagggttgagaacgagtgtgtgtggcgaaggtgaggcgcagcaaagagagagttaggggcgcaaacggcgaaggaaaggggaatagtggcgaaaggaagggagcaagtcctttcctcgatagctttatacccttgccatcgctgagcccggctcctcgtttctcgtgcccactatctcgctccctcgttactcgctatctcgctccctcgtttctcgcgcccacgcttccactaattccattcgcccgcttgcggcgcataaggtagatatgcggttgtggcagtcgagatagatcgtatcgtgtgtgcgttaattacgctcgctgaccgaagtgacgttaccatatctccagacgaaacgaatctacacgcccagattcgagcgctgctcaagtgatgtggcagtcttgaagagaccgcccatgactgacggccaagacaccgttaccgatatgcgtggtttgagaccgttgggtttctgcccaatcacggagaccggtcccacctgtcaccaggctttatgagtggcgtcatgcccgaccgcttcccttgagaaggatgattgccctgacataacgccgggggctactgtcggtgatatgggaccgggagtattgcgcccggaggcttgaggcagatggaatcgcccacgtggcctggcaccttcggggacgtcgggcccgagggtgaggtgtccgccctcctcctgatttccccgagggggggtcgggtggctcctgccccgaccctgagggccgaggtgccccgaccccctgtggggtttgcactatgtacataggttgggtgaacacggtagggctcacctaaccgcatttattgcggtctggtcaagcgtgtcacgttgcatgcagcgcaatgcagcgcgctcttttatccggtctgtgaccagtcacagaccggtcggatcaacggttaggtggcgactggtggtctgacgcacgcctcgccccgtcccgtcaagacgagagcctttaggcacacgtctccagccggagctagcgtgttacctcttagagatggcacgttagccctggttagatgaataccaggcttcatcccaaccattacaggcaagatgctacaaaaagaagggtgatcatgcagatcgctgaactgacgcatagaggacaagaatgaccgatctgtgaccggtctgacactggtcgcgtcagcaacagacagccacgatcccacgttgcgcctgtctccgccgggagtggaggtaggtgtgggctgtcccatcgaaatgtcattcggacggcaaccataccaatctccgtccataaagagaagaaaagtccagtttggaaaggaaagggtacatgtggtatccccttaagatataaaaggaggaccatgcccacaaagagagggggctggattttcccgggagaggagagggctggttgattttttgtaacttgctcttacacagatccaccaaaaacacaggagtagggtattacgcttcccagcggcccgaacctgtatacatcgtccgtgtctcgcgtttcttcctggcacgcgatctttccacacacagagagagcttgagatctcaccctaagcccccggccgaactggcaaaggggggcctgcgcggtctcccggtgaggagccccgagctccgtcaaaccgggactaaagatcaaaatttttataacctggactaaaaacaatctttagtcccggttctttttgatccgggactattgtgaattttgccggaccgatcaaagatggtttcttcaccagtgtaacatactcagggtttgtcttttttttttttacggagagagtacgctaaaaagataaaaatcaaggataaagcgctgatatgactagctttatattgaaagcatacatgtatgtgtaaacagtggtgaacatcggctttcaaaatccagtgagtgaagtcaagtgtccactcatatgcttcccccgcagggaacacgatcttaattgcaaccatttgctgagctactaagagcagtacaatagcaggttattagccagctataaacctattttaatgagataaaatatgagagagaagagcagcgggctacagatctgtagccagctgcagcgcggactccaagacgctatgtgtgtatgacaggtgtgaccatatattaatagtatagtaagtaattattgtataaattagctattagattggctataaataaattggagctagtagtgaactatactattaaacttgctctaatacacggatagctcaagttatttgtagtttttatattttaaggcttaactccaagcacgtattcgtatactgacatctggtttgaagttaactggctaactgcctcttttcttctgtcacttctcgtttctacgatggaaaactctgcctacagatatgcatgcatttcgtccaggcacatctttatcctctcatcttttgctattattccaaatgatcaaaagccctggagctattattggtgaagtgaatcctccgatggttacaccacggaatggattggccgctcactcaaccagccacgccacctgaccacctgttacgttgcaccagctgtaaccggtgaagaaaaggtaaattttggccaaaagcgacgccagtagaatttacaccgttccgtggataaacaaaggcatctgatttcgcaaccgaagacagaaaacgaatcgctatcagcacgggagccacacgccatggcgatgctgcacgttgccgtcactctcgctcccagtcaaccgagccgcgacgatagcgtttttcccgcgagggcacgaggcgggggccgcgttgctcgccacttcgtccggctaaattcggagccgagaattagccgggcgaagcgggtgggcgggccagaaaaaacgaagaattccggccgcgtttctggcagcccgcacgaccagcagatggcggtcggtgtcctcgtcgtcgtcgtcgtgatcgcgcgcctgcccggtggtgccgtggtggctggtcgtttcccagcgacgtacgggttcagcgaacgtgttttgccgcccaggccagatgcgttgcgtcctgccttggtaggggtcctaggggagtaggactcgtcggccaaaagcttgacgcccatgactcgtcaactccacgctcttcgcctgtttctggtatggaagcagatcaagctagtcagtagggcggtcgagacggtgccgatgatcttcattatggtcttttcttatggttgagcagcttcaattcccacgagctggtactagtagttcatttgcacacgatgctatggtcgagtcgagtatggctttggtctaaaacgctttctttgccatgtgtggttggaatttccacccctaaattagcttggtttggcgacttgatctaaaaccacgtcacgtcgcgaggaccgaaaggacacacatggctctgtccccatccacaacgcttggctaggaacacccacgatccggacaaggaccattatcgcctgacataatctgggctgcaggaat

SEQ ID NO: 17918 - DNA, 1884 bp, Oryza sativa
agaagccaagggagagaaagaaaataaaatagcagaagaaaatgagagcaaagacagccgcatctgtgcagcagcgcggcgacgtcgtggagagcgacatgcgagcacgagaaaagccggcggtcgtctggcccgtccgtcgtggtggtcagtcaggcaggcagtcgcgcacacacgccgacgaacggcgtggctcctgttcccggacgcgccgctgcagcgatgcgcgcccgagttattttcgttttatctgtctcaccgctgcgtctacgtgttgggtttagcgcgcgacgtgtcacgctggccggttcccgcacgggacacgcacttggcgcgtagccgattcaagcccgacgcgtgtcctcgtttcgggaacttgcaggcacgttgtcacgtactactataggttttcccggtctagcagcccagtttttctacggcctcgaccttttttatgcgagaatgtctttgctttgttcagaaatggcaacggaaattgttcccccgcttttgcttttgtccggaggatgagttccgtgggaaatggatgtttaatactttaaccccgttattagccgctagtttttggagccgtttttatcttttcctgtgatccgttgttggcatctgatgaactgctggagaaaaaccttttcaatgcaagttgaaaaggagcctttcagatcaagaagaaccgcagatagccacctgtcctctgccgctgtctctgccacttcgattggataaaccaacagtcagaagtttattgacagctgttaccgtcggccccacatgtcagcggccacgaaccagccgagatgaggataagatcagacataacggggcatccttggaacagaatccgggaaagccatgtgggagtggccactggcctggccagcaccgcctttaaggcgtgcgggggccacgtaagtgggaccacctttgtcagtgtcacatgcgcaacctcccggtccgtgtgccatgttaggtaaccgcgcgccacgctcgccggcaaacgtgacgcgaggcggatcgtccgttcgcgcaatcgcgcacgcgcgcaccgttgcctccgctctttctttctttttttttttgcggcaaattccgcatgctacgttgcgttttttgttggtcaaacggacgcgcgccgtgccggtgccgcgttcgaaagcgagcgggttgttgggtgcgcggcgcgttattccgttcctcccgtatataacacgcgccacccccgcaccaccgccgctgcaaaggccagcgcccagcgagagacagccaccgccaccggagcagctgcgttttcagctacttttccgtgccgttttctgttggggggatcgcgttcgccgacgagatgagcagcagcaggctcggcgggggagatcgggcggggatgtacgaggagggggaggacgacgagctgttcggggagtcgtcgtcggtgtccggcggcgagtcggacgacgatggggaaggggaggaccagttctcggagggcggcgcggcggcggcggcggcgttggaccagatggagcaccgccggttcgcgccgcagccgctgcggcggttgaactcggacagcatctacgacatgtcgtccatgacggagcagctcccagccaagtgagtacccgtcgagaaaccctcgattccatccagaaatctcaactcttctgtcctgtgtgctcaccgtccaagaacaccgtgttaatctgcaggaaagggttgtccaggtactacgaggggaagtcccagtcgttcgcgtgcatgtcggaggtgaggtgcctggaggatctgcgcaagaaggagaagccatacaagtcgaagatcaagtcgtgcaacagctacgccgcgctgggagggatcgccaagacg

SEQ ID NO: 17919 - DNA, 2701 bp, Oryza sativa
cacttccactgatacagtgtcactgctagcatcggcataagtttcgtatccctcgagatcttcctctgttactacgactgcatcgatggacctgctggggcttgaaggcttggctagcataccttcccataacggcaaaacaaaatgctcgttgtcgaattcggtggtgaacccatcaacttcagcctccacaatagcttcacttgattgttcactgaatcttactgggtgggtgcggtttgaactctgaatttgatggcagctggaagcgaggcactaaatggttcactcgattcttcacaagattttgccgagtgagtttggtttgagttctcgattgaaaggcatctggtgttgagattgctaaataatttaacagcctgtagcaaagaagaaacgaacaagaaaatttatcagaaacttcagggatctaattatatggaccagagcagtgtttatcaattcgtcattcaactagcacacgaaagcataagagattaagtgggttgcatgcctgccattgagatggtgctaaaagtactctgggccttacagaccgtgcatgatctaaagcagcttcaggagtcatgttcctgtacttaatctgcaagttacaccaaagataagatgccatatatgaaacaaataaaaataatgcatacaataaacatcacatgattaatgcagtttctcataccaaatagcataaaactatagtggtgcttcgtccccttccagccttacaatgtacataagtgctaccaccttgtgatgcatttcctggagaagaaaaaaaaaacatatgcataaatccaatttctagtgtaactcagagttgttgttcaaatgatggttacaattctgtccaatcaaacgaatttactttgggggcttatcatcagacatcaatatgcaagacaacagaaatgtcaaaggattttattactcgaataaagaatggttgcgaaagtcaaaaggaaaagtattgctcaaataaaatcaaatacttgagaatgattgcgacacattgacatgatttaataagatatctttcctgctcataaaaatgatttgaatactaccaaagttcaactgcagtgcccaccttaattcacttaatcatcatcaaagcaaactggtgctgataatatggtttagaacgcatggtggatggtacttacggtgaataaaatcgacagcttgacagatatcctctagagaaggggcaaatagatagtccctcgtgggaatctcgagatgattgatcccgtgagcctgataaagagaggaaaaaacttcttattgttcagaacaaaatttgatacaagcctgcttatgccaagtgtcatgccgtgatgccgattacaccatgtatattgagttaaagaaaggatatagaaaatggccacagcttgtttgccctgatattttgaatgtacatatagaatatgaatggtaaagatgcacgagacaagtggatcctggtgtatgaactatatatattgaacttcaagtatggggcttaactgttcacagatgaaaacaagaacagtagataaaaatatgcacgcacaaagatcttgatacatgccaagaaaatctgcagctacaaaatcaggtgaaggtatttatttacctggtataaggatgttggaaccagagtttcatacgattcattcagtgtgacaacgccccttactccaagttgcttgagatgcggtacatcactagagaaagggacagcacctagcaaaacatactggagatgggaggtgggaagaaaatcagtacacaccatccaatgaacagaagatcaccatattgtttgatgaactgttcaaattatcagatactagtttaaaactgcatgcatcgtgcatggatggtagacagagctaccaatgaaagtgtgaaatataaattggaaaggattcctatatgtgatcagtagctgggcaaattactcatattggtcataccatagctctagacctcaataggatcactaatcaaaatccctataaccatccttcaagagtaatcacaagcgtaagtgatacaaacataacacatgcgaatctacatgatattggtacaattcagaatgttgatttgctcgaaagtgtagtattggacccaaaaaatcagccgcaggccacatactgtgaatttacaacctgcttatcaagcattggagggtaacaaagcaagcacaatgaatcaactctgctcaaggacctggaactatgcctacactgatcgtccccaatatccatgagtgaaattaaagcaccaaatcgctccagaacgacaaggtgcagtatattgggagagagatgagggtaagattaacacacctggtcgatgcgatcccaccaccggaactcagactcgaaccggttgcggaggacgttgtagagcagcgtcgggtagaacagcaccctcgcgccggcgccgacgagcgcgcgcttcgccctcagccgcacgacggcgaccacctcgcccccgcctccgcccccgcccccgcccctcgcctcctcccgctcgtcctcctccgcctcctccgatcccccggcgccatcccgcagctcccgtatcctcatggccgcaacaatcgggagcgcaccaaaccctagaagccgactcgcctcgtggaattctcctcctgcaccgctggattttggggattttgggttggaat

SEQ ID NO: 17920 - DNA, 698 bp, Oryza sativa
tcctgcagccccgcacaatggattttgaacattggtgatggcaaaacaacatcagcggatggagaggaatggatagaaatacctgatgacctgatactgaagaaaggaggtgatccaaaggaagaaattgtgaagagcatatatccaaacttggtacagaattataagaaacgagatttcttagaacagcgagcaattctatgcccaagaaatgagacagcgagggaaattaatgaatttataatgaacatgatagaaggagaggagataacatatctgagctgcgacactgtatgcaaagcaacaactaatgacagtgaaaccgatgtcctatatccaacagaatttctaaatagtctaaacttccctggaatgccaaaccatgtgctgaaactgaaagtaggccttccagtgatgctactgcgaaacattaatcaaagttcagggttatgtaatggtacacgaatgaccattactcagctcgggaaaagattcattgaagcacagatcataacaggaacacatgtaggagaaaaggtatatatccctagaataataatgacgccaacagagtcaggatggcccttcttgctaaaaagaagacaatatccactcagtgtgtgcttcgctatgaccatcaataaaagccaaggacagtctctaaacatggtaggactatatctgcctaagcaagtatt

SEQ ID NO: 17921 - DNA, 702 bp, Oryza sativa
cctgcagcccccatagttatgcatgtcaacaagttgggttggcgatgttttaccctccatataggtctttgacccttcatctagcaagctgaaaaacgacccaactctaacaactaatttcaactcattgtgatttgtcctacaaatcatagcaacaaaaatatacatttagctaattgttgcatgttacctgtcgatgatatgggcccgggggtatcaggtttagagggaggaggccgccccccgataccacgtggccctcccccgaggggagtcaggcccaaggtggggtggcggccactccttcctcaaagactagtcggaggaggctgccccccgattccacgtggccactccttccccaaagactagtcggaggaggctgcccccccgatgccacgtggccctcccccgaggggagtcaggcccgaggtagggtggcggccactccttcccagagactggatggaggaggctgccctccaatgccacgtggccctcccccgaggggggtcgggcccgaggtagggcggcggccactccctggccgagactagagggagaaggccgccccaggtgccacgtggctccccccagaggggggatcgggcccgagttcgggcggcgaccgccccctcccgtgactagggttcgggctcccccgaccccctctctaggtcaccacgtacagtgggttaggtg

SEQ ID NO: 17922 - DNA, 730 bp, Oryza sativa
attgcagcagccgccgctcgccgcgccctccgccttgatgacacagagccggtggtggcggcgccggaggtcctggtagtggcggaccgtccaccagcacccaggcgctgctgtgccgtcatgaccaagttggccacgtcgtccagccatcgctgggctggagactccgggtcagggacgacaggcgggtgacgtaggagcgcgccaacagcctgaagcgcgccctgaggcgtgctgccgtcgccgtagacgaggaggcgacgctccccatctcgccgttctcctgcaccacccgcgactggcgatgctgcggatttttcgactctctcgagcgcctccccccgcttgggactttggcgcggaggaggtgggggagtacgagctcgatggcgcgggtttggctccccgtcgtcgccgctcacactcggagagaggtcgtgcgcctttgcttgctcggccattaggctgaacaagggaaacttggcccacacggaagagtatgagagctcagaaaacacacgctgagccccctacctggcgcgccagatgacggagctcggggctcctcaccgggagaccgcgcaggcccccctttgccagttcggccgggggcttagggtgagatctcaagctctctctgtgtgtggaaagatcgcgtgccaggaagaaacgcgagacacggacgatgtatacaggttcgggccgctgggaagcgtaataccctactcct

SEQ ID NO: 17923 - DNA, 927 bp, Oryza sativa
aaaaataaagactattgaaagaaaagaccatctaaaacacatgacgagattaattaagtaataagcatataaatgagtatagtggtggcggttgatgggacatgtaaaaattattaataaaacaccaaatataatcttaatgacgattaaaatgaatgatgatggataggtcgtaaagcaaccggttaaggcggttggcgggacttatagaaagtcgaaaaataaaccccaatgataattatatttaatttttaaaatctcaatgacaataaaaatgataggcaacgggcgggtcgtacagtagtacaatggcagagccggcaatagttgatgggacttctagaaagtaaaaaaatgaattccaacgatagttatgttcgattttacgaatcccaacaacaataaaaaataagcggcggatgggtatagtggcaacgtttaacgatatttctaaaaattataaaaaataaaatccaacgagtcaataaaccctaaaaactataaggtccaattttaaaaggttcgggcttctaaaaagttttaaaaaataaactccaatgataattatgtttgattttaaaatctcaatgacaataaagaagggaggcagcgggcgagccgtagaggagtacagcgacaaatccacgaacattttggcggaacttctataaagtagaaagaacctaaacgataattatattcgattttgaaaataccgaagatgcagcagactggccgtagaggagtataatgacaacgtttgacagaacttataaaaaaaatctaaatacgaaacccaacgagacaataaactctaaaaactataagatccaatttttaaaggttacaaggagaatgaataggaacagtggaagaccgagcaagcaaataaaaaaggatatgacagaagtaagggatagtaagtgg

SEQ ID NO: 17924 - DNA, 5243 bp, Oryza sativa
acggcggttaacacagcgaacagctcctcgccatcgcgatgatcctcatcggtgcggaagaacctggcaatgcagaacttgccggagcccaggttcacgaggtccgagctgacaagattgagggcgtctggcggtgtgaactccataggaaagctgcgaagcagcggcagctcgccgccatcaaggtccagagcggagagcaccaagctcctcttcctcctgtctctggtgctgtgtgagaggccaaaccaaaggccgtgctcatggcaatactcggcgagaccaacaaatggcagcgtccatcttgtggccactgtgctccacgcatggcgcaccgtgtcgaagcagtagatgccgccattgtcgtgcgtggataaccagatgtccgtgccaccgatcacagcgtaggagtcgacttcgaagtcggacagcggcggcggcgggagcgcgcagcagcgccaatcctcgttcaatccatcctcatagatgagcccatggaagcttccaccgtcgtcgacatcgaggatgtagaggtcgtcgccgacggtgacagaggtggcaggcaatgtcacctggtaggggagggcgggcatggtgcggacggcgtgctcgccggggtcgtagaggacggtgcggcagctctggtcggcggcgaccaccatgttgtggttgcctccaaggaggaagaactccatgttctggttcccggacaagctggaggagggagggtagaaggtcatggccgggcatggcaggctgccgtactccaccgcgtcggcggcggcggcggcggatggcaccggagatggacgtgggaggaagaagcggtccatgtctatgttccgcagcgtgtagttgctgcggcgtggggcgaactcctccagcaccagatgaacaaaccgacgaacactcatcgtcgatcgatcggatgaatcgatgatcgtccccaaaatgaagtaatcttactaaagattgattggattgattggattggattgctctggatcttcttctcccccaccacgaataactagggttttcacgaagccaaacgatctttctcgttgcaaagcgacttatccgattcggttacgcggagtggagatcatgcgggcgccctgatcatacgatctatctctatataaaccgagctgccgccttcacgcaacacacgcgaaatcaatctagggtttgcctcctactctgtgctgcacctgatcaagcgatctatctctatataaaccgagccgccgccttcacgcaacacacgcaaaatcaatctagggtttgcctcctactctgtgctgcgccatcgctcgtagactactccatcccactcgccggtgtgcaccggcgatcgggagagtagatctccggaacaatctacggtttgcctcctactctgtgctgcgccatcgctcatagactactccatcccgctcgccggtgtgcaccggcgatcgggagagcagatctccggaacctctgccttcgacgtcatgcaccgggagaaggcggaaataaggtttttgggaagcgcttcgcgcgactgctccctgttcgtccgcgatggctcgccttcctcttcgctcgcgtgctgcgcaccttcgtcgacgcctgcaaccgcgagtagtccctgccgagcaaccggtctttccgccacctcggtacgtgttcgacatgttgcgcatatttgatctgttcatattttactgtttagtttacatatgtagacctaatgatgcgttcatgctagtttatatctgcaatgtcatgatttatttatggaataaattaaatcattatgtgcttataatttcaacataagcgaatcggatagtcaccggcggcggacagatgatgggaagggaatggcggaggaagatggagtggagagaggggaggaggagttggccaccgacgaggtccactctggtggcggcggagaagaggggtgagtgcgggggcgtccgggggacgcggcgggtgggaagggaggaaggcgagggcgtgtgatctggacgtgaataatatttaaagctatgtgtgaactgtagataattataactagaggactgctacaccacggactcccgtcctaacgggataacttaatgaggattattgtttgaccaatcaaccacttctgtcaatctatccacttcacgtaattccatacaagggtcaaagcgtcagtgtatgttcacataatcacgtgagagtctacaggcttatggttgtctttcagtctttcactagagacacaacacactaggtactcgatacttaggtggtaccaggtaccggataccccatatatcataatatctagtactgggtatggtacctttaggtatcaggctggtctaggtaccaggtatatgatacctaggtacccaacgtactcagatggtaccaggtaccgaataccccatgtaccatgatatcttagtactaggtatggtacctttagatatcaggctggtctaggtaccaggtatctgataccccaggtactcgatgccctataccagatctggtacctatgggattcatgccgatctaggtaccaggtaccttgctaccccaggtatcaggctggtctagataccagatatctgataccctaggtacccaatgcccagtaccaaatatggcacctatgggattcatgccgatctaggtaccaggtaccttgctaccccaggtatcaggctggtttaggtaccaggtatatgataccccaggtacccgatgcccagtaccagatctggtacctatgggattcatgccgatctaggtaccaggtaccttgctaccctaggtatcaggcctgatacctatgatatcagtcgaaacaatctgggtaccagttacatgatacctatgtattagaaactcgatacctaagcattaggtatcttgtgggtatcaagcatgtttcatggatattaggccctcatgccgatgggagctatgagaaaaagggaaaagagacgaggcaagcacaaaaataagatggctatcttccttggaggtggaagaacactattccttcttgttgccatccttgattcggatcgccgctgctacatcctcgacacgcatgtgaccatgatggttatggacatcgcctgtgacagtaggacggacacctcaatctctcctcctagctcgaactcattgaagctcttcctaagcacctagtacacgagagttcccatgaccaccatcaacgatgtgatgttccgcacaacgagagctaacaccgctctggtcttgtcgcagggcttgcagtgagtacttgcccagccacattaattaggaatgaagagaggagttagagagggagagaggcgtagaggaggagaggcgaaggaggaggacgaccaagcaaagctccgggagagagaggtagaaagggaacagataagattggatatcgtttcacttctcccgttcctacggcattccgttggctagtttttctgttataactatttttagacgacatacggtgctcagtgaaaatatacggtgcttctctaaacttgctttccgatgattaataatcagctgtaatcaaagctgttagcacccaatggagtacaatatattgctgatgagcttatacatcagagacctgtgcatcgccgtcgtcgcagagctccacctcgacggcggtgaacaccacgaacagctccgggccatcacggtgttcgtcgtcggtctccaagaacctggcgatgcaggaacctgccgacgaggtctgagccgacgggattgagcgcgccgggcagcgtgtaatcccgaggaagaaggctgcgaccacaccggcggcttgccggcgtcaaggtccgtggcagagagaggaccatgccactgccatcactagccggtgagaggccgtgctccgggacgtactcggcgaggccgccgatcgaacggcagcgtccagtcgtcggcggcgcgccgtgtcgaagcggtaggtgccgtctccgccgccgaccaggagtcgggttggaagggaggcggcgggagagcacggtagcgctagtcctcgccgccgtggtcatcgtaggcgtagatgagcccatggaagcaaccaccggcgaccggcgaatccgaggcgttgaggcaggtcgggaaggcagaatccgaatccgaatgaggacggtgtgctcgccggtgtcgacggcgcggcgagtctggtcgactcatcgccgatcgattgaccatttgacctccaagattgtttatctggcatcctggccccgcctgccatagactcatcggtctctggccccacctgtcatagactcatccgcttctctctgctcgttagttgccttcgtcctcctgccgcctcgggtgttcttccttcctccatcgccatggcggcggcggcggcttcccaccgcgtgttcgtctacgggacgctaatggcggaggaggtggtgcgcgtcctcatcggccgctcgccgtcctcctccccggccgtcctcccaaaccagtccgtccacgagacatctgtttcttcttcttcttcttgccaagaatcccctcctctctgctgcgaaattctgatcggccaccgtctcctgcagccagaggttcagcatcaaggggcgcgtttacccggcgattcttcccgtcgacggcaaggaggtctcagggaaggtaagcccctcttgcttcctctctcggttaggcaatcaaagattcaagaaagctgaagagtcaagtgaagagaaaaatcacaagtgcttgttgctaaatcagcatgtggagaaaattaaggccagttaatctgtactcttcttttatgtatgttgtgcaggttttcaagggcatcactgacagggagctcaatgtgctggatatatttgaagatgaggagtatgtcaagagaaccgttgagatatcactaactgtaagcctatctctactatgtacttagcaaattccgattgtttagattgcctgaaattgctgcttcagcagtctgtcatgctgtactgaaattctgaatgttcagcaagattggaccctgtgtcttgaaggagaaatgttttgattagcttcttcttttcatcatatggcttcagtaagatgggatggtttggattttcaggacacatcggagaaattgcttgcttatgcatacatttggggcaatcaggatgatcctgacctctatggtgaatgggactttgaggtgaggatgtttcctttttttaaaa

SEQ ID NO: 17925 - DNA, 2132 bp, Oryza sativa
caatcagtcatcaatcatttaacatagacgtgaatcagttggtcaaattcgaacctgaatagaaatggcatgtcagatcttttggttaattatagagcacacactcaagaactggtagacttatactccatggtcaattagctgtgtagaatgtttactgacttttgagccctgctcattcattgctcttctctcttctgctgtcaacttctttgaatcttctgttgtcgaattgtgatgtcctcggtacctttaattcctgtgcaatgtgttatctgtaggaatggaaaagggtgcacttggaggattatgtcaagatgacacaagagttcatggaggaactggaacagctcgaaccaaagaccgagacctgaagctcaacactcattcgtccagaaggattcactcaacaatgaattgtatgtgcattgtcaaatggttctcctcttgtttgtaaataagatgtttacaccattaattgatagacaacagttacagaattcgcagtggtttcaattttagtgcttataagcttgagtgcaaatacatataatttctgtgcttttgaatcagtccatattttacatgtgatgatgtgaaacaaactatcttcaattcagaaattgattgattggcagagaagatgacaggataaagaaggaaaggtgcagaatatttgctatagtggtttctaatctgggtctgatcttaatagaggcttgaacaaccccaagaacagttagggcaaatgttttctctaaaatacactatcttaaatttcgcctaaaccctgtctcaactcgttaacagctctaggtaagttccattcttatctctaactttttgcaaatgcaaaaactacacaatatatcaaaagaggaaaagaaatattctgaggagcatttgccctcccagctataagctgacactctacactgaattcggcgcatagccttttaggccacggatttgatgatagttatgctgggtttttgtagccattgcatctcttctgatcccattctgaattcataatggacgcaaaataagacagggatgtcaaatatttcatatgtgaatgaacctctaagtcaggtcattcgaattgatcatacgggccgatggaagggttcccggggttctggtcacagcgaggcctccaaccattcaccccatctgagctgctgcaagcctggttggggaggacattgctccccagatcaccatccaagctcatctgttgcacttcttgaggtgatagaatcctaatgcatcttacacagttcacaaactccctacataatccgcaacagctcatattagaataactaaccagtaaaatctttcatcgaatagttcacttgcacatcttgtacacgcattgtttttcagtttatgaataaacatatttttctgtcatattatcatgctggattaaccatatttcactctggtaaacatatctttagctgtcaattttagcaatctttattatcttggggcctattttagagcaggaaattaaaggttcacataaggagaaagatagatatacttactcccatgggtcatcaccaagaagcaggatgtcatcctcgtgatccttgtagaccagtttccagcctattctctgtcgatcttcaagttgaccctctataccaaacatgcgagccaaagcatgcttcaactcttcatatccagagtacctgccgatgtcaatagaccggcctacagctcctcgtttgtacacctataattcttagattaggcttactagcatacgagccacaaaaacacacatcttgaatgctacaccatcataacctaagctaaggaaaagccaataccttggtgaatgtccgcattctctgcagcagaggggcagcgggccaggaatttttgttcaagaaggcaccatcattgatcgcagaatcaatggaattaaaagccatatccgactgaccaaatgactgggaaaccatggaggttgatatttcttgcagagcatccttttgcatcgggtagttgttttcaacatcagttgatatgtgattctgatacttgacagaatcaagtgcatttatcagcaagtcctctgtttctattgggaatcctaacaggttatcattgtt

SEQ ID NO: 17926 - DNA, 1595 bp, Oryza sativa
tgcatggtttatacaattttgggggccaggagcaacatttggtaattttgagttgacaacactttgcttcacattattattcggctttggcaattccttggtcattagtggagttgctgttacagcgtcaatggaggttgggatcaacattggagcagtggacggtggcagcctttctgtgttgatgcaatgtctgtttttggttgattgtgtaaagtggtttccattagctgtggatggagatgttgaacaagagggcatttcctctgtaactacagattgtgtagcacccgaaatgatcatagcacctccagttttggggatcacattggttgatgaaattggttgaaaagcaactcctgacacatctgcaagtgagacttgtttctgtaaaagcttctgctgttgctcttgctggaccgtgggtagcaatggtgttgcttgcaatgaaggcttgatttcttgttggggcatcatttgttgctgagcaagtgaatgtgaatttgacaactgcttttgcatgtccgtgattaacttttgctgttcttggatcagaggtggctgtgagagtgttgatgtggattgtgacatcagtgattgctgctgcagtttctgtaatatctgcaactgaagctcctcatcaaacaacttagactgctgacttgccagatttaccaactgtccaagggacttatttagctgctgctgattctgttgttgctgctgctgctgctgctgtaactgttgtttttgctgaagtaaaagctgctgttgcagctgtaaattttgatccttctgttgatgagacaaaagcagccgctggccattaatcctttgcgggttttgagttggagatggcttctgctgttgcatctgattctgaacaatcacctgagcctggacgagattagattgagcttggctcaggggaatcacttgtatggagttctgctgtctctgatggttgacagcatcttgtttctgatcttgaggattgatgatagcaccaagctgattcaacggaattgccgccttggacagatcgttcatggtttgcatttgctgagggagcttgggagaattaaactgtatgcagttctgttgaaggagattgttctggacatatagttgccttgcaagttcatcagcagcaaggttttgcatggcagggttacctagagcttgcaggtactcagactgcgcagcggtgttagccaatgatgagctctgctgcctgttcatgttcatccactgaaccaaacttagaccaggtgctgtactgttctggttttgagtatcctttatgcatacctcctcaccaagccaaggcattgccctcttgaaaaggttttccatctctgactcgtcatctgttaattcagataaaagaatatgaaatatactaccataaaaaaaacatatgctaatgcgataatgtaattagcctatagcaatcctggtttcgaaatttatacacttgttatcctgttcagtctactataaccatacacaataacccattaagtaattccgcatcgatgtctaatgtttaacaaatatgcagaccaattgtttccagcacacatagaataagt

SEQ ID NO: 17927 - DNA, 781 bp, Oryza sativa
tcttagtcgacggcaatcgcagaaacaagatgttgcgtcacctgtaatgggcctatgggcttgtaacttcgtctgggaccccggcccaagtggggcccatgtggggtgcgccccaacctggtggagaacgaccctacggcaccgttggtcgtcctcccacatccttaaatagctaggtaccccttcagggtttctcgggttttgatgatagagatagctacttgctaccggctcgcagcgcgcgtgttggctaaaccgctcgtcttcctgtaatcagaacccccaccatattgtgttttgatagtgaaattttcatctttatctagcaatttcagtgcttgttctacttgttcttgcttgttcttcgattgcttgcaggacgagtgccctcgtggccgggttgacgcgcaccacaagttcgcggcgaccattggagacagtgtatcggttgctaaggcgcagcgtctttggacggttgtagtcgggccgtgaacgtcgtctttatccaatcgagttatcccctacctctcatcgaaagatcgggccacaaaccctagcgggttcgcatcaggtggtatcagagctttcgttgctcggtgagtttttatctacccataaccagaaaatagcccgacaaaaagaaactgcatcatttacctagccatattgtgccattgcatagttcttttcagtttttgctttgccgaattttgtgttgcatcgtcacgtcatcttgctggtcttaacgtctagttagtttagagtatcgagttctggtcac

SEQ ID NO: 17928 - DNA, 1315 bp, Oryza sativa
tatacatgcaatatttaagtaggaataccaaaaaataatgtgttgaactgttgagggagcgtcagatctccatcgatctgcctcgaatgataaggggtttagtatataaatttgatctagaattaaaatcggttggcctttccttgggactttggccgacccagtttgctaaaaaatcatttgtccagtatttcctctgttgtataatataagacacaactactttttttttatgtttcatgatataaggcatacatacaattaattaggacatcttctccattaaattattacttttttaaatcatccaccttaagatctctaatttcattggatgcatgcattatatttattagggtgatccaaactaggagatgataataattatttcttgtttttttaggttaagggtggttgtgccttatattttagaacggagtattactcaagcttatcagaaagaagaagctccccgaaaaacaaaaaggaaagaagaagctcccctacgtaattgcagcaggagaagatcacacccctgttctttgtccagctggtaactaaccagtatgagagtagtaagcatgtttctcaagctggtaactaaccttgtaatttttagaaaactttatacacataaatctattaaaatattatcttaaatctatttttcaatctcgtaacagttaattaattcatttgcttgtaatatcgaattattcatctatttagaagtccattttattccattattcagctcagaacaacacatccggagttagcgagcaagcgagctacctatactttattattatcatctttgctaattaattaattgcagctagatcgctcgtttccgtcgtttggttgagtgtatatatatggatgaatatatagtgtgtatgtacatatatagatactgtcatatatacataatgtggcggctaagagtcgcggaggaggccggcgccggcggcgaggggtggctgagctccaccaacgcgcacgtcggccggcaggtctgggagttcgacgccgccgctgctgatgacgatgacgccgccgccgcggcggaggaggtcgaggcggcgcgccgcgagttcacccgccggcgacaccagatcaagcacagcgccgaccttctcctgctcctgcaggttgtatacatatacaccttggcatttcaaaataactcaatttagaatgtgacagaatctggacgtagacatatccagattcgttggctaaagatatgggtcatatttcatcgtaagtttagttattttgatacggaaagagtgtacatgtaatggattgc

SEQ ID NO: 17929 - DNA, 3572 bp, Oryza sativa
  unsure (1)..(3572): unsure at all n locations
aaatctcccttcccatcaccgcggaggcgcagatacattcgccgccgtcgcgccaccaccggcggcggcggtatggcggccgcaccgccgccacggaggcttggcgcgctcgccagcgccggcctcctccacgggatcgacgcccagctccgacgcgtagctgagtacgtctctctccgcacttcaaattttcacgcatcgacgggtggatcgagccactgaggtgtggcgacgaacgccacgcatgtctgggctgtgggattggggtgacggggattcggtagctgtgcggagacgcacggcactgagatctgggcttgttaatcatctaggttttgatcgatgatgacagtcactctgtcactagtacaataaaatcgcaaaagttactactactacttagataaactattggagtactttgtttcaattattcatggaattgaactgccgtcacaatcgtggtcgtcattttgtggaagaatttctctgggttactatgcaatatatatagtggtaacttgttaataccattttgcaaattgcagttcactagatcgaatccctctaagctggagattcctggtatcaagctgggcgaggatgaagatgtcacagaagaagcggtgctgacctctttgaaaagggcgattcggcgttattctactcttcaggcacatgatggacactggcctggggattatgctggtcccatgttccttcttccaggcttggtacttccttttcactgctgtgggaaaatggatctgttgaaattcatccacatcgttattagctaaattcacaatttctttcatgaggtaaaacattccaaagcactgctcggagctagtatgttgctgttagcatccttgctttgatgttggttggtacttgctagagtactgcccaaagattcatgcttggctaaccattttttaattttgtagtcccttggttgtttcacttgcaatggctggccttttgtttgtgtttttcccttagaagagaacctgcatttctgtttaaaagcagttcacatcagacaagcatcaattttatcgccaagtgccagcatgcaatcgttgcatgtaatttgtacattttgtaaagaaaatatggatcacatacatttgtcttccttttgtctatataagattatctgtacattttacttctccattcctaactcagttttacccaggttatagtactgcatgtgactggtgcactaaatactgtgctatcaacagaacatcaaaaggagattcgccggtatctctataatcatcaggcaaggacataaaacttgcccaaataactctgaaaaacttacttagataaatctgtcatttcaatacacatgtgtgcttcggtcgtgataaaatcgtaaaatctgtttcaaaaatcatgagagatttgcatttgctgaagctgataatcggctgctgaactaatttgctcgtgcatttacttccctttgctgtcagactttggagaggttcagatgtgagaacatgttctcagtttctgttatcaagcccctaacgagaaattcattcctttttggcccttaaaaaaaatccatgtagaacatctttaaaagaatggaaagagagggcaacctttgaattcaaaagggcatacagtgcgtgtgtttcatgtccttctccatattgtatagctcattatgttgtgtaaagaaagtaacaaaaactttttaagtgcagaatgaagatggaggctgggggctgcacattgagggcacaagcaccatgttctgtactgtcttgacttatgttaccttgagattacttggagacgaatcagatggtggagatggagccatggtgatagctcgaaattggattttagatcatggaggagcaactttcacaacatcatggggaaaattttggctttcagtagggaacctacgcattttaatttccttttgtgtttttgctctggtccctatacaattctaccttgttttacaatcctagagaggtcctgctaatgtcttaattaactttcttaaggtacttggtgtctttgactggtctggtaacaacccattgcttccagaattgtggatgctaccttatttcctcccatttcatccaggtttgccttctccttacgttttatttctttttactctttaatcttaatttggtagagtgtaagttcatcatacaataatagagaaaattatcgtaggtactggctggagtgcatgctagtgcaggtattcactatatacaaacatggttctttggcagcttactttgaataagtgtgtaccgggttgctgccacgtacgtatattgcactagaatccatgttgtgggttgataaagtgttagtacaataggctatgtctccctttataaaagaaacaggggaaattagccccatttggaaagaatggatttatataattgcagaaacataaatacagaatatttttactctaatgatatgatagaaaatttatgaatatgctgacatggaattttcataaaacaaaaggaagaaggttcaggaatatgtatagattggttaaattcttcaaggtacgtgcctattctgaacatcataagcatatatttggtttaggaatgagttgggatgggttggactcatccttgtgtttttggatgggatggccctatctatctgtttggcatgagggatgaaatggtcccagttttaaggggatggctcacatgtcagcgagaccaaagaagtgggnttggattggtctgcccaattttcaaggggaccatgccaaccgcggatcttagaaaaatattccctttcaggttcatcccatcccatctatctccaaaccaaataccttgaaaagtgagttcaatccaatccgacccattccatcccttgaaccaaacgcatgcagcatgcttaatctctaataattttttaagtgtatcaatccctatattactagattcatgcattgctcctccagccaatttgtgtgagatagatcagcgaccatgttcttagggtgcctttacaacattctttttagtgttctgtagtctgtacaagattttatctgtcaatcagtatattttgtttgcgtatgtccagtacgtatatggtccccctcccgaatggtatacttgcctatgtcttatatttgcggaaagaagtttgtcggcccaattacaccaatagtgctgaccgtacgaaaggagctctacaatataccctatgatgatattaattgggacaaggctcgtaaccaatgcgctaaggtttatgagctttatactttctttgtctttcagattgtgcacgggtcaaacagcaaggacataaaaaacaactttatcgtgcaataccatagtgtctgttgctactcagttcttgttacttcaggtagacatgtctgtgtaggataagtttcttatttaataaagaaaaaagaattatgtattgcaggaggatctgtactaccgtcatccattagggcaagatatcctatgggccactctttacaaatttgttgaaccagttctatcgcattggcctggcagcaa

SEQ ID NO: 17930 - DNA, 1098 bp, Oryza sativa
tacataaaaaactcacaggtaaatgcttgatgtcagcttgtgcaaataggttaattcatcatttaattacttacatgttactccttgctgaaagcttcttcatgactgccccggagatttgagttaccggtatcgccatatatataaaggtgcatggaccttttctactgctgatcaaggttgggctgtatcagatagcactgcagaaggattaaaggtagttaatatgtgaatgaggttgtcagtattaacaacaacgatattttctttaagaaaccaactttgttcttgcagggtttatgaagtagaaattatcctatagtattaggcatcatagtattaccattatagccttcacatgtcacgtctaagtctaaccattatgttcttttgtggcattgatggcatcatttgaattatattttactaaatgtttgaatttctatctgatgtgattcctgttaattaccttcaggcctcattgttgttatcaaaaatttctctggaaattgttggtgaaccattaaaagtcaatagactttatgatgctgtcaattgtctgctgtcttggatggtacagatatcctaacttttgttttctttaatttcttatttaataatatccccagggtatttctgttccccttgtgacatgtcaaaagtctccgtataagctggaatagcaacttttttttattagagaaagtaaattggagaagtacgtagagtttatgaattgcgataacttatagagtaccaattaggtatttatcaaattttgcttcaaatcttgtacctcttgtctctaggtgccttaatcagtataataacttctgaattgtcaagttattttaatcaaactggctaataaattttctcatgctacatatttaatgcttctatgctcaatgttgtatatccattctgtggaatgatcaaagcctccagctgttgatttatgttatgatgggtctatcagtatgcttattgtctgtaattcttttggtacagaataacaatggtggttttgcgacatatgcactcaccaggtattatgcctggctggaggtgagtggttgaattatattgtctttggtt

SEQ ID NO: 17931 - DNA, 7074 bp, Oryza sativa
  unsure (1)..(7074): unsure at all n locations
accaaaactctgctttgttttaatatactgacgtactttttttttgcgtgttcacgaaaaaatatgcagtaacagattgtgtgtgtcgtttcccatttgacaataacatcttgattctcatcggagcagggtgagagagatccagcgccgttgcaccgagcagctaggattcttatcaacctacaattagaggatggggagttccctcagcaagtaagtcataactgctcttctcttatagcaaagtagtgagttttttgcttttggaccatttctcgatttgtgcgtgaaaaatgtacacagaaattcaggtgcagagtgttggccaatggctgggagggttttttttttgtttttaccctttcgaatgatagcttttcttatgcttaataatgttaagtgctgtccctgtctccggtagcttctgaatctgaatgaatttttgtgtgacttgaaaaaaacaacaggagatcatcggagcattcagcaaaaactgcgccatcagctactctcagtacaggaacatattccctatttgggctctcggagagtaccgctgccgagtcttgttaggcaggcaggatgcatcggtgaccggcaacactgctagctgatgatactgatgaagttattttctttttaaaaacaaaaaaaaaagaagtcaagagtgcaggtgttgcgtggctttctgtacctgaaacttactattaccataatagcagcattatggtttatttacagctgaaagtgcactgtgatatcgaaaacaatatgtgctgatcatcgtgaaataatgtcgtatttaagggatgtatgtgtaaaagttcacctcgcgttgcgaattgtgatcgttccaggggtatcttagaaaactgacgttctaatggggtcctttgtgaaaaatgccacctcttgaatcttgactctgagcagcatagatccgatcggacggttcacgtggaccccagtcataggatcggcaatgcttttaacggatgatgattaaattttgggtaattttagggtctcttttgaacaaatgcttgtgcaaactcaccacccaaaataggttcgctaccatttggtgccagcaatcactgccacagtgcagggcttggttgcgtagagatattgatcagtgttccatgatcatagatgcccacaagaaatcaagaatctgaaaccatgatcacttgctgaagcaattctgatacaaagtatcaccagaatgaaattattcaagcacacgattagtgacagcgactaaaggaaagcaaaagttaagtttatgtttcatggcagcgctacaaccagagtacaacacaaccagatcaattcaagttcaagtttctcgcacacctttattcttcagaacaccaagaatgcagttccagatttcagaaatttcagataagagcagaagccatgtcgattgcgcgacatctgaaacatcgtcagttcatctgatcatagtgggagttgtcataggaaggctttgggagctggagatgatcttcgtcgtcgtcgttgccaaggcggtcgaaagcctgaaactgcgcctgctgatcaagggacaagcctccttgccagattgctggagatggcatcatgacagggttggaggtgccggcaatggcggtgacaccagggtgaatctgagaacctggctgaaggtttgcagcacccactgaatcgattgacagaagagagagagcatgctcaaagtctgggcctctagcggagccggaagcgacagcagaagcttccatgcctgaaaaattagtgagtagaactgtaagttttatgcggataaataaccgaaaaaagatcgtannnnnnnnnnnnnnnnnnnnnnnngtcatatatatcatggtaactatgaacagattgcaacaaaaatctcagtgaagataattcctctcttctagtagtatatatgagcccaggttttccatgtagaggatcttggtcctactagaagtaatgatgattagattatccaacagattgcgactccctccattttggtcaaaagcttaaagctttcctgcatgcacattattacactcaactaagctgttgaagcagaatcatgcttgatcaggacattctggtgctagtcattgtacaagagttgggccaaatgaagaaacaccaaaggtgggtggttaccggccacaaatgaagctccaataacatgcgaaaacgcaaaggttttcagtgattgcagtctacttcacagaacataacagagcttcaaaccaatctatgatatcgatatataccactcaccttacacacgtcactacaagctgtcctagattgcaaggagtggggtccggaaatttgtttcacatgttgtagctttgtgcctacattattgtgagctgactcaatgttaaggtgtcagcaactggaggatggtgacagctctgctaaaaaggatgagtttcatgggaaagattgtggtatgtggacacttgctgcggcacaatgcaatagtacttttaaaatcaagcaagaagctaatgtagttttctttcagtcttagtctgtaatgtctgtaagacttttctccggcttttatataaagctggatcaatctttggtaagaaaaagaagctgatgtagacaaaggatgagtttaatcagaagtcagtagcaaagaaaagaacatggagaagaacgtagcccaacaatcaggttctcgtgttgtaaaaataaataaccagacatgtagtcatgggaaaaacttatctaatgaaatgatacgaccatacgtcctaagtgcatagagttccataccatctaataacttcacagaaacaccaatgatcagctagaatcaagaagaagcatcccaagaggcaccatcatataaaatagcttctaggactacataggcgcatccgtctatgctctttttcctcataaggagttgtgagaacaatttttatgcgggtgaaagacccaacattattattattttctcatcttttgctttcagaatgttaacctctcacctttttcttttggaaagttcatctataaatagctagagaaacaaaataccttggttaaggaccttcgcgttggtttctttgaacgccatgagaccatcaaaactatgatgtgctccatgtggcagtacattgcccgatgcctgctgattagatacatgcgtcccatcaacaccggcagctattgttggccttgaccaaggagcttttgttgctgtaaatttgaagcctcctggtactgggttatcccaagaacttgcacagcttcccatctgaccataaggagcttgaccaaatagaaaacttgcctgttgccttgcatctgcttaggacggtcacaagtcacaacaatttcagcgctaagctaaacagatgtaacgactaacgagaagaaataggttgcttattactattgtactattgcctattatggaagttaaagccacttttgtacaacttacgggtacactaaattcaatgtgcacttcttgaaattttagttaatgcttactcagatactcaacaacttctgtgctccaattcgttaatttttcagagtgatttttctttctgaagtattatgtgcagaaataacaatacaaagagatggcacagttgaaacttcccatgttttagtaccgatcagttcggtgacaatatttatggtattgggggggggggggtgagatttaaactgggtagatgacaaaataagcttcaatttcacagaactataatgcaaatagaatcttaataccaccatagagtaatgtagagagcctcgacgaacttaaggaaattgcttctggttgtggcttccgtctgcgggcattgtgatcatggaggcgcctgcgacagcttcgttttttctggtcgaactcagctaaaccgtgaaacctacaaaaacagcagaagttcaaagaaaagaatgaaacaagaacaattttactttaccttaatcaagggtgctaagatcggattcaagataacaagcagacaacatatttagtacccaagaagaaaatctcaccgactacactgttggcaaaagcgtcgctcaagacccgcaacgatgactttaagagtcttgctgtgaggttcacagactcggtgctttcgatggtaaggtttagcagaagagagatcaacattgcagccttcaacttgacagtgtgggttctgagtgttctgctgagccaccttcaccttcttggccagaccaggagatggggtagccacactcacaccagatggagaactcttgacattctgccctccacagacatcttcaaaataggttctcttgccaagcttcaggccaatcaagggctctacacgattggctgctaccaccggtgatcgagaagttccggtgtcatcaactttactcttacccttgtccatgttcttatcatgctcttccgcagatgcaaaattgagctctatggtgttccccactttggacggagaatcgatcgacgcggatatggaactcttggatgaaccatacccaatctctgagctagaagagaaagtaccaccagaagaatggcctgattcatggcctatgtcaaccccaacacctgcaagttttgattcagccagcatcacattcttgggattctcgttcgcgctatttcctatcggcggcatattctcccaatcccacaacaccgagctcttctgattccagtccatcccaaaagaacccatgccagttacagatcccagctgctgctgctccaacctttaaatcaacaaaatgaaatatgagaaggacagatactcaaaaagaaaatataactcaattagaagttgcagaaatcaggacagatttatggcatagctgacacttgactcaactgtgcatcattgaagtttgagagagaagtacaaccaccacaagatgtgctaccaagagtatcaatgaatgcccatatatgcagactctagcttagctttatcaggggaatcatcaatcatggcaagaacagcaacatcatcatttcagatgcaagaaaggcaaagcacaactacctcaacagtggggggagggggtagtgaagtacctgctctttgcttctctcccagagaaaaggagcacagcagattcctgatgaattcctcctgaaaaaaaaaaactgtttctctctctctctctctctctctctctctctctctctcaatcagcatcaccctggagaagcatgggagctccactgatcgcggcgagccgatctggcgatggcggcgccgtccatcagacttggcagccagagaagcagcctcactggagcattcaagcttggccacaccactgccttctcctcactctcatctctggctttctcagatcttatatcctactacacctctcctcttcaggctttctctatccctaacctttgaagccaacaacatcaaccagtccagtgctggaccctactatacatcatgacaagagaaccacccccaaaatttcacaatctcaaatcttatcacagtttcacactttcacttctcaccaccatgaaagattttacaagctcagatctttcacagttccacaccaccaagaactactactacctgacctcaaggctgctgcattatttcttccatgttagcagcactgcaatggtggcagcagcatatgcaaatcaaatcagaggggcaggaaaagaacctataccaagtcaagtcaagtagcttctttctttcttttctgtggggcacctatacaaagaaacctatagcaattagcaaaggaagctttttttcacctacctagggctaggggacaaagaaccactctactcctcttgtatctgaaatcaagaatctcacctcttttccctcaagaatctgtgtcttcctccagaattactttccctggcaagcgctggtggaaaatgaggaccttaaaccaaaagacaatgaagaaaagcaactatagataagaaagacaagactcacaataatccaacacacacaagatggcctctctctctctctctctctctctctctctctttctcactgtgccccacctgagcctcaaatgaacaggaggaatcaaagagggatgccaagtgggtggcctgcctccttgcactgtcacacacacagcaactagccacatgtgcttcactggcacaaaccaacagtgctcaatgtatcaagctatactcaccagtttactgttactgctgcaccaacagctctgcttactgttggtatgctgcctcttccagcccaatatggccactacacttcaagtactcacacaaaagaagcaaatcccctgtaagaaaggcacaaccttttgtatgatgaattcagaattcagatcaccttctcagggaaagagtaggacattcctgtagcctgcagtctgcacacctcaacaagttagtgccaagtataagtgatgatacacatttgcccatgcctaccttggaattgcatttcataattggtgcatgcaaatgaatgcttatctctttctcgtcttgctctggtgtgagtgtgacactcagcttctgttcttctaggccatctttacataggaccaaaagttgcagtagctgccttttgtcggttgtgcttaggtggtgctcctctttgcttagcacttttgatgtgacactgatggctgcaactgcaaaatataattactccataggaacaataggcagttgtgtaatgagatgcaagccttttgcgtattcccgaaaataagaaacgggcggttgttaaatcagctaaggcatgtgttaaaatcagctactatatcaagtggatcttgatcatgttggctacttgcaattgaagaaggcgacgtagatttggttccccaatggttcctgcttaaaaacaaagatcaatcagcacagataccacttgaaagtagcaaaaaatgattagtttaattaacaaccattgggactgtaaaaattggtttgcgtgatcccctcccccatcagcggtagggaagtagggagtcgtggatgcaatctacaccacgtctttctacaaaataaaatgggcctgg

SEQ ID NO: 17932 - DNA, 2629 bp, Oryza sativa
ttttttcttatctctcactcgattttctcactcaaatttacaatgcattttcttgtaagtacagtgtaatttatgaaacttacactataacttttgtaagttacactataatttttgaatcttcgcatgtaaattttaaattttgtattggatttggtctttttcttgaggatatggtaatttagtgtccattatggtgtttcttaattgctttttgctttttattatatctatcggattttaatccaaagattaaaaatctgtgtgatacgatcataaaaatctttcgaaagatgtataggtactccctagatcaaaaccgtaattaattaagatggaacaataatcttcatgaggagccagcaatttcctactccaagttatctagatcgttgggtttggatatactccgccatgagatctagtccaggtgcgtggatctagaggtagacaaggcgtagcgcgccactgtcgagccccgattccggcgatggcgagcgagaggatcccgctccccgccgtcaaaggcaggaggcagaggcactcgccgagaataccatggagatcgctgcctcgagcgacggcgagcgcccgccgcaacgaggcgggatctcgccgccggcgggagcggcggcgatctcggagggaggagagggaagagcaccgcgatcagccgatcaggggctaatctgcataatgcattccaaaacaggggctcatttgcaaagtttacgactcttggagtggtattgatcataaccataaggtccttttcgaaaaaaatgatgatagatactcctatctaaacggtatatttgaaaaaaaaaatgtgaacaaaacttttatatatgtgttcttagctatcgaaaagaaagcgctgaagaataaattttgatgaaaatccccaaaatcaactccaaatttaaggttgcaaattcaaattttagctgacgaaaaataacttatgaatagaacttttatatatgcgttcttagagcatgttcagtaaagctcctaaacacagaccttaaacaactttgagaggttgagactaaaaaataaagtccaacaggcccctacttaaggccccaaagtaggaagcctcccaaattccctcctacagcccctaggcctgggggctctatccccagcccctatccaattttctttggcgcgggggaatgcttccacgacgcgtgctccttcccgcgcgattgcttgcacgccgccggccgtcttgttgcgggtgattctgctctaatccggccatcgccctgctatagtattggtcacctgcatggatgcacgtatgcatggatttttctgcatatcgatgagacgtggtttggttcctgttaagtgtgaacagccatctgccgccagtggccaactgagatttgatgctgatctagaaggagctactactatatctccttgcatatattcatgcagtttcgtgtatgcactggatataatatatcttaatattgaccagctcatatatgattatatgcatccatatatgcatgtatatcattggatattgagtgtaggatggatgaactgctactgctactagccgcaacagatggactgattgagcattctagtgagtcatccatgcactcacactagtgtacgtatatgcacatatcagtgtgatattataaaaaaaaatcaaatttcaatttaattgtgttgtttgaaattattaatttaaatttgattaaattctatgcgttggaaatattaatatttacattattgtgatattaaactaaacataaaagatggattataagataaaatagaggagaaaaagaaataggggctaagaaatagatgttgttgctggagttagaaccattcttagagtcctgaggaaattggggcagcccccatttaacctttagggactctaaaatagtagctattgttggagatgctcttagctatcgaaaagaaaacaccgaagaataaacttcgatgaaaatccccaaaatcaactctaaatttaaagagaaaatcccttatatacccctgaaatttttcctaatcccttctatacccctgaattttgcttacttccttatatacccccaaaatttgattttgatcccttgcatacccctcccgtcagttgaccattagttgaccgtgtattttctataaaaatgaccattttacccttggatgaacaaagaaattcatgaattacattattaaaaatataaaagcttctcgcatgagactattatagttatgagtttgttgtgcgatgcattatttatcccaaaaaaatatttttagataatgaaataaaaaaaatacgtatttattttttaaaaaaaaggtcataaaaatgaggagcattcatataaagataggtataccaatgttcataatattttttttatgaatgctcctgataaaaaaaatccattgtcctattaaaatttcaaataaaaattttattttttttacatttattttattttcaaaatttatgtcaaaattttctgcactaattatttagtctcattagttttataaaatgcacacgatgtgcacttcaaacaaaatttcaattattttgaagcttatattaaacctaaagcataagggcaaa

SEQ ID NO: 17933 - DNA, 5093 bp, Oryza sativa
  unsure (1)..(5093): unsure at all n locations
cacagggaattcactcaaatttaaagctgcaaatttaaaatttagctgatatgagtataagtgtaagcggaaagatgaggttgttcagttggcagtgatccaaagaagggggcttatttgaaaaaaataatatcattggacttgtgttaagtgttaaccgttggatgggaatctaagatcgagttacatttacataaaaatccctctcattttcatgtttgtaattaggctccttctcggtttctcgctctccgatcccccgacgaggcggcggagctccggcgaacctgggaggggatcggagcagggttcgtcaggccgcgacggagggtgagatttcgcgcggatcgcatgccggagacggaggctccaaccgcttggccgttgtcggggattggagatgcagttctgagaggccgcaggctgcggcgagctttctctgaacttttctcatcctgatatcagctaaaatcaatcgaggtaatcaagaacctctcgaattgtttgcttcagatcagtagtgtggtttctgacttctgatatgcagtgtgcagggatcgatgcagcttagtatactcacattttgttgattctgccctggtaaatttggagagattttttttttttttgacgccattgccatctgatctgagtggtcatagctatataacctctcttctgaagtattggagcagaaaatgcagaatcaaactgaaaaggaatatcaaggcataatgcgacatggaagaatctgaagtctgaactcgcctgattgcatgcaggttcggcaacatcgcccaacatctctgattgtcaatcaatggttcaaggcatgatcctcatcacaatggcactggtagatcaaaggctacactaacaagaatccaagcatgatcgcgatagcgggttcgcggcatccaccagggaaaaataaagagggaaaaaagagcaaaaaaagaaaaggttcctacatgaatgaacatactgacagcagacatcaaatatccttatcctcctgccagatggctgatgctcttactacagccatatctcttgtgaaacaagcatctatgagaatgacaggcaaagctggagaagcactagcagaagcatcaagaggttgctgcttctaacatgctgcagcttccacgagaaggccgagtcaacctcgatcatgataccgaatctgcatgttccggtgctggggtcttggccagtgatcgttgcgaggttcgagaacccacaggcgacatcgtcttgatcgttcttctggtagtagctgttgaacgcgtacgagatgttgcttctggtgtccagtcccccacaagatgtcttgtaaccaaggctggtgcaatctgccagggagcaggcatagctgatgctatctgaaagccttggatcagtaaggcctatagaaggcttcagcacgcaccacttcctctcaaggtacttcacgttcttcgctttgagaaggccatgtgattgcccaagattcagttgatactttggcaagccatcataggtgaatatcccccagtgacgctcaaaattacctggctgtatgctcttctcatcctcatcgattagactgaacaagtaagcatcaactggtccaggcctcatcggcgttcctcgccctgtggcaatatgtgttaggaagccttggttgaagtgctgcgccatctgaatatttgcattcatgtccccgtcagttggccatccaatctccccaacaatgactgggagatttccaaagccattcttcttcaaagcccatataagtgtgtcatagtttgcatcaaacatgtttgtgtatgtcgcagagccatcaacaatgggtgatgcggcaccatcaaagaaggcgtagtcgacagggaagtttgaatcagaatagaggcttatgaaagggtagatgttgacagtgaaagctccaccagtatcgctcaggaattttacgatggtgagcatcagatcatgaatatctgtgcggaagtccccatcagaaggcttgctagtcgatgattgataaacatcagcattgagagggcatgtcactctaacttgactacccaagccagccttcacaagcgcactttgtatgtttctgatggcaggaaaagtagtttgcagaaagcttccattgtatgtctccaggaaaggctcgttaccaacagcaacatacctgatattacaataggaaaaccaagatgtgagatcagatggttcagtgagtaaacatcacagaggaacgaacttgcaggataaagttggtgggatatagaacatgagttatatgatgtgttgtcaatcatcttttcttaagagtgcggaacaattggatgattcaattatattgaggctccaaaccataggtcactgattcaaatccaggaaagtcagagtggaactaatgcacacacccaacatctcattagtggtaaccaaacttggccaccagcttggaggtggcacactagtaagaaatgatatggttgcgtttcatacaaacacacagaggtcagcatgagtattcagtgaacttcagttgttatgctctataatgttagtccaggtcatgttacttagcagtttagtatatatttataaagttgctgttttgatatatgtataataagggatactccatgtgtgaataacatgtaggaaaatttcttaccaacacaaacacaacacagcattgtttagttagaaaatctagtcttgttcagttcgcaatgatgaaaagcaacagatccactcatacttcaaataagtgtgtgatactttttggtagtaaacacagttcccttgtgtacaattagacatgacaagcaaaaggaatgggaggttttataagccatctacataaggggatccagtgatccacaaaatcctataagtgaaagaagaggcattagcatagtgacagaacaaagagcttatgtaaggtctagatgcgggcatgcagcaattcagagtggggacaattattattctctttcaacgaataaagaggacatgtcaaaaaaaagggttatcctccgcacagcaatgtccataccttccaccttatatagcatactactgaatgctactggtcatatcgatagctcagtttcagttgaaaaaacagtactacccagaagcagttgtttgtgaacatattcaaaacaaaaaactggtaaacttcacccaaatgatatgactaccatagtgtcacttgagtgcaaaaacctcatattcttgctacaattccatagaggagcaaaattctttactaacagtataatgatagcaagaaagtctcccaacatggtgtatgcattaatcaggagtacaagcacagatggataaaacacaactgtactttgtggtaattttgcctccagagacaaacatgctcaactgactcatcccagcaagggtgcaaatcgcgtgagccacgaaaaatgcaatgctatagactacagggggtttctaactcaaccactctaccaaatatgagctgcagttggtaggaaccaatcaacacagattgaatgcaacgctaaccactctacataaaaactctagacttaaccagtatgctcaaaaggccatatcacactagaacaaccaggttgaacgtaatgccaaccctctaccaaaagctctagacttaaccagtactgcttaaaaagcaaaatcacacaagagctactagagtgaactgaagaatcttcagtgagtgaactgaagaatcttcagtgagtgagtgagtgagtatactatacctgatgctttctagacttaaccagtatgcttaaaaggccatatgaaactagaactactagagtaagctgattagctccccagcaaaaactgcttgagagtgaactgaagaatcttcagggagtgagtgagtgagtgagacctgatcttgacgccgtcgttgaggtagttggagacgttctggtcgacccacttgttggcggccgccatgctgctggccatggcggcgagcatgtcgttggggatgccgaccatcacctccagcccgctcttcctcagggcgctcatggtgtcctccccggcgtcgaacagcttcaccttgtcgaacccgttgtccttgagcatctgcaccaccgtgtccggcgccagcgggtggctcgcctgcgtcccccagttcgcccctatcgcctccacccccaccgccgccgtcgncgtcagccacacccaacacgccaccgtcgtcgccgcccttccatgccaccaccaagaagaacccattctgctcagatcttgggatgattgatcaggcaagctaaagaaaccagcaaaaaagggggattttgggatcgatgaacacgaagagcaaagctccaagaaacactagaagctcaaagatcgaatcctttcttgagctgcaagaagtgaaggacgctggaatctctgaactattaaagcagcatcaagagctcaaatctttgggaataaatgaagcccagccgaactcatcaaactccacctaaagcttgaccacgaaaggagatttcctttgatagctaaatgcaaggactcacatcacacatcagtccaggggagagcattaatggctagcataccaagctcaggtagggagtaaatttgctgatgaggacagcacaggggacagatactagattagatgagagtgataataaagggctttgccaaagctggcaccaaacgaagagatgggcacagacagcacacaagagaaaaacttttctagtattgctcccaggatttgcaggaggggaaagtagaacaagatatttttcaggaaaaaggagaaggagaagaaaagatttgacagtgtgaaccaagaactgaacagaaaaaggagaagatgatcacctagacaacactctcacactcttgagctgcaagctgaagagaggatatatgctccataacagtgattagcacacagagtggtagtaactgaggtttttcagctcaaaaaaaaaaggtactagaaagattcctcaccatacatgccaatccaagatacatctagtactgttgagcagaggggctgagattaaaaggccaaagaaaagcaagcataa

SEQ ID NO: 17934 - DNA, 3757 bp, Oryza sativa
tactaaagaaaagatatcatgatgtttattttaagttggaaccatcagcacagtactacttttctaaactttttaaaaataaacattcgacccttgattctcaagatcaggagggcaaccttgccatgacagaaaaaacactgtagtgtaacaaaggattggcagaatgcctaaaaggttcttttgaaggaaaaaaaaaagtactttggtgggactattttgtttttcttgtttaaaaaaatcaaaaaaattaatatgaagtataatactctactttcttctttatcaatcattgttatacatgataatatcatattgataacacttcccacattttttctagcaaaagaatgtgataacaatatgtgatgttggtaaatctatgtatttatgagaatgtgataatctaattcttctggtttcaaagttgatgagaacggtaaatggtcttatagttctgaatttcctcctaaaacacgaaaatatgaagtcatttctacattgtaactctaattggcatttttcagtagttagttgctcataatttaattgaaatcagtacccaatctattgcctgattgctacaacggttacaaatttaaggttgctttaagttctgaaacacttgagtatttgtacaaagcatgatgtttaacatcagtacttaattatggctagtatttgtacagtaagctctagttctctattttaagctccagttttgaatttcgtctgtagttctgaaattcagctcttgttctgaattttgacttcgttctcaatgtaagctcttgtcctgaattttgtctgtagttctcaaattaagctctagttctgatatttatctatatttctgaaatctacctctagttttgaattttgactctagtcctcaatttaacccctagttatgtattttatctataattctgaaatttacctctagttttgaatattgactctagatttgattttcaatagtcatttaatttgtaggttattaatctgctttgatttgtgcaggtccaagtgtgaagaaatggagatactacccggatgatttgaagatcgccatctatctacaattgttggcaaagacagatcctcttgtgctgcaacgtggagttaccaaggcagttgcattgaattttgatttgccagttagagctgtgcagcaagtatgacgcagtggacaggattatggtgggatagaaggtgtgataaacaagttgctcacaagttgtggttgcaaaagagtacaaatagatatggaatctatcagagacgtgcctttgagagatcgcacaaccattcaggatcttgccaatgcgctcggtgtgaagtagtccacacttcataggcattttaaggaaggccagtttcgttgcctacacgcattaattccatacatgcatgcatgcgttacgaggaggcgtcagcgagattaccaatggcactagctctatgtgatgattaatatggcatttttggtttttgctagtgggatgatcaatttgggaaggagggagtatttctttagttagcaattattaatcattaattcaggattaggcagcaagctcgctgcgcaaccccacgagctcgtgcgttgccacgagtttgcttctttgatatgcggcagtagtatattttttccagtatattttcaaatatcactttgtgtcttttgtccacggcaaaacgaggttactagagcacacataaaaatggaagataggtgaattttaatactcttatctggtacattagtgagcacacttggtttatgagcttaatggttatgaactcaccagattcaaatgtcgccttctttagcgtgttaggggaaatgcatcttgcccctctctaataatgtattttgtattatctagttataataaaacctcacagggcatattcttttaaatatgttatttctttcacaatggctcgtacaatgtaagttattgcataatgcaaatattccattttaaaaatagttttggttgcctttggtgattggagtagctagttttattttctttctaaagtttcgaaagtacttacaattagcatctccatgaaatgccacaaagcactcaaatacttccttcaatcataaatatttgatatttatgacaagatttggttttaaaactcttttaatcaatcttatattagaataagtttacaatatcatgggatggtattttccaaggcaagactagtatttgtgcatacattttcatttgagaaataattgattatcaaagttttaaaagtctgaacaaatcttaccccaaaacatcaaatatctaggacaagattttgtcggacctctaacacttcaaccatcaataatatcttgaatgtgtgggttagagaaaaaatacggtatacccatatttaccttgaaaagcactattaaaatatcatagattttataaacttaatataatataaaaatgttgatcaaagttttaaattttaaccaaatgttgtcataacatttataaccaaagtgagtagtttattacaaatctaccaaaacgattggtcgaatatattcgaagtactgaaatcactacaataaatactaaaaagatttatacaagataactaagtaatggatagaagcaacttttttattttgcttaacttgcaagggaaacactgaaacatccataattacaacaattgcaaatttgccacttgtttaaatcgttattgtaaaactaccactagaaatatgtaaaattaccactagaacgatcattcgatggtatccttacaaaattaaaaaaaacagtagcaaatttacaaatgtcaataaataattctccacttgaatatttgaataggaaacataaataattttgcttgaataatatttgaagggagagagaggctgaagccctaaattcccctcctccgccgaccaaaagccctaaaccctaaccccagccaacgcgtcttcctgcccatccccggcggcggcggcggcgtcagcggcggaggtcggcgactagtaccagcgaggaggaggagaagaaggcaaccggagatgccgctggggcaacgcgcgggggacaagagcgagtcccgctactgcggggtggaggtgctcgacttccccgccggcgaggagctccccgccgtcctctcccactccctctcctcctccttcgacttcctcctcgcccccctcgtgagtactactccactagcgcctccgcccttactcgattccgcctcctctctgagactactagctcacttggtggtggtggcgctgctgcaggttgatcccgactaccggccgacgcccgggtccgtcctccccgtggcggcgtcggacctcgtcctcggcccggcccagtggagcagccacatcgtcgggaagatcagtgagtggattgatttggatgcggaggacgagcaactccggttggactccgagatcactctgaagcaggagattgcgtgggcgtctcatctctcgttgcaggtccgttggattcagtgaatttcacaaaattattaaatgtttaatgggagtttctaattgcgcatcaaggaaatcgctctggagagttcatcacttttgcaattttgcaaccaggaagtgctagagataattttgatagtgttgatgggcgattgtcatgtataagagttctccaccatttatgcatattttcaagcttgtcagtgtgtaaattagttatgcttccgaagtccataactagaaactaga

SEQ ID NO: 17935 - DNA, 6786 bp, Oryza sativa
tcacaatgtaagtcattctagcaattcccacattcatattgatgctaatgaatctagatagatatacatgtttagattcattagcatcaatatgaatgtgggaaatgctagaatgacttacattgtgaaacggagggagtataagatttccttacttggcgtgtttgggagctagactgacccatatgcattcttgaaaacatggtctgaatcctagaaattgcatgcattttctttcaggcgtgcgttcttcctcctcccaagagatcttcttgtgccaactatgctagagttgtgaatcatattttgcaaggcctgaccaatttgcaggtatcttcctccattttcaattacatatgttgtgtattgtgcatgtcataaatgtttcaatttgatgaacatttagcttttgtttgttctgtctctttcttaagttgtggcttaggatacctctggagaagtctgaacctatggatgaagaccatgatggagcaaaagataatagcgacatggtaaatttctgataattctagactggcctggactgttaagcagcagactgttatatatctgcatgtgcggggtaaatctcactcttgagtgcccttttaaattgcagagtgataccgtagactcttgggaatggtggaattcatttagactattatgtgagcatagcagtcaactgtgtgtggcgcttgatgttttgtaagtgatgttcttgcattgttgcaccaagtgctttcttccaagtgaagatgtcactgataataaatctatcatgttatagttttggttttcattacaaaggttggctattcacttatcaggagcacactgccatctatgaattcactagggcggtggtttggggagcctgtaagagctgcaattcttcaaacaaatgtaactgtactacttattcaattaaagatgacatgcgatctcctttctttggagataagaataacccttcatggttctgatcactaaacgatttttcgtctcccaggcttttctgacaaatgccagaggttatccttgcctgtcaaagcgccaccagaagctgcttactggattttttaaccattcggttcaggtgtgttccttgtgcttccttctatcaagcctttcctctcttatcttttctgctaagaacccaatgcacagggtgcctccatttccattccaaatttcaaagggcatcttactgtaccttttctctcggatttttcaccctctgtttttctttaggttataatatctgggagatcaaatcataacgtatcccaaggaggagtgctctcaggtgatgaaaaccacactgaaggtaattcttgcaaaatttgagatttataatttattggttttgttatgtatttcaaccacacatgaactggatttatacatgaactgaaaatttcttttcaatatgttttaagtaatagtggtgctctacaaacttaactttgaaacaaattcagagagcaaaagtcaggacttgaaatgaaattagctgcttgaatttctgaggcgcactgcaaaatgtatattttttctttagcacatgacttatctgttgcctaaactgttgttttagatactgctgttcggcatgcattgagcccataccttgactacattgcttacatatatcagaggatggacccacttcctgaacaggaacgctttgaggtatttagtttatcagactatctctctgatttggcccatgagctgattcatttaagcgagagctttcttgaccttgaatttatttgctttattcagatcaattatagggattttctgcaatctcctctccaggtaattcctattctgtagcccccccttctttctcctcccctcatcattttgttttaatctttcctcacaacattacattttcttgcagcctctaatggacaatttggaagctcagacatacgagacttttgagaaagataccgtgaaatatacccaggtttctgctagatgttttgaatatctttaaatgttactgtgaaaatcactaatttaaagcgacagcaaatttatctttcgaatcgggcattctgattatcgcttctcatttttttttagagaaaatcgagcaattcccattccaaacattgccactaagaaaaaaatgacactttaaaggctgtaattgttccggtgcatctccaaagaccgtttttttttttttttgccaatatggccatagaaataatttacagctaggtccaccacatcacttgacattttcccctgtctgcatggtataagccatcttgggtttccccaggttatcttgagcaaagaaaccacaatgcaggcatgttccattcatactagcttgcaggtcttgagacttgactctgtccttaagatcagcaaagtgctggtttgtcatgacacagaaatagtagtcgcagtatgcttgtagccccgttatctgtgtaggccagcaccagtcatggggctgtatgcatctgcactggatcacactgatagtaactagactccgtgcttatcgtggtttcccggcaatgatttaactatgaattagaggcaatgctacctagagacatgagtgtgggtaaaactcgttcttttttttttttgtgcgtgcgtgtgtgtgtgtgtgtgtgtgtgcatgtgtgtgtgtttggggggggggggtacttgggttccccttaatttttttcctgttcaacataaactctaataccagtgttggctgtattaatgtttttctgtttttcatcatatgaacagtatcaaagagcaattgctaaggcattggttgatagagtttccgatgatgatgtctcaacaacaaaaacagtaagattggacctgccatattttatcttcctcgccaaatcatgtcttgtttctgtattgcctattgttacttgttactctattttcttattatcttacctttagaattctatgatttaacttcatttactgttccataaaggtgctgatggttgttggagcaggccgggggccactagtgagagcgtcgttacaggtggctaccttttctaatgaagcttctgaactcactaaaaatcttgacgaatgttcttgtgcttaaataatgcaattgcaatgcatgccattttttttccgtatacatgcttcactatctgaatatgctttcatattcaatgcaggctgctgaggaaactggccgcaagctaaaagtatacgccgtcgagaaaaatcctaatgctgttatcacccttcacgtgagttattcaacgaatacagcatttgtcattttcgttctcagatagttgattggatgtggaaagcttgtcagtgtaatcattgttgcaatcctttgtccttatgttttgttgatagtcgggtttttctcctgtttatcctgtacgtgtgcaaatatgattacatgatgactatctgatgtgctttggggcggtgaaacagagtttgatcaaattggaaggatgggaaagcttggttactataatttcaagtgacatgcggtgctgggaagcccctgagaaagcagatattttggtatgttgatccctgctataaatggacatttcatatcttttcaaagtggttaaatcaatggcttatatgcaaatatggtacaggtcagtgagttgcttggttcctttggtgataatgaactttctcccgagtgtctagatggtgctcagagattcttgaagccagatgggatttctattccttcatcgtactgaccttttctgtccttagtctatattttcatctttcttggatcaattaaatcccagatatccttttgttcttatatcatttgataacttatgttcctttgcagatacactagctttattgaacctataacagcatcaaaactacacaacgatgtaagtgcctctactatatcaatgataaccgtaagatatttatggagtttgaagtgaattggtttatacagatcaaagcacataaagatattgcacattttgaaactgcatatgttgtcaaactacaccgaatagcaagacttgcaccaacacaatcggtgagcgaccacagtttctgctgtatttatccctcatcaatagtgtatcctatcacattttgtgatatgttatcttttccaaagaactatttcatttgattatcaccattttaaaacatgtaggtttttacttttgatcatccaaatccctcaccaaatgctagtaaccaaaggtataccaagttgaaatttgagataccacaagagacgggatcatgcctcgtgcacggtatgtagctattgagttatacttgtgattatactttgctatgttacaaggtagaaacatctatatatttggcagaatttgactctactcattcccatcattttggcaggatttgctggatattttgatgccgtattgtataaagatgttcatcttggaattgaaccaaacacggctacaccaaacatgtttagctggtacactaaatggcaaaacctgatttttatgtgctggcaataactgttcttgaatagtgccttcaatattatcttttatgtatctcatcaggttcccgatcttcttcccattgagaaagcccatctacgtaccgtcgaagacgcctatagaagtgcacttttggcgatgctgcggtgcaacaaaggtattgtggtttatcgcactgcttttgattatgagatgtttgaataccccttacctgaaatctcatctcccgcattgctacaggtgtggtacgagtgggctgtgacggcaccttctccatcaccaatccataacagcaatggtcgatcatattgggtcggcctataagtaaagccatgaagccagttttgttttgttccgattttctttttagggattctttttgttgtcttttgaaagagaggagagaacagattccattgtatggtttcttgtgtggagtgactctttatcagatatgctgcgtgggagattgattcttcagccttaaagcaagtgataactgacagtggaagaaacgcatcttggatgcacaggaccagagcaacccagtaaaaaacaaatgatatatcttgatgggttgatgtgtaacatcagagcaggtacaataattggcggtagtagttccatgtaggattttgtgatgatctgtaggagaaaggggaagagagagagagtaagctggtgactaatttgttgtcgggctgcacgcgccgctcgaggagactgtggggcctgccttgcgcggcctcttctcctcgccaactcccgcatcagccatgcctttcgctgcgatgttgcctgcctccgtcgctaactgccgccgctgcccttgttgcctgccgtatggccgccgctgtcttccgacgtccgccgcacggtcaccaccgtctttcgcatgagccgtcgctaccccggtcgctcgccgcacaaccaccgccgtcttttgcctccgccgcgcggcctggctgccaccgtcttccgcatcagccacgcgacccggtcgccgctaccctcgtcgcccgtcgtacaactgccgccgtcttccgcctcaattgtgcggcctagccgccgctgccccccatcgcccgccgcacggtcgccgccatcttccgccttagccttgcgacccggctgccgttgcccccgtcgcccgccgcacagccgctgttgttttctgcctccgccatgctgcccggccgtcgccatcttccacctcaattgcacggcctagccgctgccatctcctgtgtccgccgccgctgtctttcgttgtcggtgacaggaatcgagggaataggagaagaagacatgacctgtgaggggatagaagaagaagacatgacctgtgaggggatagaaggagaaagagaatgtgaggtatgagaagatggtgggttccacgaatcaataaaatattcgtgttatagtatttctattatatatacattagctacactgcttattatagatgatatgggtatttttttggagccaacagtaggctatattattgaccttgctctcatctttcatgagctagatttgtttggagttgaattccacaatttccagttttttctttacaatgcttttggtacttgtggtgcatagtcatgagtaagacagaggggctgtttagattgtagataaaataagtaagttggtaatattagcaaaattttggtaggatttcttatgtatttatcaaagttgtcaaaaaaaaaaactaaatgtagacacatcgtcagcaactttgaaaaaaaggtataattgaaaatgacattattatgatataaaaaaaagatagcaaacaaattcagtgactggctaaggcatgcaaaagggtgaatttgtggcacgcaaaaagacacataattaattaagttttaccttctctacaaaaaatagattgatatgattttttaaagatacttttgtatatttttttcaaaaacacactatttaataatttaaaaagtgtgcgtgtgaaaaacgagagagatgatttccagaaatgacggataaaaaaggttcccgtttcttgtgagaattcaattatttactccaaaatttatactactagaaccacatgaaatttcaaaagcctaaaacctttggacatgtcattttggacctaaccacatccttgaccgtcgatttgtaccccaaatcatttaaacgtgatcaaaattataatatacacataaatttaatattaaacttcttgaacatgaaaaaccaatgtatttttttgcctttttgtttcaaa

SEQ ID NO: 17936 - DNA, 2749 bp, Oryza sativa
cttctattaacagatgttagccgattgtaagttagatgacgatattgccaaggattatgtaagatatatgataacttgatgaattatatagacaagattagagtgtcataaagatggaagcactaatctcgagaacacaagtcgtcataacaagttttacctcttgttgaagatcgaaaccgatgcagctcaacccgaaagcaagaactcgtcgaaacaaaactaaagtaaaaaggtggcgatgcgccgaaattgtattgaacgtgtgtgttaaaaattacatagggctcggggtctatttatacccgagaattacaagatatgtccataccggacacgaccactatctctaacaaactctaagataccataagtctttgcggcagatttttggccaaacatatctctaaggaagttacataaaacatcctaattaataaatacaattgccttctcaggactctatccatgtgcggcaatcatcttgaagcacctcaattcaacccaatgtcatacaccaaattatactgtcagaatcggctgcatcggctcacctagtccgactcagacccagccgaccctaatcgtagccgatctggacttcagtcgattcttactctgttctcggatcaatctccgccttcgactctaccttgatctaatctccttttccgatgcggatattaccaaatttggtcgttaacagtagtatacgacaaattatatactacatttttttcaaagaaatgtcgatagaaattggagtaggtggcggtggcggcagttttgcatatggaacccttgggcctggaacccatctcaacaccctctttccccaccggttgccggcgacgtcgccgagggtttctctaccaacaggaacacgtgtacgcgccacagtggcccgcgtccagcgccgctctcctcggccaccaactccccagtcgcctcccgccccaacgaccgagagctgcctctacggcggcagcggcggcgccggcgacgatcagctcagctcaccaaccccgaagcttcctccgcttcttccggtgtctacaaccatgtggatgacgtatgcaaacgcacaaacattttgcattagcagccggaattttttactgttcatcgccgcatcatcggaattttttattgcgacttttcatggacaaagcgggattagttgggagcatttcaatcaatcaatcaatccaaccaagtcctagttaattcgcctcgggatccgccatgtccaccggcgacgacgacaaccacggcgatccgctgcagcagcagccggaggaggaggacggcggcggctatggcgatgtcgccgtcggcggggggttgtttagtgtccccggttacgagtgggcggacgtggcggcgctggggccggacgtggccggccgcgccgtgcgcgtgcggggcgcggcccacgcggtgcgcgccgtggggcggcgcgtcgcgttcctcgtgctgcggcaggggtcgtccaccgtgcagtgcgtcgtgggtggcggcggcggcggcggcggaggaggagacgccggggtggcgcggttcgccgccgggctgagccgggagtcggtggtggacgtcgccggcgtcgtctcgttgccgcgggagcccgtccgcggcaccacgcagcaggtgttcgacgttttgccgctcccacccatcaccaccatcccgatcacctctgcagtctgctcatggctactcttctgcaggaagtggagatccaggtgaagaagctgtactgcatcagcaaagcgactccgaatctccccatcagcgtcgacgacgcggcgcgaagcgaggaagacgtcgtgaaggccaaggctgtaagcttttttttgtcaatccatacactgccattgatcacagcaaacaatcatgtttcgttggagctatcattgtgaacttaattgtttcgttgcatgcacaggccggcgagcagctcgttcatgtcgggcaggacaagcgcttggacttcagagtgatcgacctgcgcacacctgcaaaccaggcgatttttcgtgtccaatgcgaaatcgaaaacgtaagatttgcacattgaacacgggatgatctcacggaattacccagaaacaaatttggcaaaagaattattcaggaaccgaatttgcgaaagaaaaatcttcagaaaccgttggtgtcacaagaatttgtgatctgatgagcgttgttgtcacactcttggacggtgcagatcttcagacaagtgctgctgtcagaaggtttcgttggcatccacacgccgaagctgatcggcgggtccagtgaaggcggcgcggcggtgttcaagctggactacaacggccagccggcctgcctggcgcagtcgcctcagctccacaagcaaatggcaatttgtggtggattcgagcgtgtgttcgaggttggccccgtgttcagggcagaagactccaacacgcaccggcatttgtgtgagttcgttggacttgacatggaaatggcaatcaaaggccactactctgaggtaatttagctccgttgtttgtgaattcagctgtgtaagtgatgtagctgcatgaacagtgacacaattttcttttgcttctcttgtgagaaacaggtttgtgatgttgtggataggctgtttgttgctatgtttgatcatctgaacaagaactgcgccaaggaacttgaggccattaacaggcagtatccgttcaaacctttgaaggtaagcaagtttatggat

SEQ ID NO: 17937 - DNA, 1869 bp, Oryza sativa
gcgagctggttcataccaagtaacctttccatcatctcatctcactcccacatgatggagaactactagcttgctgttgagtgttgaccactggaattgttatattagaaaatcttacttagacctggtttggttcccaacttttttttcaaacttccaacttttttatcacatcaaaacttttctacacacaaacttccaacttttccatcacatcattctaatttcgatcaaattttcaattttggcgtgaactaaacgcacccttactagtacttggtattcttcaactgcaggtatgacactgatttctacatgctctgccggtacccgtcggcggtgaggccattctacaccatgccctgctccgacgacccacgctacagcaactccttcgacgtgttcgtccgaggtaattgacaaaactcatctcaagataccaccgatcttctcctgagactagatcattctctcgcaatttggagggaaaaaaatgaaataagattttctggccatggaatacaggggaggagatcatctcgggagcgcagagggtgcacgtcccggaggtcctggcacgacaggcggaggagcgggggatcgacgtcggcagcatcgccgcctacgtcgacgcgttcaggtacggcgcgccgccgcacggcgggttcggcgtcgggctggagagggtggtgatgctcttctgcggcctcggcaacatcaggaaggcttctctcttcccacgcgaccccaggaggctgaacccctgaaaacaaaaaaacacaaccaactatccaccccaaaaccaactggtttctttcatgtttgtattttgcgtggcaagaattctatctgaacacaaacattcgattcaggaatccattcatctcgaacttgtgtcaaaatgcgtttctatttgactacgctcgcgtggcatcactaacgggagaatacatatagccacattattacaactgaaacatagctacattatttcacgtataaatacatgcacattgttggtgctgctgctctgctcgtgctgaactacttgtctgcggccaagacgcggcgacggtactccccaagggcccaaatagggaagatgtttctatactcggagtagctgatcatgcagtttttgttgaagactccaatgatctcctgttatatggttggggggggggggggtaaaaaatgttatttagcatctcggatgatggtaaataatacatagtgaaaggaaaaggataactcatgtcagcaatttagttttcctcgttcaatatcgagtgaagcaatgcgtgttcccctagcatcaaagatcttttaacaacattgcgcaatgatacttcaggataatttccaagcaactttggatctatggtcgaccggttagataacatgcctagaatagtctaatgattagaaacacgcaactaagggacaaccctcagtcaattagtttagattatattgcttgtcaatacctaaaccctatatttctgtgcttctacttatgcccattggaacttctatgaaatgctctatttttaaaaacagaagtttgaatcaccacaagattattacaggctgaagtaaatgcatcactttcttttctagagcaacgtttcatgtcatgaacccatgggatggattagaacttacttgctggggaaattcaccatcttccgattgtaagttgatcaaaaccttcgctgctcgatgcaaaggaattggatctctctcagcctgcaagaggaaagtactatcacgaataagcatatgtatcattttacgataactgaaaagtcaaccatacacaaaaatatatttaacaaaagacaaacctgccctgcatcgattagggct

SEQ ID NO: 17938 - DNA, 2489 bp, Oryza sativa
atgcccggtacaacaaagtaaggctgcatgcattagtaactcttccttcagccattaaactgctatattagagacactttatagccatgacaaattagacgtcttatgataattgataagcacaaaattataatgtgacggatgccttttcatacataagggtacttgcagattcaattgttaaacaggagtccatttaccacatcccaaattttaattatcaactgaaaagcagatctccaatattctaagtttctaatgcatattaatcagggttgagaagcaaaaaaaatcgtttcggtatcctacagaaatacgaggtgcttaaaaaagggacaagacaaacatcttctctgtccttgttctgaatgcaaaaggagcacttgaatataggcatacactatatgatgcttactgaactgctgctccaaagcttcattttttttatatattattcatgttacatatgaaatgttaaaatgacatgagaggtttacaatcacccttaaatatgaagactgattaaaacttaccatgtatgacatcaaacaattgacagaatcatacagtctattaacttccactgcttcgccaacaatatctggagaaatcttcgatagcaataatgccgcctaataataaaacaaaacgagaacagttcaaactattacaatgtcaagaataccagcagacaattgctatggaacagactaaactttacagataagatcataagagaatctacaatggttcttaataactatttctcatgcataccagagagtttatatatgctagaagagtagaagaacaatattttctcaagcttgaaagataaaatttaccttaagtccttctgcagtgcatctgatataggccaccatgatcagcagtagaaaagggccatgcacctttagatatgtggcggtaccactgactaagatctccagggcagtcatcgataacctttcaggataaaagcacaggtaagtaatgagatggcttgaaatgttgattagtataatcgtataagggaacatgcatgaggcatgcacctgcgttttctttatgtagccatgtgctagtttaagagtaggaccaaattcttcaatgaggccagtagccactatagcttgaactgtgaaagctgtgtcccacagctggcttccattataaccctacagcggtcacaaaaagaatctatagttaaagtaaacagaacacacttgatgcaatgcttctctaaaattatgctatgttaaaaacttcattggcagaaattatgccaaaacaattttccaatggcatcaatagacagtaaatcacacttgttcaataggtgtcttgtgccaaagttaccaactttcttgttggaagttagagtaaagaaaaaaggtgacctgcattttcatgccatcttctgcaatccataggtaatcgtggactcttggaatgtggagtttgaatgcctctgagtttggatcttcaatccagcaagcaagcatatttaatacctgaatagagagaatagatttgaatgacaagaacacaatgtattgcctgacatgactgagcagtttaattcatcaggtattaaagcatcaagagtagttacatcttatagctacgggaggaagaaacaaaaagaaactccataatctgaagtttaatgaaccattcaaaaataaattgcttctttgctacctatatatgtcttcacaggactataataggcttattttggcagaaatgttcatgttttaaaacaaaagaaacatagaaggggaagaagaatgacagtgaacttgccgcttgagagaaggtagtgcaactaaaacatttttaatctatataggccgcttggtggccacccaaaaaaagggtggtgcgaggagccatcgtcgctacaataaaatagtaaaccaagataaaaaaaaaatgggtgaaaatttaaaggggaatactgtaaaacacagtaattatgacagtttccctctaattgcagctgcacatgtattccattcaaagttgaaaattgtaagtgtgtacccatataatggaatggtttcccttttatgcctgcagcaagaaaagaaagaacgacccactttcttttgtaatgaaccaataagcaatcatagtcttcaaattaccttgtttactggaccaatgcaaatatatcgggtgttctcatcttcataatgaatatgctgcatgacagtgtccaaagctttctccctcaatttgttcccaggccaacgcaacatagctggttcaacaaatttgtggagagtggcccataatacatcctgcacgaatggatgtggatagtacagatcttcctgcaatacaatacccaaaaaaaaaaactttcagaaagaaaaatccagatcttattaaacacaaagtgataaaagcaagatacataggataaattatgtaaaattttgggcttactacaataacttttcaagccatgcacgataaca

SEQ ID NO: 17939 - DNA, 2764 bp, Oryza sativa
aagaaattccatagttcaaattttagtgagtaaccaaattggaaacgacttgtggtgagttagaagagtaccaagcctggcataaggaacatgggaccaccataatccccaggccagtgtccatcatgtgcttgaaaagtagaataacgagcaattgccctttttagagaggataatacagcttcgcctgtaacagcttcatgctcctctagcttgatagctggaatgtccagcttaagaggatttgctttagcaaactgcagaatatacaaaataaatgcttaaatatcagggatgacatgtgcattgactagtgaaaaagacactaatttcatggctaatacatagaattcagggcaagccaaacagaagtaaataaatgaaaaatattcagcacaaaattgcacgtttaagatattaccggacagtctataaaatcgtgacgtcagaaagttacctccaagtataatcacatttgtctcacttttttactgtttgcacatgtaattggtattagacattttgaagtaaaaagtacctgagttctctgcatcctacagtcctcataagaggctaaaaacatgctaacccagtttgatttgcccaccggccactgcacattaaaagctactttgagttaaggcatatccctatccagccagctcttcccattgccgtccccacaagaacccaaatttttaggtaatgaactggatggaggccccccacatggtacttcaccagatccccaaatttaattccaagctactcggtgcacaagcaacccggaatcaccaaacaatttggatgcagagctctcagggaacactgaaacacagacaagacaatgataataaaaaaacaagaattcactagtgcagggcatcctactactgctaattaacatggatagcgaaacatctctatattgtcaatgggcaactctgcgccgcaacctcgaatcgtatggggcgtatggctggaattgaatgcagcatccacatcaaaatccaccactggaacatgcaaacggatgaggcatagcgaaaagggaagagatcgatcgccggcttgcatcgcatccaccacgaattctagcacgaataaggaaaaaagaaggcgcgtgcaagttgcgagagcccatctccgctcacccacccatccacccgatgcgcattaaaccgaaatacactgtatctgaaacagcaatcacatcatcaccgcattgaacgcttccagcgacagcgtcgcgctcgatcggtgacgccgcctcccgcgagagaacaccgcgcgcagatgtgcgcctcgccgcctccggccacgagcaattcagacgagctaagcaaagggggtagtatatagtacagtagtaggagcgagagggtggcggcgcggggagaggcattttacctgcatgcgcatgaggaggtcggagctgtgcttgagctcgtggcggcgggcggcgaaaccgcggcgggcggcctcgacggcggcgagctcgtcggggtcgcccgcggcggggtcgaactcccagacctggcgccccacgtggccgttcttcgtgcgcagccacgggtcccccccgccctccgccaccctcagccgccacatcctccccccccccctccccctcctcgccgccgatcaaccaaccaaccaaatcgacggcgtcagctgcggcggcggcggcgagagagcgaatcgatcgggagcgcggggcggcgcacgagcacgagataccgccgcgttataatacggaggagcggcacaggctggaactagtggtgatctggattctggcctgctgggttttttttttggctcggcttgggccttggggcccactctttctttgcggttgtgtggtggtgatgtggcactgacagattgggcccacaaatgccacgccggctgtatgaaaaggaggtctcgtgggctgtgtccggatccggaatgtctgtttttcttttcaaaaaataatactattacttccatcccatattacttatttatcgctttgattttttatttataatatctgatcattcgtcttattaaaaaatttagaattattatttattttgtttgtgacttgtttggttatcaaatgtacttcaagtataacttatcttttttatatttacactaatttttcaaataaaacgaatggtcaaacattttaagcaaaaagtcaaagcgacaagtaatatgggacgtgaatagtactatatatagtctcttcgtttttaaatatacgacaatgttaattttactcaaaaattttaagcaagatcaaatataagttcatgcttaaaacctttaataaatcaagtcgcataatacgtaatttttttaataaatattaatggttaaacgtatccaaaaagttaatagcgtcgtatattaaaaatagaggttgtattatctcaagtggttggtgcgtactatctctattctaaatatagtaacctatattagacacatcataatacaacgaatttatagtatcttaaaccctgggtttgaaaagctcaaatgtttttcacatatttcaaatgaaatttgtatgaacagggaaagatatttcatgctcgatagatttcattatacaccactcaatttgcaaaccttttcaaatttgaaattcaatgtgcacgcctttttaaattttgccattgaggatgtgaattctttcattccgtgccgctttatccatttgacgtctgtccactaccactgcatgataccatgacgctaggcaccc

SEQ ID NO: 17940 - DNA, 4338 bp, Oryza sativa
tgccatcaaagaatggttgctgcttttcattttttatgtacaatttatactggtttacttgtacatggagtagatggatataagaaagcacagggattaggttatgccatggggatggcatttgaaaaaaaaaattactcgcatataaaatgcgcatatagaagtagtatgtgtacatgaagtttgaaacaatacttactgaatcttttatcatgtaattttgttattgatcagtccggtaatgtgcaagttaccatgagtaatttcttacatgaagcttgttaatttgaagtttggcgtcactcgaattacaaaacaaaacttccagattggtatttactgatatttttgcttaaacacaatttgcgtgcacagctgcagagaacaaaaatgctgctgaagcatcaaatcaatgatctttacatgacctttgataataatctttacatgacctttgattcaggaagggaagacaaattgagagcaagaggtatggtaggactggagaggagagagccaattgtttgtcatgtacatatgattcttttctcggtaattaactccgaaagaaattatcaattaataaaagccctaaagctaccgattctctcttttttttgaaatattatttttttttgctcctcgttaggagctcctcgattgggtgagctgtggagcctttccttttctctctcttcgggttccccatcggttctgccggtcacgcgctgcatgtgcgtcacgttttgcctccttggagcaaatgacgcgtgctgatatttatgcaaaaaaatcctcgtgtttgaacggaatagcgtgcactgcctcccaccgactaacatcacgttccattttatacgaaacaaccctcgtattttatagaaatacaacacgaagaagatagagttctactcttagggggtagcgatgtaaacataaaaaacaagaggttttttccaaaaaaaaacatatcatacctatcccctcccctcccagctcccacccccaaactctatcctcacatcccctccccacgacgcttcgccgccgcccctcccccttgctctctcccctatcccgccgccggccggcaatggggcatgcggcggcggctgacccagccgcgagcgccagccgtccccatcaggaagccgcggcgggcgaacagggcaagcagggagccggggagcaagaaatcgtcagcgtggaggagcttgcggaactcgacagcggcgaccacaacaggagcttggcggcgatgccggtttcgaccgcgagttcgccacccctccccacctcacgcagatcgaaagacgtggagctccaccacccctcctcgcgcatcgccgcccggccgcctcccaactcctcccgtgctgcgccgcggccctctccccgcgcgccgccgcccggccgcctcccacctcctccccgctgtgctacgccgctaccccctccctcgcgtgttgtcgccgtccttccgcgcgccgcctcccacctcctctccattgtgctgcgccgccgcccccttcctgtgcgccgtcaccactgcaggttcgtatgaaggccgagaaggagaaagagaaggaggattttccggtgatggcgatggtggcagggctgccgatgaggatggggccgaggggtagtacgaggcgtgggacctctccgacaatgaggcggtgctgggcagatcttgggggtggaactccgcggggaggcattaagtaggtcagcggcgcggaggagctctctgccctcgagtcggcgcggggacggtacagactttgttggcggcggcgaggaggagcaaggcggagctgccgccgtgcgggcggcattcggtggcccgtgcgacccccccccttccccaagtgacggcaacgggggtcctccggcggatccgtcgccacacgaccggccttcggcagcggcggatccggacgtgcgcgccctatgcatatgttagcgtgcgcggcgtggcgccgcgcttatacttctagtggatttgatttgcataacaatacaagtcctcggactgtccagctgaaattagccatgaagatataaacatgcactttaagtttagttcacaacccaacagcaaaaatgaaataataataataaagctgaaactacgacttacatgcaaaaaccactacatagaacggaatcatatgcaaaacctgctttcttgtatagagcttgcaatcgtaatcaataaacaaatatggttaaattcaatcaagtggtcttcttctttttctttgacttgagcataacaagacccatgaacacgcttaagaaagataggagaatcacgccagcaagcactgggatcaaaatagcatactcttgaggcagaaagtacttgtggacgaagtgatcactgtcaacaaatggctatattgaaaaaaagaggaacagcttatcatccagaaataaaatcatagatgttatatttgaaatgaaaaacgcctagatgttactaaccaggatgatgacccagaaagtatagtatgtaaagatggatagacttgtcaaggttaaaataaagcctactgccttgtcccccaattccatttgtgcagatattgtacaaatctaaacttgattcagatgataaaatctacttcctacatgcacacaaaaacagtctgcattagaaagcacaccaaatatcgaattgcatagaagtaaaatctcatgaaagttagtcctatttggggaaataaaacaagatataataaacccaaagtatttatacagcacaaaggtggcagaggtggcaacgagatggagacggagagacagtgacaggacctcagcagctgcagcgtcgtccctcacacagtggccttaataggaatacaacagtttgcatgttagttttaaccattcctcataaaataaattatctgaggaagataataagataaaattcagaaacaatattcaggtaagtaagtcagtgtgttatcataaaccctataaatcagagtgttcagagccacatggtattctgaccagttcccaggcattttcctagacaagtttatactcccaaaactttgctagtgaattaccacatttatagagtgcaatgaacttacccatgtgcatatctcaaaaatcgaatgcagtaagcacaataaagaatgtaattaaatatgataaaataaaatccatttctattagggtaatgttataaaattcatgacccacataattttagtagccgttccatggtaaaataaataagagcattaggattccagtggcagttgtaaataaaatccatttctattagggtactgttataaaattcatgacccacataattttagtggcagttccatggtaaaataaataagagcattaggattccagtggcagttgtagaagccccatcactgcttgtactcataattcttctgaagcctagcttcctattgctttgcactaaggtaagaatactctccttatcacgctttctccagaccttgactatagtaatgtgcagcacagcagtgcagataattttagaaaaagattatcctggaagcaataaacacaactattccccaagaaaacctgctgtacatgctacataatttcttgcctcaatcaccgtgtatgtgagttgttagattcaagaattttgggtcattggatttgatgaatgaggtatgtaggagtgaagttggtgaattatagggtagataatcaaggttagcagtgacctgatagagaaataaattaaaatgataaaatttgtcaatagcaatgctatgtcattgttacattttaaaaaaccctcagtgaaattagagccatttcttttcccattttagacggcacaagagaatgcattctgcaggtagtagctgaatatatatcatgttataaaatcccactcaatatctctagcatcatctcacaattaaaggaaaggagtaatgtaagatactaagattgcttaacaatttactcagatttattatgtattgtcaattctgaatcgaaccaaataaaagaagggataatttgcttgctttcgttcaaagtgcagaaaacaaccaaataaaagaaagccaatccaatcacctacttgtttaccgctgatccagatggggatcctgctcccgtcgccgatggcgatgctgctgttccggttggaggggagcggtccgcagtggccgtgaatagaggcgcgaccagtgagatcgcaagcgaagatggtgaggggaccgcgggatccggtgctagatgctccgagacgaccagggttggggttagggttagggtttggagagcgagagcgaggaagggggcggg

SEQ ID NO: 17941 - DNA, 660 bp, Oryza sativa
aattctgctgagaccttggggacattgtgattgattatccgtaagacattacaacccatccattgtcctcttttcttgctttgccatgtagaaggtgaactgatctttctttccttctctcctttgtatgtgtataaaatttatagttatgtggaatgcacttcagcagcaattcaggccctgtactgcatttaaaaagctctaccctggacaccgcaagagtgaaatagacaactgtataagcaaagctgctagctttattgagggtattcaaaaaagcgatggttcatggttagtacaaggacttcacatgaaacaataagaacattgcgtgcatataattgtctacattgtctactgcccttggtcaaaaaaaaaattgtctacattgttcactctgtattttccaacaggtatggttcttgggctgtttgttttacctatggcacatggtttggtgtaaagggattagttgctgctggtaggacattcaaaaacagtcctgcaatcagaaaggcatgtgactttttgttgtcaaaagagcttccttctggaggctggggagaaagctatttgtcatcccaagatcaggtaaattcatttctatgaaatttgcacaatgttactattctttactttttttttttctgtatcatggat

SEQ ID NO: 17942 - DNA, 684 bp, Oryza sativa
cctgtgctctagctagctggagctagttaggtggccattcttctccatctccggcgagttgattggctgactgactggcggcggccatgtggaggttgaaggttgcggagagcggtggcacgccgttgctgcggtcgacgaatggcttccttgggcgagcggtgtgggagttcgaccccgaccacggcacgccggaggaccgcgccgacgtcgagagggtgcgccgtgagttcaccgaccaccgccttcaccaccgggagtcagctgacctcctcatgcgcatgcaagtatatattaattacatacgctcattcatcccttagttttttaaatatataatgtcgctattcgtttattaataaaagtattcagttgttatatacttctattttggttatggttatatcatcactgcagtacattaagaacgacttatatatagagagagaaagcattatgaacggtcaaatatatgtttaaaaatcaataatctcatatattaaagaacaaaggaagtaataaacacgaatggctctgtatctttcgaaaatcaataaccacctcatatattaaagaaaaaagggagtaataaacacgaatggttctatatctcttatttgtatatattatataataattacttattagttaaactgcaatttactccaatactttttgagaaac

SEQ ID NO: 17943 - DNA, 990 bp, Oryza sativa
aaccgcactttctggactggacactacgaaacttcatttttttattgaaatttgttgacaggtgtacaaaagtaacatagtatgtttgaaaggttgtactttcttaaatttttatgagatggttatcgagtgctagtttacagagtagtgcagtagtacttttctttttccacttccatgttcttgagcacaaaaccttttttttcagtttgaaaaaagtggatgttgatccacatatactggctacttggttcagctgactgcatttttcattgtttcagatattaagaaatgctttctccatgctattggaaacagcagaatatctacttaatctaagctttttgtttcaggttgcagcttctatgcaaaaggatgtggatgcacatgttccaagctacccaaatcttccctccaagttgatatgtcttcttcacggtgtcaatttgcatgtacctaaagctacttgccttccattttctctttgctttaagaactagcaatcagcaatactaaaatcattatctttacctatcaggcagacccagatactgatgaagtttatgcacagatgactcttcaaccagtgaatacagtgagcaaacaaaaaattgtggtttccgcaaaagttcctagtctgttcaaatgcactcatcaattgcttttatcagtatggaaaagaggcgttgcaaatatcagagcttgcactaaaacaagcaaggccacaaatggaattcttctgtaagacactcaccgcaagtgatacaagtacacatggaggattctctgtgcctcgccgtgccgcagagaagatattccctcccctggtatgtaggcttcatatcttctgattttctgcaacaaaagatctgttcttagcaccattgtaattttgccactctgcactgtaggacttctctatgcaacctccagctcaagaactgcaagctagagatatacatgacaatgtgtggacatttcgtcatatat

SEQ ID NO: 17944 - DNA, 2321 bp, Oryza sativa
agtcagcaatgtagcaggtgccgaatcgaattccagcttatggaggacttgatcttgatgtcttcttgttgatccatgatgtgagcaatggttgtatccatagtagccatgttcacatcattctccccttcttcactgaaaaccgtcctcggtttttccatatggtgctcttcacacagtccattcaaaataacctgtttcatcaaatcaaaacaaggcaaactcgaaataattttgttagcaataacatttctctctagcttgcatgttttatccacatgtataggagattctaaatctgaacatatgtaaactctatgcaccaaatatagtcctctatcatcagattcgccaaatatatgaaaaatagcactagttggacaaggcaaatcaaacttagcaaataatttcttcttcaaattattgagctcacaaaaatcatcaaactgaacatagcccaaaatatttaaagaagatagcaattcacgttcctgtacttcattagcaatgtgaacaacatgcttaaaattggcacacaaagaaacactagaaatagcatgttcattcactagttgtgttagggatataagtgaagcattatcacacaactcttctttatcacaaggaatagtaagtaaatcaacttgtgacaaaggcaaatcagaagtagtttccaccaaaatttgttctagattagcatggatagtggacaaatgtgactcattagaagcacactcaccttgagtaatatcagcaccatttaatttaccttttatgccctcttcagataatgtaggtgcatcagtcttctcttcttccttcgtgagtgatggagatgacatctcgagcatattgctcttctcctcatggtgaatgttctgagctccctgcaaaatgtcagtaataggaggcacaagcatagattgtttctcccttgggtttattaaaatattgctctcaacactgcaagcaagcatgaacaagttgcctatatgattatatgtcacgttaataagcccagcctgaatattggaattaagccctctgaaaaatctagtcattgtgttctcattagattcttgtaaatcactataagtaatacaaattttaaaatcatgaaagtactccctaacagttttgtcaccttgttttagatgttcaaatttctcaaggaaagcacgtctatagtatgaaaacacaaatatttttctcatcagtattttgcattcatcccaagtttcaagcttatttcccacagtatgccaccaaaaagatgcagaaccggtacacttattactagcagccttaatcatttgagcattagaaaaatcatactcatcaaattgtttttctactgctagctcccaattaacataagcggcggaatcatacttaccatcaaaaccaggcaatttagattctacccttgcaagatcactatcatgtacctcatatgtgatgcgtgaagaagtcgctatatctcgttgatggtgaagatgttgacgttgagcatgaccatctcgtttccccatgcgcaatcctgccatggttagtagcaaataagaaacatacacaaaaatatgcgcgttcctattaactactaggtagtggcagctcaaaaatcacacacactcaagcttttaaccaagctcttacaagatcttaccaatgcaagcggaatggtgacatacaccgactcaaccaagcaccccaatggaggttggatgtatcgatgccttggcaaatacttgctgtacggctgcaatcaaatctgtggagctctaggtaggcttaaatatgtagcaaaggaatagcaaatgctcaaatcagataatgcaaagttgaataattgttcaaagtcaagtaccgtgctggtcctaggctagaacgtactagagacgcgagcctagacacaaacgataccacaagatagcactaggaacaactcatgcacaactctgatatatgaagttcagctcaaacataacagtattttctcttttctttctttcttctttcttcttttcttttttttctttccttttcttttctgtttttttggtgcatcttttttttcttttcttttttttatgcacctttctgccttttttttctctcacttttttcttgattttttttaacaaaaactgactcaaggaccttaatgtaaggttacagggactcaaacgtaaatataaaatttatagggactcaaatgtaaaagttcaaaccaaaattaaaaattatacaaaaatggaatgctgaatttatactgattctgtttttctgaacggatcttgaaacggacaccaaacaaaaat

SEQ ID NO: 17945 - DNA, 936 bp, Oryza sativa
atcccccatccgttgaaaagaggacttggagggctttccatcaagtactcatggacccaaaacggagctcgtatgaaaatttggcggccgtttgaagtcagcaatgtagcaggtggccgaatcgaattccagcttttggaggacttgatcttgatgtcttcttgttgatccatgatgtgagcaatggttgtatccatagtagccatggtcacatcatatacggagggagttaatctacacagagttgctaaaccagaaatataattatgacagcttaggttgtttgactacgaccttattgttaagcttttgtttatacttatgtgaatcgcttatcaacagtttttaaataacttatgagtagaaattttatactgtatactactccctccatttcaaattgatctacatatatatttttaaggttattcctaaacgatatacatatttgtgttcattcattaagtctattcgttatctgtgcttggagtaaatggacattgatgcatgcatccatgcacacaagtatttataacccatatgcaatatctttatttgctattggctaggaaataatggggatggtgcatacattaagtctattcgttatctgtgcattggagtaaatagacattgatgcatgtatctatgcacacaagtatttataacccacatgcaatatatttatttgctatttgctaggaaataatgagtatggtgcatacatcgagtttgttgctagagtaaatatagtaggagagagttattattttttcttggtcttgatgtacttatgaaatatgtaaatcaatttggaatgcaggaaatatatctttagcgattcaaaagtttttaaataaactacaatgaaaacctataaaaccaattccaaaattaaattttacaattcaaaagttaatttataaatataagcat

SEQ ID NO: 17946 - DNA, 2542 bp, Oryza sativa
  unsure (1)..(2542): unsure at all n locations
atgtgtggtctagtttaaagatttaattgcaactaattcaatggtacaatcaaattttaatcagataagcaatttaagagaaaatatagtttatagtttattaaagaggtggctatatgtgtacctagaagagaggagagagaagctattggcttaacactagaggctaaggggacaacggaagggtgtgagggtgcccgatatatttttacccgaatcgggcgtccggcccagagcaatcgcgacagacatgtgtcatataaaatcagatctcctaccgtagatgccaaccacgggtgtgtttaattcacgccaaaattaaaagtttggttgaaattggaacgatgtgacggaaaaattggatgtttgtgtgtgtatgaaagtttggatgtgatggaaaagttggaagtttgaaaaaaaaatttgcaactaaacacggcccacgtgactttctttagacagttcagagttccggatcgtcaggttcaacaagatttgcagcattgaaattgaaattcaggggatttaacattttaacactttttaatagatcagtttaatccctctcacaatcgcatctctcacaaaacggcaaatctattgacactacccatccagagtggcaaaacattaattattccaaaattcagtggtagaagcaacaagttcaggttctaatatcttgattctctttagatagataaagaaaatggtcatattgatgtatgaagaaatattctttggttcgggttcagttgctagtaaaaaaatacaaaaggttaagcagaaaataaaatgaagaaaatcaacgggttaaaaaaaatttaggagaaggttaaaaaaaatgaagaaacattaagggtgtgtttggataatgggataagagtagtgggattgagatagggaaatggatgaaggctaggatgaaatgagggagggataatggatggctaggatttgaagaaactctttggtgggtggaaaattattttcctaatcattagctaaacatgacctaaggagtaatagcgactagcgaccaccatgggtttacgtcagtgtagagtgattcgatcaacttcaaatccatagtaacatcctgctctttaaggtcggttttagtgtagcttgaggggacatttgcgtccaaacaaaagacggatcgatgaaaatatgtcaatgccgccgggagttctctttttcagtagctaaccgtttccgtatttgtttttttttcttttttntcccttcttntgngncncngcccntgnggcaacggccnccttntnctgaatgtttgttgtgtaactaaactctgctatcttcttctaatatattaacgtgcgatttttttgagcgttcgcgaaaaaaaaaatatgtcaatgccgccagacgacgacgaccacaaatggcacgaatcagatttgacaagaatacctgtaacatgattacgaatagatgattattaaatgcatttatctaaaatggtaattttttaagggttaattggatccatgccactgtaaatatgccaattcgaaaaaatactactactattcgcgatatcggctacgtgccactgaaatttagggaaattggaatcatgtcacttccgtccagttttatgtcaaccgccgttatctgtctccttcttcttttcttcgcttctccgccatagacaccggtgagcactccacctcagactcgctggtccttgccactgcctactgcagctagtcaggggtcccctctctatctctcgctacttctccgccaacagccgccgcgacctgtccattcctcatcgtccccgccggcggacgtggcaccctcgctgccgtcgtcaagggaatcagcggccaggaagcttctccggcatggacgacggtgagcccaggaggacgaccgctgaggggaatcggcgaccggggagccgagggcgaagcccggcaggacgagcggcacgggggaaggagatcggtgacggcagcggcgagggttggggacggcgacatggcggtggacggggtggcaatcggcacatgggcagtggccggggccctcgccgggggagtagatgatgacaacgcaggcgcagcccggcccgccgactccgagacgaggcgctcgacaacgacgacaaagtgcagcccggcttcgagatgaagcgcttgacgacgacgacgacgcaggcgcagcccggcccgacccccatctctgagacgacgacggcgacgacacctcctactgcatctatggtggtggagagagaggaaaaggaaagagaagagaggggagggaggtggggcccacgtgcagttgggggctaacagggatttttgacggaaaatgtgatggagtggcacggttccaatttctccaattttcagtggcatatgtagccgatattctgaatattagtggcattttttaattggcatatttgcagtggcatggatccaattaacccttttttaatggcaccatcaatttaaccttaacattgtgggctaccgggggagcataccaattaccactacat

SEQ ID NO: 17947 - DNA, 10048 bp, Oryza sativa
  unsure (1)..(10048): unsure at all n locations
tttgaaatgacccagttaatgatcacttgatggcatatttcttctgttatagaaaaacccaactgcttatgtctaactcacggtttcccttatcgccggtaaccacgtggttactgcggttatcgtcctaaccgtgggggggggggggtataccataggggttaccggtgatagggtttgatgaaatttgtccaaattcaaaattctgaaaaaaattgaaaaaaattcatggaagtagttcttggtttgtagtggcagatggtgaagaattttttttgaaaaagaataagataaattcaaatttgagggcaaaaccaaaagtcaattagaaaatgaaaagaaatggaatgggccttgtttggcactgttacagatagcgcattaaggctcataagagaagaaaatatctcctgggttgttgggggctctcctcacgctcttcctccgcagaaaaactaattcgcgcagacgcgtcagttggttatctcgcgcacgttgcccacacatgcccacatgcgacttttaggtttttttttcgattttttccatatacgcatgatttcctcttttccggatattttttttgtgatttttttcatgaacttcttttaatctaagcgcatgattcaactcaaatttggagtcaaaagttttcaaaattgtagttagaagttttaaatttttagtttgaatatttttaaatgtaagataaatgtttttaattttgagatgaaagttttcaaattcgagttgaaagtttcaaattctgagtagaatgttttcaaatccgaattgaaagtttttaaatctaagttgaaagattttaaatctcgacttaaaatttttcaaatttgatttgaaagttttcaactctcgatttaaagttttcaaatctcgatttgaaagttttcaaatctcgagttgaaaagttttaaaatatgagttgaaagttttcaaatctggactgaaagtttttaaatctgggttgaaagtttcaaagttgagttgaatgtttttcaaatttgagatgaaaagttgaaagttttcaaaatttgacttaaaaattcaaatttcgagtgaaaattttcaaatctagatttaaaattttgaaaatttgacttcagatatagatttcttttcaatttgttagtttaaaaaaatcctaactactaccgtcattatctcaaactgtaattatctaaaactaattgaatagttaactaccttttagtcccggaaaacggggacatctaactccatgccacttttaagatgtggcaattaattattcgccactcgctgtctatgacatgtgggccctcatgtgtctatgatatgtgggtccagtggcaaataattaattgcaccactcgtaagtggcaaatagttaattattcccggaaaacgtgcatcgggggcgcacacgcgccaactaggcgcccccctttctctgttggcagacttggcacagggtgagggaggcagcagcggcgcctaatccgccgcatacgagccggcgagcatgaaaatcgcgcggtttctgaggtaaccgcaactagggaggaggttatcgcctaggagaagtgcctcgaggtaaccctcatcctcctcgcggttaccgctggcagtggatctgtgttttatgcaaggaagtggtgataatcgtcccaaattgcacggtaaccgtggttcctatagcagttatcgcgtggaaaccgtggtttacatagttgaatgttgtgtctttagttcaatgttgaatgtttctagggttcgggtatagtaagtgcaaatgtggaatgttgaatgaaattatgtagtgcaaatgttgaatgttgtggaagatttagtttggtaagttgttgagtacttctgtttgaaaagactgttggaaatattggtaattaagcagtagtgaattcagtgcatccggtgtccttttttatatcattcgtttcgaactacaactttctatattcttgatgcttgcttatcctatgaacaatcatatttgtagtcgtggataatatattgtggactgtattatttcagctttatgtggacttcataatgctttgaaatatgaggtcgttgaattgttgttgttgaattattgtgctataaaatgtttcagctgtttggtagccagcttctgaaaatctggaaaagctctgaaacccagcttctccagcttctggcttcttagttcatttttcagaatctgtaactacagattcttagaagctgtggactgtttgggacagtttctagcagaagcagcttttgggaaaagctgcagctgggacaagctcccccaaacaggaccgttgagttgcttcaatatccacaataaagaaagatcatgccgattttttgtattttacacccaaaagttatacttggaagtatcctatatattcttccaattatccccaatttctacacacatccggcgataactgcacgaatatcacgattatccttccaaaccgtgcggtaactgcgaaaccactgatttttttgaattcaaatttttggagatgaattttgcgcggtggcgctgtgtcgcagcgtaggattatcctggccatcaatcttgtgcatgcgcgtctgcgtcgcgccaatgaatcggtcgcacgcacctgccccgtggtatgtgtatatttccataaatctttcaaaaacacgtgcataattgcaaaaagttcaaaaataacgtatattttcaaatctttttacgctccaatttgccgccttgtagttcaccacaatgacgttattgtcctgtgcatgcatcagcagcagcgagacagcatgctagtgatgatagaggtactccctctacttctatattaattgacgttttgaacaaggttaaagttaaacttttataactttgaccatcaataactttaaaaatatttaaaaatatttagtttaaagaaactagaaaaacataaaattagaaactagagcgtgttattgtccaaagcgtcaattaaaatgaaaccggaggaagtatatggataaccaaacaacctcgcctgtcgacagatccatagatgtaaaacataattagtttctgttagagtataatctcatcggtgtcgaataacgggttcctattgtcatctctagttgttggtacaaaaaggatttttcttagtagccaaatgcttgtcatttgatatagataaaatggccacgcttattaaatagtatatgttattcaaatattaaactattgtataatgttaaaaaatattgggactaatttataaaacatgtaaaagcaaatgtggtggacttatttgcagaatcacaatcatcactattgcaagaccaataaatatgtgggggtttacagttaattaagtgcataaataacaacagctaccagctgattccgttactgaaaattcagtacatgctgaccgctttcaattgatttgctttattcacattctttttgaacgaatattgagcgttcctatactaatagatttgggccatttggcactcattttggaagggcccacacttgatggtaatgcattatgattagttatttttattgttattagatgataaaacataaatagtattttatatgtgactattttttttaattttttcataataagacagatagtcaaacgttgtactacatgaaaaatccaaaactgcgttatttttgggatggggggagtatcatcatcatcaactactctctccgggctgataatatttgtcgttttggataagagtaaggtcaaactttaaaatctttgattatgaataatttctaaaatatttatgtttgaaatatggagactatatggatagattagttttaaaaagtacttcaataaaatcatatatttcttaacacttctattcatattataataaaaaatgagtaaattacactagaggtgcttaaacttgtaacgaggtttcacttaagtccacgaacttgcaaaacgagcatcgagatctctaaacttggtttaatgtatcatcccggtccaaaacctcatttgaccgtggtcttgcttacgtggcatgccacgtggacgatgacatggattttttttattttttctcccttcttctttttttctcccttttgacactgacaggtggggcccacttctctcctcactactctcctcttctctctgacctcactttcccctcctctctatcctctctctcttcggccggttaagcgggacgggcggccggcgaccgaagtaggcgacaagcgggtcggagcggggcggccggccgactggcggagcaggtcggtggaaaaaaacagtgccaggcgaggctggtgagggggcggggaggccggcggcggcaacgacttcatctccgccaccgagctcgcgcgctctatggccgacgcctccctcgcacacgtggccacggtcggcgacctctcctcccgggtgtggtcagcgacgcctcccccacacgcgtgctgctcctctcctctccggccgctgcccgtgcatgcgcgtcctcccgtcggcctcacccgcacgcctctcctttctcgccgaccgccgtccgtgcacgcgcgctgctcctctcctctccaaccgcagcccgtgcacgcgtgccgctcctctcctcccgccggccggcacccgcgcgccgctcctttcttgccggccgccccgcccgtcgccgcttcggttgctggctgcccatacgtcctgctcaaccgcacggagagagagagaggatagagagaagagggaaagtgaggtcagagaagcccactgacaggtgggccagtggtagaagggagaaaaaataaaaaaaaatccctgtcatcgcccacgtggcatgccacgtaggcaagaccacagtcaaatggggctttggaccgggatgatacattaaaccaagtttagggatctcaatactcgttttgcaagttcatggatctaaatgaaacctcgctacaagtttaaggaccgctagtgtaatttactcataaaaaatagtggtcaaagttatcttttaaagaccgtatcgttatttaaaacgacaagtattattaaatctagagggagtaataaacattgttttgtgtgtaagtttaattggtgagacgaggatgaaatggtagttgcgcagtactcttaaaaacacatcatcatcattgttttgtgtctaagtttaattggtgagacgaggacgaaatggcagttgcgcagtactcttaaaaacacattatcatcatcattgttttgtgtctaagtttaattggtgaacatatcatcatcatcatcatcatcatcatcatcatcatcattttatgtctaagtttaataggtgacgttgataaaattaggtaatgcaattaatgcatcccacattaaggactattaattcctccttcattatatatatctccgttttattttattttatttgtttcattatctttatgaagcatgcaaccgacatggacggtttacgggtgcacatgtatctatccgtttaattatatggatgctgatgcatattagaaactattaagtgtggcggatctctttttatagttgctaatggcaaaggcaggcgaatcttgccatctgctagccgtgatgccctattaccctcctcgtctagaagaaccaaaaaaaaaacactaaatattatctgacaaagggtcacacatgttagattatatgagatataacacactacagtatataaaattataggttgtctatacatcatttgatagaaaatccttctataaatcctgcaaagtttagaccacccaattgcattaagatttgcgccagagcaacaaattaaaacccacaaaacctcctcctcatcccctttctcacgacagaaacccacaaaacctcctcctcatcccctttctcacgatacagtcgctgcttagctctcacgcgtccccccccccctcctctcctcccttctggagccatcggtagcgagatgcccctaccccgccatcttccttgtctctggtggctcctcgctgttggatcagccaccacctcctaaccacaagctagctattccactgctaccaaccggcaccgacgcctccaccttccacaaccatccctctaagcccggcaacctcccccttcttctcccttccccttccacccctcccatccccactctaacccgggaccctcatttattggctcttcgctagagtttgggttgtcaccggcattgaagaagaaaaggaggatgtcagagttggagaaaaaacatctagagcatgaatcgaaaagcacatctagtgaatcaaaatctgtaagatttgggaatagattttctatcgacagaagggtagccattctgataaaattactaatatggtgtagaaaagctccacgagtaaacacggttataagagttgtggcttaaaagattaatgtcctcgctgtatatgtaagtgggttgttccatatttataccgaaagtctcaaaattcatggaattcttgacgtttgatttattctagctagccgaggctagtgtaaaataatcttcaggtttcgggtctgcaaatcatacagtgtaaaggctgcgttggattctcccagaagagttggattaaattttggatactcgtggcacgcttttcaaactgctaaacgatgtgtttcgtgcgaaaactttctatatgaaagttgccctaaaatatcagattaatctatttttcaaacttgtaataattaaaacttaattaacacacgttactaccatctcattttgcgtgaaatacttaatcttcatttttatcttcaggagattcaaacaccaccccaagctagcatgttaggcgtgcatgcttcgcttaattctcagattattctcatatgttttcactgccgctaggcgctacagagagcatgtcagtcccatcacttgttcaattcaacctttttcctttccatatctgaaccccttctcatagttgagaaaaaaaaagaaaaaattaagggcccatttaaaatcataggaataaaaaaacagagaaataggaaaaacacaggattctgacaggaatacaattgtaaaacagagaactgtaaaacacaggaaaaataccagaatggccattattttggactacaggaaaaacgcaggaatcagatgagaaagatagactcagaggaaatgttccaagaggttatacctcttgctaactttcctccaatatatgcataggattacccatttcataggaattttaaaggattggatagaattcaatcctttgtttcaaagctttcataggattttttttctataggattgaaatcctccaaaatttctacattttcctacaaatcaaaggggccctaagtggaggaattgattgcattgtataattccaaagtaaaaagacaaattatgttttaggttaatttcattcttttacttagaaatttataagtttttatgatcgattttccttacaatcacataaaacacacacgcccgcagatatacatacgccagtacgtatacatagcccttatcgccagtatattttatgtgccagtactaataattgtaagaccacaattaaagaaaaaagtatgaaatatcccctgaactatcatggtcgaccgaattattccctaaatttaaataccggacattttacaccctaaactatatataccggacaaacaatccctgaaccctgttcggggcggttttgatttcagctatcacatgtggcatcaacgtggcagcctaatcagaaaaaaaaaatcccttgggcccacctgtcatccagcttctcccagcccattgcgctctctctctcgtgcgcgtactcggacggccagcggcggagctcgctcgcgcggctggggacggaggcgagctggttcccctaaatccagccgccgccgccctcttcttccctttggccgcccgcggaggaggcagccggagctcatggtgggcggcggcgcggggatgggaggatggcaacgtcncggggacgggaggtgtgcggggtcggcgactgcgagcttcttcgcggcgccttgggaggaacgaggcgaatgcccagccgctgcaggtgaggaacgaggccggagtcgaaggcggcagacaggaagatcggcagcgtgtggtggcgagcgcggaaggacctgtccgcgagcgtggtacgcaccagcgcagcgggggaagggaggcggaggagtcatcgccgagcacctcgacgccgcccatcgctgccctccgcgccgaccgcaagcgccgacggcgcacctgacccgccgtttctgcctccgcgccgacccccggccgctcgacctggaccggcggccgcacctcgcgccgcccgtcgccggccctcgcgcgccgacccccgcgccgctcgacctgcgcccgcgcggccgccacctcgacgccgcccgtcgccggccctcgcgcgccgaccgtccgcgccgtcccacgccgccgcccgccgtgcgcgccgccgctgccgctcgacccgcgtgcttgggggaggatgagtgagagagacggagagtgagatgagaagatatgacaggtggaccccactacttttttataaatagaaagctgactgtactgttacacgtacaccacgtagaccaaaatcaccgtggattaggtcgaggggggtaattcgtccggtttacatagttatgagtgaagaatgtccggttttgtggttcaggggggtaattcagtcgatcgtgatagttcgggaggtaattcgtactttttcccaaattaaatagctagggtaagggcatgaagaattttacatgaataattccgctgcaatgattctctttgcgtctatatatatctagatatatattgcacactgtaatttgttttataagtttcatggctactttgttccatacacccttttatttgttcttgccgtgtatttgactcctttgttttgcacctcttttcattttctacatgtgtatgttctgatactgtaatttaaaaatctagtaaaagcttatcgctctggattttcattttctttttgaggaaaactgatttttatctttatacttgaatagttagatttcacaacacaatcagagcgtgatgcatgtgagagtgagacgattgagattttatttaggagtgaagtatatgggcggtccctaaacttatgcgggtgtgtcatctaagtccctaaactcctaaaatgcatttttagatatttgaacttatcatgggtgttatataggtccaaacgagttctaacccactccatgtcctgacgtggtattgtcacggtggtgcctacgtgtaagtggaatccatataattaaaaaccataattttctcatataaggtagatagaaaaaaatctaaagtagagaggagaaaatatgtttttttaattttatttttctatgtgattggcacgtgggtccaactaatacgtaggcactatcgtggcatgccacatcaacgcatagagtgggttgtagctcgtttggacctatatgacatccaagacaagtttagagatccgaaaatgcattttgagagtttggggatctaaatgacacacatgcacaagtttaaaatagctataatatgttgcgtggacaaaacaatagaagataaacttccctatcagatttgacagaaaatttacttataatttcagtcgacaggcagattggaccgcagataattcgcatgattaatttgatagaaaaaaatctactcgttctgtcctgcctctttttcttaaaataaatatgaacagtaagcaaacttttgtcaaatcgggttttacaattttatgacatggactcctacgccatcctaaaataagttaatctaatataagatgtgacattttctagcactacgacgtctgtacagattcgtacgtagtgctagaaaatatcaaatctcgtacaaattaacttatttcatcacagcattacagtgggacacactgcgaatggtagttatcccacgtggcatcatttgg

SEQ ID NO: 17948 - DNA, 3202 bp, Oryza sativa
ctgaagaaatcgccatggcttcgttgagacgagctctcgacgagttctcttctctgcaagcagacgacggacactggcctggagacttcagtggtgttatgttcatcatgcctggcttggtagtatatttaaattgtatctgtctctggctaaataatttatgcttagctatttcgtggtttaatttctggtgatctagctaatttctgtacaaataaatgcagatatttgccttatatgtcactggatcactggacactatcatatcaccagagcatcggcgggagatatgtcgctatatctataaccatcaggcatatttttttccgtatatatggacgactgaccataaaataattataatatgctcatgtattcatggtttaataattttaattatagaagaacgtgtgttactccagtacttgcagtacgaatgtttataaaaacaaaaatgggtggtttgcataaattaaagcacgagttcagacttatttgctcagacaaaatataagcatatttttctaagtaacaattaaatgtcattagtataaaaaacactgagtaaatttcccaaaactacatataacttaaccaaactgtgtcaaaactatagatttaagataacgtatcacaaaacacaaatttaccatcaaaattatcattaaaatattgcaaaagtacatatctaataatgtttttgtcacaagactataggttttatttaaattactcgaactatatattattatattagagtaataagttatgatgaatttggtgctaaacctataattttgtgataactttattattaaatctataatattatgatactcgctcttaaatctgcaattccgcgataaatttaatattaattctatagttttatgatacaccattttaaatatataattttataatagcttggttagagaatatgtaattttgtgaaattcactttaaaaacatttgattttccatattttgtgactgcaaattctgcacatgcatgtgttatatagaacgaggatggtggatggggcagtttgatgttgagctcgagcaccatgtttggcacatgttcaaactatatcacccttaggcttctcggtgaagagacaagcaatgagcaattagccaaagggcgcatatggatcatattgcatggcggcactacctttgttccacaatggggaaagatatggctctcggtctgtctactatattatcgcatgaatccacacaataatgaattttgctaaacaattgctttcgttgatttttgtagggttcagtttactttcgaaacatcttgatttatataaacatgactaatataatggttaactaaatgataggtatatttagcactttctaatcgtaccaaccgattcatattttaattaaagtactttcacacgattggttttatagtacaaggttttcactttcgcgccaaaaatttcggccattttggtagaaacgaaatttctggatttttgggattttcggcgttttttagaccattttttgaaattttaacacaatttaactgaatttgactaaattcacaaaaaagttagaaaaatcgaaaatttcaaccgagataatcatttgcctgggtaagaattggaggcagggttcaatctatcgggaaggggaaaaatttcaggggtcaccgaaatttcgaaaatctttcagaaatttcgaacggaattttcaaacaaaatttgaatttaaacaataaaaataaagaaattttaccaagatcagagtatagatgagcatcgagtctattcaatccaaagcagaggaacaggagattgaaacacagtaacacgtaaggatgcgaggcttgtgcggcttgtgtcgtcgtccggtcatcgtcgtgctgccgaagagcgatggagccgccagcggcaactctagccaaacggaggatgcgaggcccgcggcttgtatcgtcgtcgtggtgccgaagagccacggagacgccgccggccactccaaccaacccgccgcctccggttccggccaccgccgcggccgctgttcgctagcttgggaggatggcgacctgctgcctgctgggcgagctgtcggaggatagcgaagcagcagcagcctttggtatataagtgaggaggggataggaaattgaggatttttaccatgaacattgttttgccgaaatttttgaccggagctcatgtttatcaggacccaccaatagacccgaaatttcgtaaatttcgttccgaaattttgaaccctgattagagggaaggtagaaaaaaaaagcccaaaaggcaaaaagaaaggagaaaaaacgaaataagaaaagaaaaacggcggaaaaaaacctaagcccgaaaaaaaaagggacggaggaaaagaaaaaagatggaaaaaagaaaataacagcgaaaaaagaaaaaaggacaaaaagagaaccggaaaccttaattattatatatataggtataaaaaagaaaaaacagcgaaaaaagaaaaaaacggacggaaagagaacaggaaaccttacttatttttcttattaggtatagataagccatatgacttttttctagtcaaacttctttaagtttgaccaattttatataaaaatttagtagtattttcaacacaaaacaaacatattatcagaatatattcaatgttatatttaatgaaactaatttgatattttagatgttgttaaatttttctataaatttgggccaacttgacaaagtttaattatgaaaaaaatcaaacgacttataatataacgcgttgattgatttcggacaaattaatttgattcactacagatacttggagtgtacgagtgggcaggaaacaaccccatcttccctgagctatggctgaccccacaatttcttccttttcatccaggtatatatatactagtaataatcatactgtatactcctacatcaaatagtagctagttgcacacaaatcaaaaacagtttaatggcaatgcctggagtttatatcagacttaaggttcatgaaaattctttaattttgaactgaatttacttttgtgcaggcaaattctggtgcttaactcgcatggtatacctgccgatggcctacctatacggcaagaagttcgtgggccccaccgcgccgaccatcctggcgctgcgagaggagatttactcggccc

SEQ ID NO: 17949 - DNA, 6363 bp, Oryza sativa
agtcaatttatagttggttgttgagaggatttagaatagcccaagaagtctacacaatgtcagtgtcagttgtagtgagtcgtgcaacagaaggttatttttgggaactaatgccgatggacagcactgatgcttggagacggtatgtggaaatggcttttgaacggtcatggcccctcgttatatttgtgtcggtacaagagaaagatataaatgtttcaatgcaaaccgaagatgtagagggtcctatcaatgcaagggatgttgttggaccatcgatgcaaaatgaggaaaatcaacgaagggaggaacaggctatgggcatggcggatgagggggagagagtcggtataattgttgatgaaatggagagggaagattcggataatgaggaagtggacgacgacgcatcatccgatgaggaaggtgatgtaatggccactgattgggcaaatgaggacttctctggacttgttatatcagagggtgatcatgtaccctgggagtataaggagaacgaggtaattgagggtgcaaggtatgctcataaggatgagatgaaggagacggtgaagcattgggcagtttccttgcagagagagtttagggtggtcaagtcaacaaattatgtgtatgaagtgaggtgcatgaaggaagattgtccgtggcgtgtccatgcatataagggtaaatggaatgattattggaaagttagcattgtgaccgagcacaagtgctacttacaaggggtggagaagtatcaccgaaatatcacttcagcttttgtggcaagtgagatgtacagcagtgttgttggtaacattgtctttgaaccaaaatcaattattaggcacatcgagaacaaattcaagtacaccataagctatgcaaaggcctggagagccaaacaaaagatcattgagatgaggtatggcacatttgaagcttcttatgataatttgcctcgtttgttagccaccattgcccagaggaataatgatacgtactatgacctacatacatttacatcggttgatgatcgaacaaagagtatgctgcaaagagcctttttctcattgggtgcttgcatcaatgcttttgtgcattgtcgacctgttctatgcatagatggaacttttatgacaggtaaataccgaggtcagatattgacagcaattgggtgtgatgggaacaaccaggttctacctatggcttttgcatttgtagagagtgagaacactgaaagctggtactggttcctagagagagtgcacattgcagtggtgcgtatgaggcccaatgtttgccttatacatgatcgtcatgcgggtatgttgcgggctattgactacttgcagaacggttgggatgagaagggacttccagctaagtggcctgatgttcggagtcggtggtgcatgcgtcacatgggtgcaaatttctacaagcaattcaagaacaagcatcttatggagctctttaagaggctctgtgcacagaaccaagagaagaaatttaattagttgtgggacaagttggatgagttgacaacgaagcaaacagatgagcaatctcgcagaccactagttgaatgtgacgagcctcccatacctcttggtgcattacatgatgacccaccaacaatgagaaggaggtcagggtcgtccatcagaaatttcactcagtggattgagaatgagcctaaggagaagtggtctctattgttcgacaccgatggatctcggtatggcataatgacaaccaatttggtagaggtgtacaactgggtaatgcgaggagttcgggtacttccattggttgctattgttgaattcatccttcacggcacgcaagcgtactttagggatcgatacaagaaaattggtccgtccatggccgataacaacatagtgtttggcaacatagtgacaaagtacatggaagataaaatcaaaaaggcacggagacatcgagttgttgctcaaggcacacaagtgcatcggtatgaaataatgtgtgttgataggagcaggcgtggtatctatcgcaagcaagccgtgcaggaatgtgtcttgaaggcggatggtggatgtacctgcagttgtatgaagccgaagcttcatcaccttccttgctcacacgttcttgctgctgccggtgattgtggcatatctcccaatgtgtacgtctcaaattatttcaggaaagaagcaatctttcatacatggagtgaggagatatatgggttcgggatctcaggatcttacacaacgctgagtgcccaagttttttatattccagatccatctaagttaagggtgaaaaagggtcgacgccaaactagacgcatcagaaatgatatggatgagtcagaagcaggtgggaggactttacgctgcagcaagtgtgatctgcgcggccatacttacaagaaatgcccgaagaatgcagaagttccaagcggcgcagatgctagtccatctggacaggcaagtgatggtaggcgaccacctggtgaaggaacaacaagcaggcgcgcaaggccaaggtgtcgtcgcgcagcaggcgattccatggtgtaacaaagctttcgatttaggaaataaaatgctgttgtgatgtaatgagtgttcggactaaatacttctatcgtgtaatttcaattcaatgttgttgtaatgagtacctccgactattgttatactagtagtattgcgaactattcggtgttgtatcataatgttatcgtgatgagtgttcggactaaacacttttgtttgtttgtactcttgtttaatatgtgttagtaattcgcttatgaacatttattacttatgttgaactaattatttatatgtttctgatcaacctatttgatgaaggtatggcgtacgacacaccggcgctgttgaaccgtgggattgacaggaaccaccgctcgttcctgtcagcagtcgagggtgcacagctcggcaccttccgtccacgcacgtcgcgcgagtggttgcgtgtcgacccccgtcacgttccttggtacgcgtatgttcacatttcaactcaactttgctttgtgttgtacttatgtttgaagtttgctctatacaggttgcgtgcggcaggccttctaccactttgtaggcttgttgaggcggcggcggacgaccgtgacccagcgaagcggtgggatgcagaccggtcactccttgccgctcttgtagaccgctagagacctgagacgcacacgttccaccttccctgtggggagatggctccgacactgcaggacgtgtcgtacctgctcgggctaccgctggcgggagcaccagttggtcccgtggacggtgtttttgggtggaaggaggatatcactgcgcgcttcgagcaggtgatgcgccttccacacctaggaccgaccaacacccttcctccgtactctacagtcgggcctagcaaggcttggttgctccagttcactgtaagtaaataagttgttattatcatacgtgcttatttgcgaccggatgagtgttttgtactaacatttcattcttaattgtaggcggaccttctgcaccctgacgctgatgattactcggtccgacgctcccttgaggcgtacctgttgtggttgttcgggtgggtgatgttcactagcacccacgggcacgctgtggacttccggctggtccactacgcacggtccatcgcggatgctcagccacaggacgtgccgcagtggagctggggttctgccgtgctagcagccacgtaccgtgccctctgtgaggcgtgcacgaagactgacgcgggagcgatcatcgctggctgccctatgttgcttcagctttgggcagccgagaggtttgccataggtcgaccagtggtggacagcgcaccctacggggttggtcgcagcgcgcagtggccagaggacggtcccacgatggggacttactggtgtcgacgtggggttagtgcaacttcgctgcgttataagtttatcagtcgtctttttttttcttcacataacatgtctaattccgatcatgtttattgcagcgtcgttacgctcacgtccaggtgagacgtggttacccggacttcgtgttcgagtttgaccgtctccagccgagcgacgtcatctgggagccgtacacagaagaggccgtcgctgcgagagcaccgctaggactttcgtccttgtgcacacgcgaccaggcttactggctcaccatcctgccgatggtgttcgacattttcgttgagcctcactgcccgcagcgtgtgatgagacagttcggacttaggcaggtgtttccgggcaacgtgcagccgaccgtcctccctgccgaccactcgtgagttcggattgttcatttctaaatttttatgataattacttcatcgagccatataatttacctctcttcacaggttgactcgacggggacagctagcaggcgcactttgggctccacgtgtacagcagtacgttgacgactgggtgttagctacagaggaggtgatcaacgagctcttcccacacacggaggagaactaccgtgactaccttcgttggtaccttcctcgcactcgtgcgcgtgtgaccttcactccagacgccccagagccgcacgttgccgctgtcacggacgcgtatcccacgcaccgtgaccgagactacttcgtggcggtacgtccaatttgtattacttcttacaattatttcatttatcttgcataatataggacaactactgaattttttatttccatcttgcataggctgatgacgcacgggatatcagtgccgatatcaccgcagtccaagtgaggttgaacagaggtttgcacttgactgacgttgagcagagggtaccttcgaccggatgcggaaagatgcggtggtcatgcgcatcttctcctgtcgcagcccgtgagtcgtacctcagctggtccggtcaacccggctcgcgcgccacgtcgagcagactcgactacggccctgtttcgccggtctgctcagcccagaggtttcttaagtttgtttctgtttttctcgaaacatcaccccgtcgtaacttgatgttccatcctcgcaggacctcgtttgccttcaagcgcccctagcttcggagcagtgcgacctacagcaccggtttcgcacggtacagttcagcccagatattagttcatttttgtttcagcttttgcacgaatatgtcaccatgttttaactgcacgtttcctcatcgcaggacctcgtctgccttcgagcgcgttcgcaggcacgaccggcgcttccgcgagctccgcaggggcgttcgccacctcttcgggcgcgttcgccagctcttcctctcacggagcgtcgatccctcgcccacacggtactttactttttattactactgttaaatacttgtacgaaactgatggtccttgtccagcaggatttgcagccgggatcttcggtactagggcctcttcgtctcacgccggtaggactggtcctactagccagttctacgacgacgacttgcacggtgcacaccaccacgacgtactaggctcctctcagcttggaggagctccagaggcgcacactcaggagcagccagaggtcacacctgtacaggcaggacgggttggccgtgccgtacccccggaccgactcacgtactcccaggggcacattagggcgcagggtaggagggacaggggtaagaggcctcgtcagtagtgttctacctcttcagtccttatgtgaccgtttcttttgtcttacaaacttgtaaagcagtactacttttgctattactactgcagtactacttgtgtttgtctcgtctatatagttcttttcattcatatggtgctagaacaacttatgctcacgacaacacactttcggcgcttcacggtagtgtcagatccagtagcgcgcacagtccacaacagcacacatgaaaagcggcagctcgagttatcactatcaactttcggcgctgcctgttgacataaagtgaatcacgcccacgcgtgatcgtcttgtcacatctaatgaataatgtatctctttgagttcacatatattgcagtgaaaacgacgctatataattgacaatctgaaggcaacctcttcatatcttctttcccactagcacaccacacacaaaaatggaagcctattcattggtaatacgtaatctagatttgagattatgtagaacattcttcactacaattttacattttggcagcaaaccaaatatgatcaaatgcaattttaccttaccaaatatttggtagtgccaaaacttgcttatattttggcactaacaaaatatttgtacggtaaca

SEQ ID NO: 17950 - DNA, 1977 bp, Oryza sativa
tgttggtgatgagcaggaggatctggtctgcccgcggacgcggctgcagaatgcggtgtggagttggctgtataagtgggtggagccggtgatgagcagctgggcgatgagcaagctgagggggagagctttggataggctcatggcacatccactacgaagacgagaacacgcagtacctctgcatttgctctgtcaacaaggtagcttcaatttattcttctcctcctctttatggtcatatcgtttattagatatgtatggtgcattggtgctgactgttagtttgattctggagggactagggtatgtcagatttgagctagacatatcaggattcagattgtttggatatatcaactgatatctgtcttcttattgattctttttaacaacattcaggctctaaacatggtctgctgctgggcggaagatcccaattcagacgcattcaagcagcatcttgcgagagtacctgatttcttgtggctttcagaagatggcatgaaggcacaggttattaacttttgtgtctttcatgcataaattgaatatgtaacatggttaatgcgtctactgtcggtactaccataactttgacaaatgttttacatctaggaaaattttcctattactatctagtgttttcattaaatttggaggaaccaggacagacctatgaattattgtacttccagtgatgttcaattgcataattagggggtacatcagtagaaatatcaattggtatggtaggaataaagctaaatctttaaacatgacacgcctttcgttctacaaaattatctatttattcaaggaaaaaaattgtgatagattgttatctcaatgataggtatatgatggttgccagagctgggagacagcatttataattcaagcgttttgtgctactgatcttgtaaatgagtatgcttctactgttcagagagcccatgagttcttgaaaaattcacaggtacagaatctctagtttaataatctaaatcataaattaactactttataagataatccagcatatattgcatattctttcttgaaggttgttaggaatcatcctggtgaccaaagttactggcatcgccatagatcaaagggttcttggactctttcatctgcagacaatggatgggctgtgtctgacactacagcagaagcactgaaggtcattatgtttctttgttctttcctttttgttactaatgtagacaaatgaagtataaaactagtgtcatattaatctagtcctaataggtgatagcacatcgaataagctcatgcataatttctacgctgtcttccgtagaaatctgacataatttcatttcaggctgtattgttgctgacaaagatatctattaacgtggttggggatcccattgaaagagaaaggctgcatgatgctgtcgattgcctcctatcttttgtggtatgcattttttttaaatacagctatcaaacctgatcttgtaatttcctttcagagtagcccacatacgtgatattgtggaaactatatctcgtatactgttatcagttgtgctaaccaggagaggttaaaggagtctgtcgcaccagacttacagggacaatgggcttaaatatgttacataacctttgtctggaactcagtatgggtgcagctgtgaaatccaaatccaagctcagaacttgcacaacttgttgccaactttatgtggccaaaatgttaaaaatcgaactaaaaatggtgattgtgctctcatagtctcattagtccttcggtttaaaaaaaaagtctcattagtccggggagattccttcagaaagttttagttgtcatggtttaaagatgtgaaaaccatctgctcaacgtattaatttttccttgcagaacaaagatggtaccgtttctacatatgaatgtaaaagaacttctacttggatagaggtgagtttctgcacactatcgcc

SEQ ID NO: 17951 - DNA, 2830 bp, Oryza sativa
tctagcaattcaattagcatactgaaaatgatataggctataaccttcctcgcacaaatcaagtggtttttaggaaagaaccatggtctttacattagataaaaatcaggacatcgacgatatattttttactgtagtaacaaactgatataccatacagtaccttctgtacaaggattttaacacatacaattccatctttaactgtcattgtggaaacttgaaaagaaactaattagatggcctagtttaactcctggggatgttctaaggtgattcagcattacttgtgtgaacattttaagatctatctcatgtgttgcttgtgctcctgtactgatgttaggaacacgttggatgcttcaattgctccctcttcttcaattaccccaactaccgcaacttatttcccatctgggctcttggagagtattgtaatcgtcttcgctcagagaggcgtgcatgagaacatggcaggaaactcttatacatgctgcagatatattgatcgccctgtacaaatattactcggctatacctaaaaaaacaagcaaaatcttctagctccgttgcatatctcggatgtaattgcttgcgatccaatttgatgttgtatatatatattgtcaagactggttatcgtaaattcataacccattggcttttgaggcttaaaaaaaattcaatatatatgatgggttcttatttactattccctccgttttatatcgagtctttgctctgatatcggggttgtcgaaaatgagcttttgtgctcgcttcatgtggttaggtggttggtatctttgacaaattcaatgagaaagatgagttagatgtgattctattgcttcgaaaatgtgtttattgacatgtttatcaacaaatacgctaattcctactgtacaacactgaaactggaaaaaaagcacgttaataatgctaattggagagaaatgtcagaattaggaggaagtatttgcaacaatagtcgtatatgaggaatctcaaactcaaggtgatatctggtgtgttttttgcaattttctcgtgttaaaaagagggttattcatgcagcaatgatggcttgcacaaagtatcaactgaatcttgggcaatcacgtggccttgtctcagcaaagaatgtgaaataccacaaagttatgtcactactattaaactgtcattagtagcaaaatttacatgagtcatatgtgaatatcgcaaaatttgtcaaatctatcaaacgaagcaattaatagccactactatttgtgatcatctttgtgactcccgtgcgaatgcgacagctactctgcttcttcgttaggaaaaacaaaaataaaggcagataaactacgcaaccattgatttgttgtgctcagttggcaaagttgatggtacaattatgacgtttggtggaatttgcttctgaaatttaaatttagacattgcgtgtttcattattttctcacggaatttaatttccggttacacaatcacatgatacaagtagttccttctcttctctttaaaataaaaaaataaaaaaaaccacgtccgtccgattgcgatccggcggttggcatcagctctcgttgactctcaccttgcggccgcagcaaccgccgcccttcgccggccgcgtcgccggcgccggcgacgacgcggtggtgccgtcggtggtggtgcggtcgaggaactcgcggttctccttccagacctcgccgtcgtcgtacacctccttcttccagatgggcacggacgctttgacctcgtcgatgacgtagcggcacgcctccatcgcgtcggcgcggtgcaccgcggacgccgccacgaacacgctcgcctcgccggcggggaccgtcccgaggcggtgcgccacggcgagccgccgcagcgagtgggcggcgcgggcctcccggaggatggccgcgagccggcgccgcgccatggccccgtacgcctcgtaccggagctccaccacccgcctcccctcgaagctgtcgcgggtggtgccctcgaacgtggcgatggcgcccgccgccaggtcgcggacgtggtccacgtaccgtgcgatgtcgagccggcctgacccctcgtcgaggatctccacgaggtcctcctcctcggttgccgctgccgccacggggagctcgtcgctagccatggggtggggttgagatcgaagtcgtcgcgttcgtgggagagagagagagagagagagataaggtttcgtggggacgggagcgcgcccgcgcgactgcgcgaggggaggcggcggccggcggcgcgcgctcgtcgacggttggggacgggaccgagcccgcgcgacggcgcaaggggaggcggcggccggcggcgcgcgcgttggactctggagcggcggcggcggcgcggtggaggtggagattggagaaatgtggggaaggggagggttgacgttgactagggttagaagctatacatatctggttattgggcttcaattttatagccaaaacgactaataaagtctataattggtccctagctacaatgcatgcgggtcaccgcgagggatagggacttagggtgggagtggagcggcctccctgccggccatccccgatagtgatgtgttttggaccattagatttttcttagatggtagatattaaccatcttcatcccctaatacgtgaattcaccatggggattgatgatcggtcccatcgccatctataaaattttgagctatgaagtaatcgagcgagcatgcgctagataaatccaatctgcttcggaatcttcaggtttcacaatatttgcagcatttaaattgaaattg

SEQ ID NO: 17952 - DNA, 6902 bp, Oryza sativa
tgagttctgtaggctagctgaagataggaagatttaagacacgtgcaactatttctcattttgatactatcgatcccatcattccgcttatcctgatgtttatttctactgtttgttagcaaacaaaaattaatttatagttcaaactcctaagcgatataaaagaaaatgttgcaaaataaatcatgaaaaaaaaccttaaaatcaagttcaaaactaaaatttaaaaaaattaaattttagtttgtaaacataagtatataagtataagtataagtgaaacgatgaggaactacgacttcaagtcttcaacgtacagatctgaccaaagctataaatcgttcaaacactttatgttaagcaacattattcatgagccctagcccctatttttcacttgcactttgtaaatacgcatagaagcaataaagattaatctactttcaagagtcttcgatttgtgttttgctcgggtgcggcggttagagtggcgtctactgctcattcagaccgactgcagcagcaacaggtgacggctgcgcaacgggcgatcagcccggaggtatctgtccagtcagacctacgcatcaactccggtcagaccgatctccatcgattcgatggtaacttttaattctgataaaagatttagattttggtaatccaaccatttaccctctctgattagtttagttcttttttgaattcagattagcttagttgttgttgttcgagcataaatgctgaacactaaggctgtatttgagggagaggagattgagaagattgggaagatacgtaaaacgaggtgagccattagcgcatgattaattaagtattaactattttaaacttcaaaaatggattaatatgattttttaaagcaacttttctatagaattttttttcaaaaaacgcaccgtttagtagtttgaaaagcgtgcgcgcggaaaacgagtcagaatctcccctttctcctgtgaacgaacacagcctaattcaactatgaatagcaaattgaatcaactaaaaaattcagtcatgctgactgcgctgctttcaattgatttgcatttttatatactgttgtactgattgatttgggccatttggcactcaatttcgaagggcacactcttgagaggtactgttatattatattaattcattatattcatggtatgtgaaacgaaagcggctgaagatactagagagtaagctagttgtggcacagtaaccatctcgtacttaaaaatgaatgtgtgttgggccagcaatatggtgctagctgatgacggtcgtttcctgtgttatttacaggaccattgaaagcacatctcggtgcaagtattgcccttatccctacgtttaattggtggcatcaagtaaagcgaccgccgtgattaggactaagttttgtgtccaagtttaattggtgggatgaggataaaatgaggtaagtcatttagaggactattcatccttaattatatatttatttcaaattagggttttggtttcgcaatcccttatgaagcgtgcaaccaaacatggtataattactggggtgtgcacactactgtagataaggtaaaatatatttttttacgggcgggtggagcaaccacctagcctagcatatatgtaaaaaaaaagattttcataatcggacatcgtaatcgtacgtgaaaattgatttttcatacatggacaagtttaatatgcccgttaataaaaattggttttcgtagacgagcgaattaagacgcatgattacaatagacttttggcaaaaaaaaataaaaaatttccctaaatccaagattaccaaaattcaaaaaccctagctcccggtgaagtcggcggctgatcaggtagcccctcccgaggccaccgtcaccaaatatgcgagggagggaaagaggcaagagaggaaaggctgtaccgttggatccacgatgcatagttcatagcgatcttcgaatttttttttctcttaaactgcttatcggatataagatccgatcacaccgttatattcattataattaaatctttagagcaacatgtcacattattttgataaaataaagatatattccctccgtcccacaaaaaactaacctaatactggatatgacacatcctagtccaatgaatctggacatatccctgtccagttcattgtactataatgtgtcacatccagtcctatatttacttttattgggatggagggagtatgttttaaccattaaaatttaatgtcttaaatgcgatagcaacatgttcatcatgtgtttcataaatttttaaatgtttcaacggctaactttttttttcatcatatacaacttagtttattattagtggtcgactgcaacatgtgacaacctgatcttttttaaaaaaatggacacctgatttatactagcttaaaaaaatttatcttttgtcaaatcaacatattgcttgttgttttttatgaaaaatgagatgatctatcatttacttctggattggtattttaccaaatttctctagagagcagcataaatttctttttttatatcctccatgtagtgtatcttatatctttgggaattggtttgtgggtattaataaattataaaaccaaatatcttatccttgttaaagcatattctatatgttaggctctacggcttagcagaaatgatatggttttggataaatcactattcaaatcttatgtacaggtacttttcaaaacaaggtattgactccgattttgggcacaactataaaggtgtgatgagaacaataaacttatgaacgctgcatgtcgaaccttaagtcaacggttatataatttttcgccaactttggatagagatttacaaataagcttcaataaatgtagagttttatctagtgttatttggatgtgcttttatggatttgttggtgtgtgctcagaattgagtggatctatgcaataatgggccatagctcgttgagtaaatgacataattttcttccgttattaaaaaaaaaatcaacgtatggcttaagaaaatacaactctttcttggtagaaatccggctacagatgatggggttatgtattagtactccatagaaagaatatccatgaaaaggacaaccgcgtacatcatcagcttatcccaagcggcaccatttggctccaagccctttaaaaagccagcagccatgccaatactatcggtaggcctggtccaggaggcaaagagcaaaccaaacacacgcgcgtgtgcatgctctatagtctatagctaagttagctacaccttcttctccatctccggcgagtacccgttgattggctggcagctgctggtggtggtcgcggccatatacatatagctaaagctgctagctaccatgtggaggctgaaggtggccgagggcggcggcgcgttgctgcggtcgacgaatggcttcctcgggcgggcggtgtgggagctcgaccccgaccacggcacgccggaggaccgcgccgacgtcgagagggtgcgccgtgagttcaccgatgaccgcctccgccgccgcgagtcggcggatctcctcatgcgcatgcaggttcatatatgttacttaaccgctcaatcatcggctaactgacgatcgaccggttatactcttttcctttttttaatatatgatgcagttaggttttatacgtatgtttaactatccatagagaataactatatattttttctaaactgttttatcaataaataataatttatcttttatatctatatataaaatattttcgaataagatgaatgtttatttaataagttactaattaattaattgcaattaacaccaatacgaagtcgtgacagtgttggctttcatctgatatgattttcttggtttcatttcatacgatgttacattcatttcgattttgttgcagtttgcaaaacagaaaaagcttcaacgtcgtcgtgatagtattccaccggccgtcaagcttggagagaaggaacaggtgactgaagaaatcgccatggcttcgttgaggcgagctctcgacgagttctcctctttgcaagcagacgatggacactggcctggcgacttcagtggtgttatgttcatcatgcctggcttggtaattaatattcaattgtatttgtctgattgtctctagctaaattaattcatattttcgagggttttagtgatctaattgctgtccaaaataaatgcagatatttgctttatatgtcactggatcactggacactacgatatcaccagagcatcggcaggagatatgtcgatatatctacaaccatcaggcaaagaaacaaacaaaaaaaaactatatacgggctgaccctaaaataataagccaatatggtttaagattttattaagtatagaagaacatctattactctactgtccacaagtactgctaccactataaaaacaaaaatgtggtggtttgcataaattaaagcacagttcagatatataagcatatttttgtaagtaacaattaaatgttactagtatgaagaaacaaacattaagaaaattttacaaactacataaattttaatcaaattattgtaaaactatagagttaagatgacgtatcatagaactacatattgaccatcaaatttatcatgaagctatagatttaaagtgaaatatcataaaactttagatttcaataacgttgtcatcacaagagtattgattttaatcccttaaacctacagttttgtgataattttattattaaatctatgtttttatgatacttaatcttaaaccaatagtcacatgataaatttaatgctaaaaatatttgtagtttgtaatacaccgttttaaatctatagttttgtgaaagtttgatcaaagtatctgcttttactagaaaacattggatattctatattttgtgacatcaatatctacatgtgtgtgtagaacgaggatggtggatagggcacgttcttgagctcgagcaccatgtttggcacatgttcaaactatatcaccctaaggcttctcggcgaagttctaaccaatgagcaattggctagaggacgtatctggatcatatcgcatggtggcgctacccttgttccacagtggggaaagatatggctctcggtctgtctactatataatcccatgaaaatgcactatataataaatcttgctaaagaattacttttattggggcagtttaatgtcaaaatgctaagctatatagtagtataaatttgagcaatataatggttaactaaatgatatataggtatatttagcatttacaaattaatcgtataaagatttatatttttaagtactttcacgcaattggttttatagtcattcataatacagccgatgataactaacaatgttattcatcaagatcgacctttccaaattaaaacatgcagctcttataaaaatcaaacagagtttaacatatattctgaagtatatataattagtgcatgctgctaactaaatacacgtagcttgttgattcgtttccgtcaacttaatttgaattcgctacagatgcttggagtgtacgagtgggcaggaaacaaccccatcttccctgagctatggctagccccacagttccttccctttcatccaggtaaatattaataggacactgtgttgtgtatgtatatatcctcctacatcaaatagtagcaatataaaacaatttagtggcagtgctcagagtttatattttatcaaaacttcattaatttattacgcatgtgtaggtagacttttaacaggattttagtgagaccatgaatgtgccactagtttccgtctcttaaaacatatgttagagagcgtatttcacgtttttgtgagcgtggtgttacgtatgtagtgatatgtatgtgtatgtttaaaagaaaattcattaaatttatttttaagaataaattttaatttgggtgcaggcaaattttggtgcctgacccgcatggtatacctgcccatggcctacctgtacggcaagaagttcgtgggccccaccacaccgaccatcctggcactgcgagaggagatatacccggtccactacctcaccatcgattgggcccaggcccgcagcgcctgcgccaaggtagagagagagagagatactattttaggctgggccgaatttgttgggcctctaattgggcctaacgtaattgtgcttctttttgggggaggcgtggcccgtcgtgaggcggcgattctcgccgccggtggcggcggcggcggcggcagtggcgactcgccctccttccggcggcgccgttcctcctccatcccccctgtctctctctctcctctaactgttcgtcatgctctggattttggtggtggcaggaggatctggtctgcccgaggacgcggctgcagaacgcggtgtggagttggctgtacaagtgggtggagccggtgatgagcagctgggcgatgaacaagctgagggggagagctttggatgcactcatggagcacatccattacgaggacgagaacacgcagtacctctgcatttgctctgtcaacaaggtagcttcaattttttttcccctttgtgatagtcatcgtcaattacagatgtttgatgttaagtgttaaatttgattcttactttgctcttcatttctagtaagagaaatgggggccatgggccctagttcaaaaaaaaaaagtgttaaatttgattccggggaggctaggatatgtcagatttgagctaggcatcagaattcaaacggtttgtgtgaagcggtatttgtcttcttattacttgttactttaaacaatattcaggctctaaacatggtctgctgctgggcgga

SEQ ID NO: 17953 - DNA, 1771 bp, Oryza sativa
ttgtggtatgcaaattgtaatctccttcaagactaacccccatatgtaatcttgtgaaaactatggtctcattagtctgggtgattccttcagaacgttcttgttggcatgattttaagatgtgaaatcgattttgtcaacgtattagcttttccttgcagaacaaagatggtaccatttctacatatgaatgtaaaagaacttctacttggatagaggtgagtttctgcacactaacaccctaacatcacaaaaaaactccatgattgtgcctacatcataacacaatcaatctaatttatgatgttgaaataacatcagcaacatgcatgtacttcaaattataaaacacgactatttgattcagcacgtcatgtatgttccagtacatttacattgaagaaatcaccagttttattgcaaattcttatggccattccagtaagcctgacaagtcttctctttttccaacctagattctcaagccttgcgagagttttccaaatatggtggttgattatccgtaagtgatgcaattacataaatcctggtagccccttttcactttgtagataaaataactccttgcaactcatactgttctataaattggcagatatccagaatgtacctcctcagtgcttcaagctttggtgctgttcaaagaactatgccctggttaccgtactgaagagatagaagaatgtgttagaaacgcatcaatgtttattgagaacacgcaacgcaaagatggctcatggtttgtagcaagagcattttactgactagtggatattttttctctcttctagtctactccctccgtcccataatataagggattttgaatttttgcttgcaacgtttgatcactcgtcttattcaaaattttttgaaattattatttattttatctgtgacttactttattatccacagtactttaagcacaacttttcgttttttatatttgcaaaaaaaatttgaataagatgagtggtcaaacgttgcaagtaaaaactcaaaatcccttatattgtgggacggagggagtaacaatttgtaacacaataacttggttattcggcaggctaggcacttggggtgtatgcttcacctatggggccttcttttcagtacaaggattaattgctgctggaagaacatatgagaatagttcttccatcaggaaagcatgtgattttataatgtcaaagcagctcaatactggtggatggggagaaagtcatgtctctaatgaaactaaggtaagttttttctctctctttctcaacatcattcattttttttatggttgaataagcctgtgtagttcatttggttggaagttttatgataattggcatgtaggatacacaatggtgattaattagcatagttttttaaagcacgactttaaattcaactagaactggcatttactgcgttaaggatattaggggtgttttgttaatttctcatcaccttgtacacaatattttgccttgggactagatcaattgagcattgtttatccccaaatcttctctagaagtgacatactgaaggtatagtagaaccaacctcacagccctagtaatggtgtgtaccctgctcagtttaggccttgagcatgggcgggcttgttcatacccctcaaaggaagccattcaagcaaatatttgttcttgaattagcatagggtttgaatcacagcccattcatttgatttgttgtgtatgttgaagttattacttttcatttgcaacaa

SEQ ID NO: 17954 - DNA, 523 bp, Oryza sativa
aataacatacgcggctttctggtgccttctgcaattgcttctgcagcagcccataaatgcaatacctcttctgctcattttcttgcaaataatctctagtataatgcatttttctctggataaatcattgcataagaaatgggtacaggttagttcctttaaatattattaatatttgcttaccaatatgatatttttcatgaatattggcatggtatgaaatggtttactaatgagtaatcatcgttgatgaactgtgtagattgtcgcaatgcaattattggggttgtctggtcattttggtcttggaaacaccaataaccttgccagcattgatgttgctggagctttcattgtaagtttaacaaagacttagttaagtgccttttatcctcattgcattctggtttgactagtgaatttcaacagggcatttcaagttactccacagttctttctggcatattgatgttcatgattacatatggatcacctctgctgttgtaccttgggatggtttttt

SEQ ID NO: 17955 - DNA, 683 bp, Oryza sativa
tagctgtaatactatgttccactgcagagaataaatcaatagaatgcaaaaaaaacctctgaacgaagatcgtctactgatgcagctgaaaaggttggcaccagatcagctccattgatgactgtagtgataaaatgcactcctgattctgccagatcccatgtcatacaagcagctgcaaaatagagcatcaacaaaacaataaatcaatcccaatattgcaacttctgtattggagatatggtagtccatcaacattttgttcggagtttgcagtggaaaaaactccatgttcttaagatgcaaatatgcacatggctctattagattcgacaggcctaacttctaggagaatcaaaagtaagcttccaatgagaattggggaagaagagttaagtttatatgagattctaggtagacaacaattatgtttatgatagctccaaacaatagcagtttcaatcttaagatcattaaatcactatctacaccataagttgatctaaaaagataaggattggaaccattgtactcaaacgtgaggaaaaaaacatgtttacttttctgccccaaaatattaagatgcacgtttcaaatacccaaagaaaaaagaacttattcgtcaaagagatatctagtccgttatcctataatgtttactgcatgagatgcaggtttatgtt

SEQ ID NO: 17956 - DNA, 3584 bp, Oryza sativa
ctatttatacagtctgttccataatttaccttgctgaagaatgccattcatcatcctgctggatccttggacattcagaccgccactgccaacattgccactcaaattcatgcgtgatgctatgcttggcacagataatccaccagagcttatattccttccaatgttacttccacccacaatatttcctacagaaccagtgatcctaggacccaaatttcccaaagatggagatactgacatcccaggaacagaattacgactaccaccagcacccaggtttgaggataagccttgaatggtaccaccaatattcaggctactactaaatgctggacctccaccaacattcaatcctctactaccgactcctgaatgaccatgagggatctgcaacaaaacagtaacatggtgaggttacacgatcatttcaaccagcaacaatgtaccttagtttccacaagccgtcagcataaacaataaaattgcaatatggatgaaggaagtcattacaacctgggacatgccaactggaaggttgtttgaagcaaatctcccaggcatgctccctccaggctgttgaaccccagaggatggaaggccactcatggcagcattcctctgagaaaacgatccaggcatatttggcatatttaaacttccatgcatgttgtgcaaaccttgaaaaatggcaagaagatttactacatgaatgtagcattgtgcgaacaaactaaccaagctattttactatatgctcaccagagtgatggaaaccccctggaactgatccagattgaccagaaaaggaccctgtaaacggtcttccagttgagtcttgaagatttgatgcagaattgttcaggtttgactgctaggaaaaaatggcaagttgtcaaaacaaagaacaaagcaggtcatatggaattgccattatcttcaaaagcaaataccatgttgggttaagcagcagcataaaagaataaatagtgcccaaccaaacagattatccaccacagatatattagctctgtcccataatataagggattgtggctacgcatttgcatagacaaaagccccttatattatgggacggagggagtagctgataatgcagtgcctgtacatgcatagcttatttaggcaatcaatgctaatattccctgccatcacagttctcatatggaagtgtcaggcttcaaatttcatatgaagcatctcaacacagaaaactcacgtaaggatggcaaagaatggaagaggacagtgccgcagttgtaagaaataaatgtgtgtataaaatataaataaatcaacactatgttataacagaggacaattatcactttatcaggtgataaaagacaaatctattgctcgttatccacgcgaagctgcagcataagcaaactatttgatgaacaaactagtcagagagaaatcaagtaaaaagtttgaaatggaaaatagggatatcaagcgaaagcacaataatcagttgtaaggataagcacgcacattcagcaggcccgacattgtgacagcaacaaaagcaagtcaatattcaacagtaagcagctattccttccaatctgaaacagaaaatgatatgtgtaagtagtttgaacaaaatggatgaatccacagaaggtgctagatcactaaaactatgtagtatgtatgactccaagggtgaccaaacatttatatgtcttttataataataaaccaacgagtaagcacagagagcaagaggggtaaataatcggtataagattgattacaccagtcttccaataacaaacctagaagtaaatcatcacaccataaaacatactagcaaattttaacggtaaaaagtccaattaaggataattaagtcggtgccataacatatgcagattttaacagtaaaacaaggaagttaaacgttatcatccaactctttaacaatttagaaacatgattagcgccatcaaccacgtagtatgaagagtaaactctgaatgcaggaaacgccaatccacaatccttgatatcaaacgagaaagttacaaaatccccactatccacccgattctccctatcagatctgcccccgcaagtagtagcacaccgatctcaaccctccggcctccactccactctcccacaccgaaatgagcaacaaaccaaaatccaatccctacgaacgtccaggaaccctacggcagcaaccgatccgtttccggcctaatccaaggccccaagcgcgcctgggacggatcggatggggtggaattccacggaacgaccagaattgggggcaaatcaagagggttagggttgcctaccgagagagaaagagggagtccgcccgcgcctgcggcacgagcagaggaggaggaggatgagggatcgggcgcccgccggtggattcggcggaggcgggagggaattcggcggcgcgcgagaagatgatccggtgggttcgccgcggcgcgcgtcggcgatggcgcaggggagggtgggaggagaatggagcggaggaagaagaggggtggagttgggctctctgggccgtaagagcgtgatggattgatgggccagatactttttcatgggccttatcaagagggagggagcagtgagcacggagcacggttgttcgtgtttttttttatcatgtttcacaccttatactctcatgtttttcacactcacatttcctaagctattaaataatatttttataaactattctgtaaaaatattgttttaaaaattatattaatttattaatttagtttttatctactatttaattaatcatgagctaatatatcactttacataactgaaagtgtttctaaacccttcgaaagaacacggccttaactcccaaggagattgtgagaaagtttgttttgttttccgcgtgcacgcttctcgaaatattaaacggtatattttttaaaaaaattatatacgaaagttgttttaaaaaatcatattaatctatttttaaagtttaaaatactttatacttaattaatcatgcgctaatggctcacctcattttgcgtatcttctcaatcttctccaaccattttcgtttgagcttagacttcttggctacatgtgccttttaagctttaagtttattggtggaatatatcttaactttacattttaaaaaaagctactcaaacttagtttttagctttaacagtgtaagggtgacctgtggttttaaaaaagtcaaacaaaaagagtgatggtttatttggacttaagcttttttaaatatggcttaaaaagcctaaataaaaaggaccttagctcattgaagactctgtttagaccattatttgtgctattgtatagatagggcagcatactatttgtgctattgtatagattgtttaaagaattgtattaattcagtatgcatatctaaatatactgttatacgtccaatgttctaatgtgtaaatataaaatggaaaacttctatagattggcagttatgtataccattgcatcccttttcaactcttagaaccgtgatcaccccacccctattgttctgtttatcatag

SEQ ID NO: 17957 - DNA, 926 bp, Oryza sativa
attcctgcagccctttggatagctagattagacagattctgaaagtatgtgtatggtacataaatgccagctgcgagatgaacaatcatgacttgatgtgtcttcacaggctaacaagaagacaagaaacagagcttatgatctacttattgaaattggacgtgcttgtgaagatgcagaaaatgacgggaggaaggagaatttgcaccagttctttggcatggtactttatgtcattactgtttttaaatgtcttgacaggaccaaactaatgaaatatgaggctctgagccataccaacctcgaactgcattacatttgatttatcagtgctacttttatgtttaggttgctggtggtcttgctggtcaaactccatatgcgattagtgcttctgtaactgggttagctcggttaacttatgagttctctgagcttattggagtagcatacaagctcctcccatcaacttttcttctcatgcagaggaacaaccgagagattgtcaaagtacagcacacaacacatttctggtttattagcttatctatcattctcttcacctccttacagtagccctatatttcctattcaggccaacttaggttttatcaaagctttggtggctaaatctaaagccgatgtattgcacgagcatttgaaaggagttgtcgagggtttgctgagctggcaaactgatacaaagaattccttcaaagcgaaggtactggctatttgcttttgatactataaagcaatggcatttctggtggtatttatataaacgctcacaaacaatgatatggttgtttttgtcctgtggaacttttactattctaataactagatatattcatatcaactcatatagacaatatatgacatgggagaaactaaaagagtgaaatatgcatgatatatcacat

SEQ ID NO: 17958 - DNA, 4300 bp, Oryza sativa
cagataagagcttgctagagaagttcattgatcagtcaactggcgagcccctagatttacttgaccagaaaacagtgcggttggctctcaaatcgacgaaaaagagggctatgcctgatgaagatgatgatgaggtggagatggaccctgaagggcgtatcattgtgcgggaagagcgggagaggcgcaaaaagaagcagcctatctcccgagacgacgaggccgacgacaggagcatggtccgaagccagtccgtcaagaggaggaagacgaccagctccggctgggcctacactggccatgactacaccagcaagaaggccagtggcgatctcaagaagaaagacaagatggatccgtatgcctactggccattagacaggaagcttctgaaccgcaggtcggaccgcaaagcggcggcacgcaagggcatgagcagtgtcatgaaggtgaccaagaagctcgaagggaagagcgccgccagcgcgctcgctgctaagagaacgcaaacaaaaaaccggaagcagaagaagagcaagtaaggagacgaagggacagagagagatagggcaaggaagctttgtatagctgaaccgatggcccttggcagttgggagggaaagttttggacgtgtacagtgcttggtgaggattcggccgtagtagttgtttttgctcgtttcatctcctatctgtcgaagagaaacactaggttccattcttgccaaaaagggagattttttgaggggaaaaagggggaaattttgacacccgtcggtatgacggtaccagattcagattagatttaattttcttgtaagtttttgattgatgactattgaatttgaaatttgttgcttcctgcccgctgacacttcgctgtaatggaagatgagctgtagcgaaatttccgaattccttattcgggcatacgcgctaaaacaatcgcgcgatcgtggagctgtacggggatgaaacgcaaggctacggcgtacttgattttttttcatagaaagtgattttttttcttagaaagtgattttaaaaaaaagacactgtcaattcaactttttttttttaacaagggcaaacttcaactgtaatatttaaaactttaaacttaaaaatggaaacaaaattaacttgaaaacttttaactcaaattttgaaactttcaactcaaattttaaaaactttcaattaaaattctgaaaacttttaactcagagtttaaaaattttcaactacaaattagaacttcaaactgtttttaactaaattatttgtgtttttttaataaaaagctaatgctaagcttcatcattagcactattagtgatgttttgcgcgagggactaggtagggtgcatgcggccacacactaatcatatggagcagtttgaaacaagggttaatttgatccgtgacattacaaatgtgcctattcagataattagtctatttatagccatgtcattcaaatttttacaaaattggaaccatgccattgttgtctcgttttctatcttccctatccgtgcgtagggcccgccccttagattcattttcttcctctttcctcctctcttctatttttttttctttttttcccatctctctccaacactttcccgcctcctccccaccaatccatcccgacccactcctcgccgcccgcagcaacaagccaccgacatcgtactcgaactccgcactgatcaagcgagagagaaggctgccaactttgtcagtggtggcgacaccagcatccaacaccaacattgtcgttagctctagcgcttggagtctgccaacgccactgcctccatgccgactatgtgcctctactggccccgccacgttggaccggccttcctagagctcgccggccagcctccgcatggtcagcggggagaaccagcatcaggaaggcaggaacgggcaaagcaccatggggaggggtagcggcgaaggctacttgttgcatcgttggctagaggacgacggctgagctagagcgctggttactcgagctccatcgcagctgcttgaatcaagtagttatttcacgagaagaaggctctagtggcaacaactcgggtttggggatgaccggtctcatcatggagccggcagcaacaagatccagctccggacggctgtaggcgacgacaatgtgtgaaggggtcgagatggattggtggggaggaggctgagaagtagtggagagagacgggaaaaaagaggaggggaggatggagggataagatgaatttgacgggtggggtccatgtgcatatggggaagaagatagaaaacgtaacggcgatgacgtggttctaattttgtaaaatttgagtagcatgattatgaatagacgaattgtaatgacatttatctgaatatgttaacagtgaaatttggtaagcccaaagttaccattggtttagagtcagtatcggcttcaaagttctagaatcagccgatgggagtcaagtcgccacgatgtcgtgttcttggtggagtcggatcaatcaaaggaagcttatctagaagagttcgagttcaagaaggatgcgacatgacagttatctattaattaggcatagtttgttagtttccttttatctttagaaaagtgtgtttagtgtccgataaggactttatcttttccttttatctttaggttagtttctttcttgtccgacaaggacttgtatcaacccatgggtataaatatgtgcacccggggtctatgtaatctatcttcacgatcaatacaattcggcgcatcgccaccttttaccttttctactttattttatcgcccagtgggacttggcacccgacgtgcggctgcatcgtcttcgatctccggcgaaggggtaagtccaatgttccgtcggcccaggcaattgtatcgtctacatcggcgtcgttcaaggctgcatcagtacattcgacctcttggattgctctggtttggatgatatatttgcctagctatttatcatatgtctctattaatctagtcttagcatatcaatttagctctatcggctgcttctcgctttagggtttctgccggtatcggctaaattgcgttgctagattagattggcctaggcatctaccaccctgaaaatcagtcaacggcttgattgtctagatattgtgtttcttttcatacttagtgctgcatcagttaagtttgatctactaaatcgtgcttagaactataatctctaacctgctttctgactgccaataagggtttcatcggggtttcagccggtgaattatctggacgttgcatcggctcataaggattgcatatacatataagttggatttcgccgatgacaacaaaggtttcactgtttaatctaatcttgtggatttcatgacatcggacctccagccgatttgttatattttattatcagtagccgattgcctttatatcattatatacattggacatatagccgattgcttaaaccctatcgctatcggctggtatcgacatcggctattatcgactatcggctggaactactacatcggcttgtcagccgatcggctgttttgatctactatttacatatcttgtcagttgcatgatcaaactgactggcacgcccgcatctcatcgtatttggacctgcactggagctaagcagatctcccaggccggtgtgttcgatttttttcgtcaacagaataggcatagttgcaatggtacagatcaaattaacccttgaaacaagggattgaagcctactaattcctttgaatcctatggaatgagtacctattggtctctcaacagacgatatgacctatcagtgtgttataaggaacaataccttaggactgattttttttttacaattttcgataaaaaatattgttacttatttaaaaattcacaaatctaggtgatatgtcacatttagaattttgagttttaatctttcttggtaagttccaagttggctagatgcaaaagtttatatatgaaagaacattgataatggtggggtggttttgaataggcatttttgaaaattactacttagcagcggtgtaaatctatccagaggatcatgccagaaacatcgaaacttccggttggtcttctcgatctggacaagagagctgaatggagtttccagtccttaggttcaaaactttcgatcccctagtttcttccaataaagagggtgatagggacaatcttcatggaacaagcaatccaaacacgtagagaatgcaagaacaacaagcaataacagtt

SEQ ID NO: 17959 - DNA, 1717 bp, Oryza sativa
agactttcccttaagtaggcaagagacaatccccatgagagaaaggcatgaaacaatcatcaatgagatcgcagagacaagtaaatagaatggtttctgcaaatataacagtaaaaggaaaacaaatcaatttgatcttaaggtgaaaggaaaaatgtaacagaatgctacttcacactagggttgcaaagatagtaaaattacattggtcgctctgtgagacaaccactcactcgcatatcttaagaattcatagtaggcgttgacagcagtcctgttgcacccagcttcaatggacctgaaaaaggatgtatttttaagaagtgaaggttgatcatattcacaacagtttagaggattttaacagcagacgcttacttgacattagatgtctgatgaaggtgtgaaggatggtgggaatcaaaagctttagaaagcaaatgacacaacttcttctcaacagattgaggaattttatcaattcctagaccatactttgaattaatgcaatcctcaaagcagaaagcaggtaactgtgcttgcaacaatcttaagaattgcaatgagttcagctctaaggtccgcagtttttgctgatctgaaataagatgcactcatcatattttgagctgaagagttttgagtactgaatcatgcaatttgtaaaattccaatattccagaccaccagtttaactgagaactagcataatgcctgtgttgcaacggattttttttaaaatagctcattacatatattttaaagcctataaaaatatagtctaatatattatcatcatactaattctgctgttactttctaggtgactgttcagttagctataggggtcagacatcacaaagtcttgtctcactgttcgtgggtcttacatggtagttgggtggtggtggtggcagacccacaactaccactaacatcttttgagatagtatagatatagacatagcaatcaactaaaggcatcgggacacatgattataaatccatcaaaatcctattacctattgaaatcgttataaagtcgacatgcatcaaatatcttaaatttttttatgaagtatcctgcatcctgatgaagcgcaagaaactgaaaacagaaggtaaggatagattcacctgtcaaagaattaaaaacctctggaagcacaacacctatattgttcttcggaattggtgtcccaaagaggagagataatgttggcgcaaggtccacctgacaaagaaaaaagagtagtcaatggaacactactttaggattgttcgcaagtatagcttagatgatgacaaaatgagtggtttataaataaaatattcaacaacaacaatgatttatatatgaaaacatactcgatgagtggatttgccataggtatccagagataaagaaaggatgaaactacattcagtgatagagtaagagttatacctgaagtgcttcattctggtcataaggtgaacaatatgaactctgaacactgtgtcctataaaaagggcaagggagtcagtttcttcataagaggatcctccatgattaccaccttcggtcatgccatgatcactaaccacaacctgaaatgtcgggcggcagaaatatgcctatgagatttaatgtagacctttatctttccagaaaaggcacagacttgatcaacggttgtaaacactactgaacttaacaagctattatagtttgct

SEQ ID NO: 17960 - DNA, 14890 bp, Oryza sativa
caaggataacccatcagataatcagaaaccacaatcaataaacatcactactatttagaaaggcgccagaataaaagttattaagcatacatgtatcaaatcatcactacaaacttcaccattcactagtggactttgtagtaatctcttacagatgtaggatcaaacttgtttgtcacaaacatacatgctaccaggaatcttacaaaatttataggactcagataggatcacaaaccaaaagtgttctgtccaaattatcttcaaggcctgatacggcattgtgcactcttctaatcacatcatccatctccttcagcttttggggcatcaaaacactgtaaattttaaaattttaactttacttagacaccattcaaatagaaaaaggcatggaagatgtatggtatttacctctgacggccaccaatgtggccaacatgatctaagcccaaatagtggagaatctgaaattaacaaacaaaacaaacctgattagtacataagaatagaacacttgcaggataaccttaggaaacagcacaaacaagggaagacagtgtaaagattgttagaacacttatcacaagaaacattaattggatacttggaataaattgttgtaatccaaagacctatattttactataagttcacaaaggaatagaacaagtgaacatgaactaagccaagaacataccaacatgttccagtctttggcagcaaactcagattccagatgacgagaaacattaaaatcaacctcaaccgtatctttcacctgacatccagtcacaatcattaaattaagttatacaggtagaaagactgaatgcaaaacaaagaggactgctattagcctattagcaaaacccaagcaccaaatcacaagcttaaaatacctaatacacaaatatctatagttggcaacctactgttagattagagtttcacacgatagtaagtttattttatcagtattccaagttcaagtacactctcatctttcaatcacattatcttgtgaaaaaaaaagcatgtgatgcatgagaggaactcacataaaaactgctcactccatcttgtctccagaataattttgggaacaatttgatccatgtctcatctcccagcatcactaacttataaccaatcatgtggagctgatctgcattggtgtgaacatattataaatatagctcataaggcattttcttgtttggtcaggccagaactgatggatgacgcagaacacagaggatgatgaatttgaccaacatgttgaactcaccatgttggcaattaggtatgcaaagaagatgattaatacaagagaaggataaggtcaggtatggagaggttctaaccaagaagattgtcatccaagaaggcttgagtattgaagttaaatgctacatctagaaaacctccaattgccccagataccattgcctgaaagtataacatatttaggattaccaaatacttacacaaataggaacctctatatagaatcagtcttacttttagccgtggcatcgtgacggttggaggtgcagctttcgcatgataacctgttgctttgcaaccagctaacagagattgggtgtagggcatggattccaccatttctttgcttggaggttttccaactctccccaatacgaattcagcaggaagcccatctataacctaaattgacacgcataaactcaaaatgccaaacattaaaagggtaagaataaagttgccactgaagcgcctaggattatgctgtgagaagaacaggcacatcaattttgtgcataccatcaacaccaaacgatcatacacaggagggacctcggagagttcctggaattaatcatagcacaagcatgagcatcgcaacactaaaaaaacactgcacagtatgaattaacttaacatttcaaatcttccatctctctatcacaagtaatgcgcagcagcatgagatgaacctaagccggaggaaccgagatgtctcaccctgtacagagatctgagctgatccggcggaagcgccggttgctccccgccaccggcgagaccacacgacggcatccggtagctctccgctccactgcggccaccaaccaagggtcaatcgaagcaagcgccatcgacagccgctgatagagcagagcagaggtagaggcgcgaacctgaacccgggcagcgtgggcttgacggggaagaagccgtagaggaacatggagaggccaaccacctgcagaagcactgcggtcacggtccaaccggcgaccgccgcgcaggaaggggaggcgccaccgccgccggccatggctgattcctcgccggtggccacgagacagttcgaacgggctgaagtgacgaacacttctgggcctaatggcttcaaaatgggccgtgggaagtacactagcgttggcccaaaatcaaaatgggcgttaaattgtatcgattcaattttgcttcgacaaaaatttgtcaaatgtgcaattccatcctaacttacatgtaactacaatgtattaccttcatatattttaaaaccattaggttaactttaaaatttatgtaagttgggaagaaaagaatcatagcacgcacacaggtgagaagattcagtctcacgatctttgtttcacgaaaatagcatattgtaaagaaattattaaaattacatatatattatattgtagttacatgtaaattataataatgtaatcacattataattatatatattatatttatatttgataaattttgagaagaatttttatatagtagcccccattggtttgggcccaaacaagcccacaaaaatattttgtcaccttcgtgcgcgttcgccgtttgggataaagcgtctcctccccctccgcttcgcgtcggctgctgctgctgctgctgctctctccgcgctgcgcttccgctgctctagggtttatctcctgctgccgctcggatttcgcggcgagcaatccaccggagatggcgcccgtgcagttctccgccgctggagttggcgcggtggccttcgctacgaaggggatggcctcccgcgacgcgctccgcctcccgccgccggcggccgtccgggtgctccgccaggcgccgcggccgtcacgcggcctcgtcgtcagggccgccgccgccagcgtcgccccgaaggtgcgttttcagtgcaatgtaccatggtgggcacactggtaatgctattctcggttcagagtttttcacttagagggttagttggtgaatcgctggattgggtattgcgggcaatgctattacgatagcgatgaaatcgacgatgattccgctgggttaactgatttatttctgttgaatttaatgatgaatggtgatagatggatatccgagcccgtctggtgtacggtgtgccctgtacacacctgtattgctgtggtggttagctcatggtgattgctgattaggaagttttaagattgtgatgcagtgagctgtgatgtgtctatcgctgctttcccacgttgactaccgaacttactgtcagactgatgaatgatgaagtgcaaatcagttttggaaaaaaaatgaattatgtatccttgtaataaaagagtaatgaagtgaattatagctactctatactttatattttaattattatgagcaataaaataatgacttacaagtacactatggattcagtgaagatatcgaaagggggggggggggttgaaagcaattctatgcttaatattttagtttattttccagaaaatatatttgttatgcttttcagtgatgaagttatgttctgttattcacttgcagtatacaacgctcaagcccttggctgatagagtgcttgtaaagattaagtctgctgagcagaagacaactggtgggattttgcttccttcggctgctcagtctaaaccccaagggggtgaggtagttgccattggggagggacgaactgttggggataacaaagtggaagttagcattcaggtatatttttctttgcaatatagtgaaaaaatatgtatgatgctttctaacagaatcaatgagccttactggtacagctattcgactagtcattcatggatcataaagcattgtttcttccagttgtctggagcatttgtttccatgtatcatttggttggtaggttccaaccaacctgtccaaagaactattatagaataataataaggtgcgaggctcgcctgttccagcctccaggtacatgaatacagaaatcagacctgaaacaaaaagagtaaaactggcggatttagcattggacccgtggctaataatccaataatgagcatgctgaaaagtcgggtatgataaagttgttaaaggatttatgttgcctgttttgacttaagatgtttcatattttattgaggtgaatcttacttgattgtttttttaaatttctcgaagtgtgatcattttgagtgtaaacaagctattactgttggcaaacaaaagaatatatactaaaatgcacatatgtgacttgcataggttggatcccaagtcgtatattcaaaatatgctggaacagaggtggagttgaatgattccaaccatctgattcttaaagaggatgacatcattggtattctggagactgatgatgcaaaggacatgaagcctcttagcgatcgtgttcttatcaaggtggacatttcttatacatttgtctggatagcagtgtaatgttgttgattaagtaggcatggccaactaaagctgaggccgccctccttttgattgtaataatttcttcctgttttcctacccttttctcatactataggtcgctgaagctgaagataaaactcctggtggcctattgcttactgaaacaacaaaggagaagccgtctattggaacggtcagtcactcaatttgttagttctgctggatattttgtggttttgatcaaagttaaggaggtaatgatgtgttggttgattggtgacaggtcgtggctgttggccctggtcctctggatgaggaaggcaagaggattccattgtcggtctctgcaggcagcactgttctatattccaaatatgctggcagcgagttcaagggctctgatggcacgagctacatagtgttgcgggtgtcagatctaatggctgtcctctcctgaattaccaggtgcgctcagctgagccatccatcgtactatgccctttcagcaaccatcttttttggaaaatattgctcctggagataacattaaagccactcgaatccccttttgttacaccaaaattggggtggtggtatatcatactgataaattataatgaatgccaactttttttggttgttttcagctttgtaatgatttatagaaaaatgggagaataactcctaacctttgcaccaatcaggatgcacatatccatttattaatcgtagacgctagaatttgaacccttacggcaccaatcaatggtggggtttggttgggagcttattgggcataggggaaccggggggttatcgttgaactcactactttttaagtaccaggtaggaggtgcgaattggtagggaatttcctctcttctgagattgagggaatgagagtacagggtttggactttggactgtggatgtgggagttttaggtgggattggggtggagagtttgtcctctaactccctcgcttttaataccggggtgggggtgggaagagccatccatcatcacttaaaaagtcgaactaaactttgtctcggaactagattaagaacaaaaaccaaactcttatgactatcctgccatcaactccctctaaactccccttcatctcctaagttactaccaaataggcccgtgatactagcgcttggtatgcgtgcttaaggtcccattcgacatggatattttgttgggttacttcctcgattttcattagttcctcgattttcattagcacgtttcctatactcctaaatgatgtgtactttacaaaaacttttcatattgaagtttttttttaaaaaaatcaaattaatctatcttcaagtactacctccgtttttaatagatgacgccggggactttttcttacatgtttgaccattcgtcttattcaaaaaatttacgtaattataatttattttgttatgagttgttttatcactcatagtactttaagtgtaatttatatcttatacatttacataaaatttttgaataagacgaatggtcaaacatgtgagaaaaaatcaacgacgtcatctattaaaaaacggaggaaatatataatagttagttaattatgtgctaattattcacctggtttcacgtgtcacaaatagctcagctcaaatagctgattcacgtgtcactatttggtggtggcctaagtagcccataagtgttagcaatgtgttttaagtataatattagaaagtttagctgggtaagggttagcttataagtcttgatgagttaaaccttttacacgtagaaacgatgaacgtgtaagtggggtacgatgtgaacaaagaacaaaaatctaacgtgtagaatggattaatgcagattttagaagctaagttgagacttgagaatgaaattgtaagggcatgtacaacggtgtgtaataacggattctcttcgttcccatgcaagtaaaattgatgatgtggaagagagagaatggaggaaagggaaacatagttgctacgcataacaacgggtcagagtcgactcttaacgtttattaaaggaaattttgttacatggaggtggagaaaaggaaagaagggtataaaaaaaatttttggtgcactaatgatcaagagttcttgttgtcttaactattgtagtagaatagtctctaagtgatatgcgttaactaaaagaccatccatcttagactttacctttgttcatgccctactacaacacaactgaaaaatatcgacaaatttgtacatatcctatctaagccatcaccattacattgtgaatcttcgctaaaattcccagagcacctttcatattccacctctattcttgtcccctcattgtctcacccacaatcccatgtatcctcatgcaccctccttttttttttgtccgcctcacgaactccgaccgcgagctctacacgtctcgaccgaccgagatacgtgccgcgacaactattcgacaaagaaccacaaaaacaccagcgccgcggcgctaccgcgcttagctctagcatatgcttgtagcaccacataaaccatcagttgcttgccgcacgtatctcggtcagggccctgacaagtgacaagtcaatcattcaacattttatttttcatttgaataacaaccattcaacattttgttctgaagtacaacgactcaacatttcgagcttgttcaaaccttaacattttttagtaatatcaaattttgtattaccaaattttattgtggtaaagaaaggtttgcggtctttgacgtgaggccttttcaaatttcggtagaagtttacgagaattgaagattccaaaattaccaaaatatggtagagttgtgttgaaaacagtattctttagtgaacaaccccttcagtttgtttgtgcttgttccaactcattctcctctttttccacgcagtgtgttttttttagcaaaaaagaaaattataggaaagttgctttgaaaaaatcgtattaacttattttttaatgtttttagctaatacttaataattgtatgctaatctattgctcccgtatcaggaggtgagtctcacataacatagccttagagcaaatttaatagtatagccaactactccaattatctatagtcaattcatataatagttacctataaacatatactatatccgtcttaaaatataacaacctagtattggatgggacatatcgacgactaggatgtgatgtgttccatcatgtcccaaattgttatattttgggacagagggagtactacccaattaatacatgatcatacctatcatatacacatatattttggaatcatggagttcgtcttgcagcagctgcaataaatctgtagcccgctatttttctctctcctatcttattatctttttgaaatatatttatagctggttataggttatagtatgctattgttgttgctcttgactcgcaactatgcggagacacccgcgcgctcgtactacgtggccgcaaccgatggcacgcgctggcagggtctcgcggccggagcgacacgatctccttggcaggtagcagcagcaagcgagcgagccggccaaggccaaagccgttcgtcaagccggaatcgcacgatccgttccatggtcgccatggcgagccgtctccacgtactcctttctcactacagctcctcgcctcgcctcgccccgccgcttgggaggctgggagcccgaccgaccgaccgcgcgcgagccgcgaggtcaaaccgcttccatgctttgactctctgaccgttctgtgtcgtctctgctgtgctagctagctccagcctccaattcattcatgatacagtactcctccaggagtactctagtatgtgtgattccaggcagcagctatatagctcttgaattcaaagttcaaagtccatctatatccaactttattttacggcggccaaatctcggatctccctgtatgattatgatccaaaactggtactactgcatagtgacagatcactgtagtatcgaataaaggagagagcgatgcatgcggtgtagtcaaacagtattgattttgacaaaaaagaaaaaatggatgcgtgcgtagcctggtaactgtaaaattatacgactaaatttactgtgaatactttataagccgagtcgtcctccgccttctccccatcatcttaggctgtcttcaggaggatgggttgggaactcctccccgacatgcacaacaaaaaaaacatattattgcacgattaattatgtattaactaatttttttaaaaaaaatggatgaatatgattttttttaaaataactttcgtataatttttttttacaaaaaaacacaatgtttagtaatttgaaaagtgtgtgcgcgaaaaacaagagatgtgagttgggaaaactgggataagaactcaaccttagttccccacgtaaaaggttgttagtaaaaagaccaccgcacctaaagatttgtgtttccagacaaaaatcaactagtataatttcaatcttgcagtaacttttttattattttttagagaaaaatattgtttacccggcctttacatctaatcggatatatgcagccatttaagttgagaacttagtcccacaaacaatccaatataaaattcgctcatatatagatttaaacttaggacttttggatgctactcaggttattacgaccgctaggttacatgctttttttatggtctcgtggtaactcataatgcatgaacatgacactaataacttcaaaggaataataaagtatcgtggctcaaattaaccacgtataattaactctgaaaggaaaaaaaattgtcactttctagggagtatcttgaggtaataaaaaatatacatgtccgttaattcccaatatactatggagtaatagaatatcataaataaataaatatgaatgtgccttaattttacattagacttcctttatttctaaataattttacattagacttgatccatgttactccctctatttctaaatatattttttctagattatttaataagtattaaggttaagcaaaaaaatattatcttttagttatcttattgattaatttttgaaattttaattgcttggattcccctcacacccaattgtattggaatctgtgtcaccaagatgtttatatcgtgtactttgtccattcaaaattctaaggcagacataaaaaaaaaatctaaagtatgttttattttttgttttttaaatgagatggacatatttgtaatctatatgtagtaaattaaattagtcatcttaatactaattggttagatgtatgcatataatttattggttttatcagacgagttaattttatttttatcttgatgaaaagaaattcaaccagtcaatcgagtagattgcattaaggatcatattagtcacatgagctaactattccactttacctatttgacccattcttactgctgacggatccagtttacttagcccaatcatcatgcggtgcagtgccagaaaggtgctagtagggaatccacttttgttctttaggtttcattccgacctgtcggaactcagggttgttgccacaccacacgttatcaaagaaaaactggtatcggaggggccatggatatccggtgcaccccaattctcttatttcttttaactccactttcatataatttaaaaaataaaccaatcaaaacttactattaaatctaaaacctcttgttcatgtcatcctcgttagtgacaacacaatcttacctaaaagaaagactttggcgtgacaacaatgaaaaatatttgactagcataggtggtgcggctaaaaaggttgttttcaaaatacatattgtagtgtttattttttatatttaaatgagacaggttaaaaaataaaataaactgcagccacgatcatgagcaatgctttaattttgctcgcgcaacttaagaacaaaggacagcggtcaagattcatggatgaatggcgatgaattgtttgacggaaatcattttgtgctggagtagtagtacgtgaagcatatctggtagtagtaatttggtagcatggatgttcattaatccagtgatattttcaacacggaggtgatttgcagttgtagagacatgttcttctttaacaatgcacttgtgcctttgtatcaagagagtaagagacacattttgtgcagttcattttgcattaatacacattttctcttcaggatttgctatttcacttgcgatatatttaggttcgtatctttcactttttcattcacaaaatcttgcatcaagaattatattcttatatatcaacttatagtacaatcagttacgcagcacttacacgcaattacggtgtatcaaaattagattttacaatgggtttttctgtagatttacgatttttgacatgtttattttttattgtatttaaaatgggttatatccattggtcagaaaaatttataggtaatcccttctccttaatttgcccggtacatgttccatccactattcagaaaataatctcattatactaaaacagagtgcctcaacagttgatgataacaacatactttctccgtttcatattataagactttttaacattgctcacattcatatatatgctaatgaatctagatatatatgtatgtctagattcattaacatctatatgaatgtgagcaatattagaaagccttctaatctgaaacggaggtagtaactaataattatgctatcataacataatttttgtctttaaaaaagagtatatcgaataaagacaaaaggcccaccggccgatatatctagtagaatccaagttaggatcgaaatcaacctcaacctagtcgtagtagcatcgcctcgctaagctttggttgctggctgacaccttgcacgtcgccgtccgacgcgccatggcgagtcaacgcgtcgcacccgacgacgcatggcgacggtataagtagccgaggcgaccccgccaggatgatccagcagcaagcaaacccaaagccaccatcaacacagcacgtacacgtacgtgcaacgtcactgcatgatgtcatcgtcgtcgccggtggtggcgtcaccgccggagatggagaagaagtacaagggtgtgcggcggcggaagtgggggaagtgggtgtcggagatccggctgcccaatagccgcgaccgcatctggctgggctcctacgactcgccggagaaggcggcgcgggcgttcgacgccgccttcgtcacgctccgcggccacggcgccgccggcgccgacctcaacttcccggactcgccgccgtcgtgcgacgcccgcagcagcgacccgcggcaggtgcaggccgccgcgctctcccacgccaaccgcgcccacgtcacgccgcagcaggcggccgcggcgctcatgtcgccgccctcgctgtcgccgccgccggggttcgccaccggcagcgaggtggtggcgcccgccgtgcgcgccgacggcagcatcgactggcgcccggtcatggcgcacccgccgccgctgtactcgccgcccggctggggcggcggccatgcctacgacttcttgcagccgccgccgccgtcgccgccgttgccgtcgtgcgacgacgacatggtcgacgtcgtagatgagagcagcgcttcgctttggagctttgacacgcgagactcctacttccgatactaattacatgcatcgattaatgcattatgcatgggatcagctggcattgatggtagcttagctgccccacacacacacaaattcattaactagaatagacggccattaatttagtttctacacgttcgaaacgttttttcaaagaattaacgatattttgcgatggtcgtgtgcatatgtcttgcatgctaaatggtatcttattcaaagcattatgggtaaatagtactcaccaatatgaaaagtagtgaggcaagttttgtcagtaaggttatatatgcagaaatgttcattgtattttaactccccttttagggaaaaaaatgttttagggggggtagttgaggttgtgcttaattacttaatttgatgtatgtgatctgatctgcacgcacatcacacactgcaaaatgagctcaggcttattaacatgtctatttcatgagctaaagctttgataaaaagccttcatgttcttctagcagcaacttgtcacataggcaaattttaaagacgtcattttcaagcatgtgacattttgcaaggtagaactggaatatacaatgatccaactgggcgatgtgatatatacaacacagtatatcagttcggtgtcgcaatcggggtttacacttttgtttttcaccgaaattccagaaatttcgaggtcaccgaaattgaccccaaaatttctgtagtttcggaacattttacacaaaattatttagaaatttaataaattttgaagaaaaaagagaatttcgggtgagatatttgcatgctggagggtagcgaaaaattgcaatcactagtcggtgacggatagtcccaatggataatttacggatagtgccgaatacggaaacggatacggatagtttttttttaaaacggaaatgaatatggtaggactagcatccgatggatatcggaaaatgttgggaactatccgcagttttatccggatatccgtacgtagggatcaattttttttaaaaaagtatatatacataaattaaggatctctcaaggaagtgaaaaatcatttttacatgtgggttaagaatcaactataaaaattaattttcacaaatgtttatggaaccgtgtaggtaattgaccatatagaatttagaaatgttgacttattattttaaaaaaataacaagcaatatctttttcattgattcagaaaacccaattagaggggttttttatattccgataagtaatcattgctatattcgttttgtttcgtagtcgctccatatctttattcgataatattcgattttatttttatatcgatgtttttatcctaattccaattaaaaaatgaaaacgaatacaaatagctagtttccgtgtgtttccgatcttttttgttcctactagtcgcaatagttcaactcttcaatccattgatcaagaggtgaaaaagacacagtaatcttttgtctcaatgcgtgacaatcggaaaaagctatagaaagatgctgcggtccatatatcagtgacacaaggaattaaggatctatgccagacagtgagatatgagcacaaatggaattaaggagtatttaattaaattaactcggaaaaatgagatgtagcatcttttatgacatgatggtgacttgcaaatttaaacgttcacccacttctacttcttcacggcagtggccacagcacgagacacgttgataaaaccgtatgtagggccctttaaaacacgggatacaataaaactgaacagaaaaaactccctctattttttaataaataattccattgacttttaaatatacatttgttttatttaaaaaatgtataatgtataggatataaatcatgcctaaaatactttgagtgatttaacaactcacaacaataaattattattacatatattttatgaataagacgaatgattaaacgtgtgaaaaaaatcagcgtcacatgtttatctaattttagagaaatatctaattttagagaaatgtaaaatacatgtacgtcaaatagtatccctttggtacatcaccggaaacaaataaagcaaatgatagtttctatgaggttggacctctcacttattttcctataaaactaagtcgtaagaatttagttttgtaaaagaatttctattctttcctatgaatgaaatgattatgtaggaatttttcttttgaaaaattaaatcctccaaaattcatattacaatcctcaatgcaaaggagcccagggtagcttcttcatcagcttcatcactgtcaaaacgtaaaacaaacacacgctattacacatgatgaaaaaacatagcattaggtaaactaaggcgactatggtaactaccgttgcctcacattttgtattaagatgactaagttttgtcttatcacatcttttggcaaacaaaataataagagtga

SEQ ID NO: 17961 - DNA, 18655 bp, Oryza sativa
  unsure (1)..(18655): unsure at all n locations
ataggatgtttgtctttctgactgtcaacgaactaacaaagtaacaatgacactttcctctgcacttgatactgccatttctcgaccatgtgaatggcgtgtgcaaattaccatctgagcacaacacgtgtataataagtgtcagcaaatgggcaaattaccatgtcagcaagtttacttttagagtaattaaaacatttatacttctattctttatggcccaaaagcgaagcctaaaaatagaaaacaataaaataaaaaaaacccaaaattaagtttcaagtttaaattatagtcgtggcttataagccctacccaattccctattttttgtcagaaaccaaaagagatgtgaaaaaacccaattaacatgaaaacaagagatatcttattttattttatgcataggatctaaggctgagttattatctcagtttttctaactcacatatctcgttttccgcacgcacgcttttcaaattgtcaaaaggtgtgtttttttgtaaaaaaattctatacaaaagttgatttaaaaaatcatattaatctatttttttaaaaaaaaatagttaatacttaattaatcgaatacttaaaaaaaatccgttttacgtgccggggaacacaccctaaatctatactacttttgaaatagtagtggtggcagtaccaccccacggtccactatcaactccctacttttgttaaagggttaattggatccatgccactgcaaatgtggcaaatcaaaaaaatgccacacatattcgcgttatcggctggatgccactgcaaatttttaaaataagaaccatgccactccatcatgatttccgtccaatctgtcacattttccgccgtctccgtcttcatcttctcgtcgtcctcgtctcaacggcagcaccagcacggcagtacgaaggcaggcgcggatggcagcacggcagcacggtggcggatggcagcacggcaccggcgacggtcgtgccagcgtccgctccccgcgcccctccgtgacctcctcgccgacttcctctctctccaccaccgttgcagccgtcgtcgttgaccatctccgcggtggacccaccgccctcgccgtcgtcgaccttatctgcgcgggagagctcgggagtcgccgccgccattgttgtcctcgtcgtggtcatcgacgagccgcaccgcctctgcccagatctggcgaggagggccgctcgtcgttgctaccgatggaggaggcgtcgaccctcgagctccgccgccgttggccccaagctttgtcactggtgctgccgacgcccatctcctctctccacacgaccatcctcggcagcagctgcgcaccctccgcgacctccccgcgagcgtcctcggtggcggcggcggcctcgctcacgaccgtcctcggcggtagcagctacgcccgcgcccgccttcacggccatcctcggcagtagctatgcccccttcccgacctccccgcgagcgtcctcgccggcggcggctacgcccgcgcccgtctccgtgaccgtcctcggcagcggccatgcccctccgcgaccgtgctcgtcggcggcggctgcagctgcgccctctccctgcgcttgcgactgtcctcgccagcggcagcctcgttcttgctaatcgccttctccccgtgcagacgtgagagagagagaggaggatgacgtcgtgagagaggaggatgaaaatagtgacaggagtggcatggttctcattttaaaaatttgcagtggtatctagccgataacgtgaatatgtgtggcatttttttgatttgccatatttgcagtggcatggatccaattaaccctttgttaaaagataaaaggattgtagtcctaaagggaacacatgtcaatcacctctaccatccaactctttttttaagaaaaaaaatgatgtaaggctagatggtccatatatcagtactttctctgtttcacgatgtaagattttctagcattggctacattcatttagatgttaatgaatctagacatatgcatgtgtttaaattcattcacatctatatgtatgtgtgcaatggtagaaagtcttacattataaaacagatggaataacaaatatatgtataaattaatacgtgatatataaaaaaaatatggtaatagcgggttaatgatctgttgcaacgcatatgcaatatgctagtgactaccaaaatttaaacaaaagattattgtatcacatattagctcacaacaaacactacatatgtaaggtcaaattcggtccatggatgaacaaagaaatccaatgtcaaatgctctcactttttcagtttgtttatttttctcgagttataaatcaaattcaatcttacatgataatctatgttgactagctttttaagagtattttttttcttagctactagaaagtatgaaaggaagtgctatcaaggttctggggagctgtttatcatgcaatataaatgcatggtcactacctggttggtcacataactgtaacacggagtcacgtactgttattaagagtagtcctcgtcccttgtgaatttggaggtacagcttggagaattcttctgacttttgacgggtcaatcctcatgtaagagttgtcaacttgtcaccgtcaccgtctgatcatgagatctcacgaacgtccacttgcaaagttacttgccttgaatgggaaaaggccgtgttaagttgttttcgcaaaaaaaattaacctacacggacacgcatttaaagtattaaacgtagactaataacaaaataaattacagattccgcatgtaaacagcgagatgaatctatttagcctaattaatccgtccttaacaaatgtttactgtagcaccacattgtcaaatcatggcgtaattaggcttaaaagattcgtctcgtaatttacatgcaaactgtgcaattgatttttttttctacatttaatactccatacatgtgtacaaatatttgatgtgacagaaaagttgtaaggttgaaaggaactaaacacagccaaaaataatgtgccattctctctctttgcaggatatgatgcactgcgagcatatggaacattttttgcaaacacaaggaaacatggtagaagggatatgtttaaggcattttataaggaatttatgaaaactgaactaaattctgtgaaaaccgtagaaatccatatgttttatggagagctcgctccaagtttggcgtcctggcatggcaataaaacgtgtgcgtgtaacgaacggaaaggcgaaatttttcatgaataattatggcacacaagaaatgtatagtcttgggtttactatcttgagcctccttagctttatatatagttaattattagacaagtgccataaatttcctgagagtgacacttagctaacacacctgacagtcttgagacaaagaaccgaaggatctcattaagaaaaacaggaaaaaaaaagaaagggatttgcacggcacgcgtttggatagactataaaattgtacctttttctatggaccacgagcacacatgcaatgcacaagcagcacaatgcgtacaaacctacctcacagaagcttctcttctacctcttggcttcgctgatcgatcaagcttgtgttaattgctaacaatgtgatggtcctgcttataaatcatggtacaaccgattaatatgaagatccacctgggagcatgatcaccttttgtcttgtggaagaaatcaatttgcttcattgttccttcggaagctcagaaaagtcagctgacacattcagagatcagacaactcgtttcttaaagtgaatagtcctgttacaggtctttccaatgagtttgatacgggaaagcaaaagaaattacgtgtggtctgacctcacaggtgaacgtgattcacaactgcttgatcatggtgcagtgtttgatccaaatggttttgaaccatggaaattttttttcccagaagctgcaaaaacagcgcaaatagggtaagtgaaagtgatgtttacagaacagtggtgacatctctctaagatttaagaaacctttatgttgacattgcaagtacgtaaaccattattattgtaactaatggactaagtgttgtttgttaaacaatatatagcaatgaactcactttttagttttcaagcattggttctgaacttctagttgattccgttgacaagtctacaggctgcagaaaccagcagtggcagtacaatgatcagcacggcaacagtgataagagaataagaataagagcacatgtttgtaaatttatgtggttgttgatgtgtgggatctaataacagcgatagccatgaaggaccttatctgtttgtactacaaagattggcatatccccagctatctgaatccctgactctgacagttacttgctacacaatacctatcaatctctcagaaccacaaaaacatctagtaatatctatccatggtgctcctctttcacaaattgataaagatgtgtagtacttgttaagaacagaacgaattgggaacaagagtggccataagtagatagaatgatggtatgggtgacttacacttggctcaggctgagagcaggaaagatttggttccctgtcctcagaaaagaaagttcaccacttcctcaagctctgtccaaccttgcttcatgattgatctcttgttcacagctttcactcctgaactccttgtcatgtaaccatgcagcttccactgtaaaaaggaaacttgaaagataaatttataaagtatggtagtaaataaaaataaaataaaaatgtaacttaaacacactttactttccagccgtctagctccaccaagagtccaggtctgagggaggtgaaagtgaaaaaagaaaaagagagcaaaggtacaaaaacttttgccaaaattcataccactctgacaattgacatcatcaagcaccgataaaacaataattaacatcttttactttcagttgggcagggatggtgaatggccaagtgtatttctaagattgcaaggttgtattacatgtttggcagcaagaacaaaatgctggtggacaaatgaaatgagagatacaattagccactgcattcaaacctatgaagaggtgaatctcctatgtatatacagttctaatctcaaaaaacacagaaagactaaaagaacaaaaatgaggatgggaatgccacccatgttctgctgttagccttagccacctatatcatcatatgtcataatcaacttccgtgctgtttaccattgctgcacgcttaacaagctgcccttgctcattgtagagatccaaattctcgcatggttttggaaacactgacccgatgacacgcccctcaatgaaggaacactggaaaatatgtttcttcttgtagctgatgccgatagacatgtcctgaaagctgatgtccttgatgggaatgtcactgctgccatgagcacggactggcacccggacacctcgcccatgtatttccttgaatgatatgtttgtgatgtctggaaaggcatcccggtcatacccatcatcagcgtgctcattgtagtcaacctttatcacaataccagcacggacattgtcgaaggttatgttgcgataggagatatcgcggatgtagccccctcttcctatggcagtctttattctcaaacctcgccgtgactcccaaatgcggacatcctccactgtaacatttgcaatcccaccagacatctcactgccaattgaaattccagcactgcacacaccaagacaactgttgtaaaccttacctgtaatactctatattcaattcaaaagaacttaaaagttaatcctaatttaatagtttctttctcataccattttatcttgagcaggatttgaaaaagatatgcaaagaaatattttagatgaagcaatgcagccaaaaatgactcaactgttacctgaccaatgaacgagccattacattgcgtatcacaatgttacgagatgggcgcccatatgcaatcccatattgatcccacccactctttaccgctatggcatcatcaccaactgaaatgtagcaattctcaataagcacatcctgacaagaatctgcatacagctatatgtcagcatcaccaaataaaaaaaatgactgtcattgataacagaaacaaacctagatggtataacaagaagctgaaattatgcaggatgattggaaattactgaagaaaggttcgtatgattacctggatctatgccatctgtgtttggagcactagaaataggagctaagatagtaacattagaaacagttatattcgtgcaatcatatgggtggaagtgccagaaaggtgaattcttcaatgttatatttgcaacaataatgtccttggaccacatcagctgcaaaagaggaggtcttgtattattcagtatccttctgcgatgcttcatccaccaaacttcaccctgtccatttatgctaccgttgtgtcctattcaacagagaaaaaatagggagcatgtgaaagttaaataactatcatccagtgaagaagtgatacagaaacaccaaatgctctattagtgcaaggatgagaaccaaatgcatactggaatctctatagtacaagtgtttccattacagtggacttgcatattatacttagcaaagtatcagtaaggaacacaacaacaagagaataagagtgttttaactttttatttattttttacatgagcaggtagtgcgattatgcatactgaaagaaagttcattcagaccaggggataaaaatgggttaaacagttgttttatgtcaccataacatactgccaagtaggagaagtttccatcattaaattgcttaaaattcacaccatgcacttctgtcactgatgttgcttaattcacaattctacgactacatcattaggtggtgtagtttattcagaaaacacttcaaacctgtaatgactacatctttcaaattttgtccatgaatgagacttccaaagcgaggtcctttcctctccctgccatacccataagacggcaatgcaggcatgagcggccaatacctctcgtcctgccatggaaacataaggaatcggtacacctgtcaatcaatatatgcagctctgcgcatgcatctgagatatcacagcatgttttcaaagaccttaattagataaattatacaaccaggacagaattagcagataggtgaaaactagatcatccaatttccacccttttccaaatttcaataacattgatatcacttgagacttcagtctcagcaacacataagacagaaacaaattatccattcataccattgatttctttagccatgaagccaataagcaaactcacttttattcagctatatgcttacccgatcaaaaccactcaaaagaactaatttttgaacttcacgaaaagactatgaatgcattgcaaaattaacagcatcactccagttctattctacggcgtgaggtacgaggtatctttctttttcctttttttttttttttttgcggggaaggtatgaggtatctcaccggaatgccaaggatttctgagccctcggcaagaaatagcgtcatgtggctggtcaggttgaacggcgcggtgagccatcggccgggaggcacattgagctgccctccgccacgctccgcgagcgccgcgatggccttgacggcgcgctcgaacgcctcggtgttcaccgcccgcccgtccccgacgccgccaaaatccgtcagttcgtacgccttggggcgcagcagcggcgccgggcgcgacggcggcggcggcggcgccgaccgcagcctgaggaacccgccgcccccgccgccgccgccgaccgataccttggcgctctgccacaggaacaccagcgtgaacccgatgacccacgcggcggcgagcagcgtcttgttggccgcgaggaacgcggccacgctccgccgctggccgtgggggtggagcctcccgccgccgccggacgtctccaccattgcgctgtccccgatgccggaggcgagatctcccgatctagggcacggcgcgcggcgaggctcagatcgatcggtagggcaggacgcggcgagctcggattccgcggattggggcggaggcaaggggcgcagggtcggggatttccgccattggaggagttggtggtggggtttataagtggagggagcctttcgagtgaagtggaagcgagaaagatgtgggctttttgcggtgcggttgaggggaagaagatgatgagaattaccacactgccatcacgtcacgtgggctgcttcgtgccgtaggatttagatcggacggtgcgtattttatctcctcggaggatgtttaactacttacccacaggagtccagaatccacataatttagaattttacagagggagtttttctgcaatttccttatgaaatcatgcgataatagtgagccattttaggttatgttttttttccaaatataaattaaccaagatgttcagccggcctcctttttctccataaaaatattgtagtgtggaagagaaaatcgaaaggcaggaactttagtcgggccttttctttctctttgccttgtcaatgggcaacccagtcatcctgttcttgttatactccacttttccacaaagctgatgcaaaagacatatatattcttctttttctccccttatgctagctactacttccgtccacgaatacaagtatgtgcgagttgtttagcaaatattaagatttagaataaaatactttggtattcctcgttaaagaaaatatggtcaatagtaggagggtggtaagataaaaaaagagagagaaatgattaataaaacaagtcgtttatgaaatatttatattatagaccgatatattttaagattgacgaagtacacttttcacttaaagattattagcgatcaatgtgagcaactgtgtcaagtctaggatttgaatccagatgaattggttttacaaaaaaatcatttatatttatgaataaatttcacacgcttcgtatacttatatttacaaagagggagtaataatcagctagattggccgctggctgttagctaggactaacacacactatctatacccatactcttctccagtagtacatatcatgaggcgatggttaggtgcggtagctggtgatgagcagcgtcaccaattcttcctggacgccgatcgatcggttttggcgtagcagtcactactcgttgctctgatctctcgccggatcggagttagctagcgtttggtgagacgtgtctctcgttaggcgaataaaggtgggatatagctcatccatcagttgcagctgtgttccagtattgcaaagatcagatgcctgtgctttggatcatatatatgttctgaagatctgatctgatctgatcacttagagcacctaattgcatcaattcagatgtaattgctgcatcaatgcgcccgtgtcggtgggttatggagatgattatagttaatgcaacaagaactgcttaattactcatcatcaacagtagcttagctaactaagtaccgatttgatgtaataagtttcacttcgaaattaaatcaggggtaaagaattccatagttttctacttaagttaacgccaacttacaagcgatgttggaaagttgatcgaattggtaaatcaaatgtctctaaattctctccattgagggatctaaagtgaacttattcccatcgatgcagcagagacggcaagtttcggcccatttataaagcccatatggggatccaacccaactcccgttgctttttgttggacccacttggtgggaacggcctggcactacgtgggccgtggcccataggaaagggaagtgtgtgcctcgcaagcctcgtcgtctctctccggctcgccgacttcgctcgccttcctgccgtcgcctccggtgccctctgctgctgctgccggcgcgtgcgccaccgcagcggcgccatcgccgtcgccgtcgccgctgacctaacgtaggtacgcctcgatctcgatgtctccaccgccactccccgaaccctacggactccctcccaatcacgccgccggggtggcccgcctcgatgcctcccaccgtagtggcgcgccgctgggttccgatttgactggctgcgagcaaagctaagagggtgatggggttgatacgcatctcggttggtttggctgtgcttgcgcgatttctctgtctaacgggtcctgactcctgcgttggtacatatatcgggagatgtgggtgtgatcacccgttgcgattttttcatgatttatttgtttaccgaccactcgaatcagagtatcacttgtgttggaccaaatctatagtatcgattagctgcggatttagcatattgtttgtatcgtgatcgttgtgacactataatggctatgacatgctcttcttcttctgatgatttcaatggttcagctgaaaaatgaagagacaacttcccataaaaggtgcatcgggggcctcgggatctgggcatggaaagaaagctcctcaggagctggagaacgtcttgaagcaacatttcggatattcaggctttcgaggaaagcaactagaggctatagaagctgttctttcaggtgctcttcccgtctgtgtttgtgcttgtagtctttatttctttttagttttgctgaatatttctggtcaaaagaacttttgttgctgatcactgaagtatgctgtctgaaacttttgtgcaccatggattctattaatgtaacaagcaatttatttctaggaagggattgcttttgtttgatgccaactggaggtggaaaatcaatgtgctatcagattcctgctctagtgaagtcaggcattgttcttgttatctcacccttgataggtgaattgatccaccaaacttcagttatttccagaaaaaaatagtacttgacaaatgtgcatatactaatagcttcttgatatggttgaaaaatctgctgcttagcactaatggtaagctgtgttatctgttggtatctttttattgttgttcctgaatactatggatcatcatggtttatgaaaattacaggagaatcaggttgccagcttgaaaagcaaaggtattccagctgagtttctctcgtcaacacaaacatcgcacaataaacaaaaggtaaggtttccacattgtgcagattaaggtttacctaggatattatcaattatttatgaaaattttcgactctttagtttcaactgaaattttgactctataaattcatagctggctgagtttacctggtcacatggttagttcggtatgataacactcttcctcttgactttgtaatttgtcatacatgcctttctcccagatacatgaagaccttgattctggtaatccttctctaaaattgctatatgttactcctgagttggttgcaacatctgggttcaaggcaaagctaacaaagctctacaatagaggtctccttggtcttgttgctattgatgaggtataaattaagtagtgtctttactcctctagtaacaccctgttcttcttttatctgtgatgaagagcatctgtggcttattttgcattttttgtctctacaggctcattgcatttcaacttggggccatgatttcaggtatgcatttatttttagtgtttggtggtggctacttgctttcgtctgttgcccgtttgcagattcattggttaaaaaatgggttgaagcattcctccttgttacagaatttgtaaattgttctactcattttaatgaaatacagacctagttaccgcaagctttcatcactgaggaaccagttcccagacatacctatattagctttaactgcaaccgcagttccaaagtaagacactatccccttaatagtcactacctgccaccatcacttctcttgatattttaatctagtgttttctattcacacttcattctctttttctttacaccagagtccagaaagatgtgatatcgtcactgtgcttgagaaatccattaattcttagggcatcatttaatcggcctaatatattctatgaaggtaagttttccaacttatgggttcttgaacacttagcttgagtgcaccgaccttttatctttagactggggcatttgttttcttggtatgttgactattcttctgtttttacatttccatgctttccatcatctattgtggacgcgggacagtattactgatgttcccttccctcatgattatttagtacttttcagttatgtatctcccagaacatatggttcctgtcaattgtttactgctatgcctatattttgtctctatgttcaattctctcttaattacatattataatataaactactttttgcagttcgctacaaggatctccttgatgacgtttattctgacatatcaaatttactgaagtccagtggaaatgtttgctcaattgtgtactgtcttgaacgtgcggtttgtgatgatctaactatgcatttgtcacagcagggtatctcctctgctggtacgttaatttaaagtcacaatttctaagtcttaagacctattaggactgttgaattgagaattttcatggcagtcctgtgttctccttatcagcttatcatgctggcctaaatagcaaggtgcggagttctgttcttgatgattggctttcctcgagaactcaagttgttgttgccactgttgcatttgggtatagtttccctccacatcatttgaaatatcatttctgttatgtgacatgctgattccatgtctacaagttccagcacacatgtagtatctgagtactgttaccttattaccttccaacctgtagtacttgtttatgattgattttggcttctgtacttatattatatattttttccaaatgaggctcttactctgtttccctctacatcgcctctttcaatacgggacttcgtgtgcattgatatgttgattctccttccacagaatggtatgttatactaattgttttttttttgtcagtctttctgaagaagtgctttgctaatacattgggttttatttttttttcagggtattgatagacaagatgtccgtattgtgtgtcactataacttgcctaagtccatggaagccttctaccaggagtcaggacgagctggccgtgaccaacagccttccaaaagtgttctatattatggattagatgaccgaaagaaaatggtaattaggtgccagattgtacattgtcattgaacatgaaaactgaggcttctatggtcttactcttacaggaatttattttgagaaacaccaagaacaaaaagtcagagttatcgtcctcttcaactgaactttcagagaaggccttagccgactttagtcaggttggtgcactcttgctacctaacatggaattggtctactatatcatgcagtagatttcatgtttttttttacttgcatctcttgatgcagataattgattactgcgaaaattctacctgccgacgaaaaatgatcattgagagctttggggagaaggtatgacattaatcctgaatatattactaatactccctccgttttttaatagatgacgccgttgactttttctcacatgtttgaccattcgtcttattcnnnnnttttatgccnntgtctcncatatanctcacacttaaaagtactatgactaataaaacaactcatatcaaaataaattataattacctacattttttgaataagacgaatggtcaaacatgtgagaaaaagtcaacggcgtcatctattaaaaaacggaggtagtattttctagttttttacttccactattgcatgctaacctgtaaaatgagtaggtacaaccaactttatgccaacgctcatgtgatgcttgcaaacacccaaatctagtgtcctcacgtttggaggaacttcgtcgtgtgcccacctgtcgctataacaagatatccccagtcttcaaaaggtatgttagttgtgaactggaattttccttcatgtactcatgatgttgccttttagagagaacgcacattgcataaacatttttttgacctctcttttcatgcaaaataatataatgggtatatccatcaagatagaactgataacaaatcttatgtgaagtagttgaattttgggcaacaaaatctacctttttcgatcggcgttggtacccctacttgttcatctataactttttctcatcggacagtggcacatagcatttagtagactcaagacagactaagtggagtaatttacttctggattatgctgtactaataattcatttgcttggcagctcgttggctaatccaaaacacatggagacagaattttggaatcgtgaagatgatgcaagcatatcagttgaagatatatctgattccgatggtagagctcaccttttcccctctttgtgcgtatatggtcactgtgcactaatgtctgtggggtaatggcagatgggaaggaggtggtgagcaatactgccatttcaaagctcccatcaaaagcagggctagatgcaaaatttgaagcattggagcgtgctgaaaatgcttattatcaagctaaaggtcagaccaagcagcaggtgatagtttgcctttttgtgattcttgtttctttcgcaacaacaatgagttaataactgcttataaatttgacaagacatatttttgaaagaatctatcacgttgctcagctagtcataaacttcaactagtgatataaatagggtgggaagcttgttgacaagaagagcatatctcagacactaagagatgcaagccaaaagcgattgttgaatggccttggacaagcaaagttgcgacttgggaatctaccgtgagtttgttttattctacaatgatttattgtcaatacatgatttgtactgtcagtttctttcaagtttcttcactcattttttggccgataatttcataagtattaggcccctttggtttataggaaatacacaggaatttcataggattccaatcctatagagaaaaaaaaaaccatgaagaggcctttggtacaaaggatttaatcatttctttccctttgaaatacctatggaatgacaatcctatacaatcctgtgttcttttaaaaaaaattcttaaaaagcagggcactcacgttgttcatctaaaataacaatcttgtattttttcctatcttgtatgcaaacacatgttttgaagttttccctatgtttttcttcccataggattggagaagccaagcaactccattcttatgtttttcctattaccgtgttttgactttattgtgttcctaagggagccttaaccttgggtatagcattcggtctaaaatttcatgagtattaccctttggttcaaaatttcatgagtattaatatttggccttacatattataggtcgttttgactttttttctaagccaaacttctttagatttgaccaagtttataaaaaaatatagcaatatttttaacacaacaaaaaaaaatcaaaatatgttcaatgttagaaatatttttttgttgtgttaaaaatattgctaatttttttggtgctttaagtgttgctctatttttctataaacttagtcatgacttaaaaaagtcaaagcaacttataatatgaaacaaagggagtcctttagtctaaaaatacatgagtattagccttcggcctaggggctnangtcaanataagagggcnntcgaaggggctcgnccgaaaggctttggccttccgggagggccttttcgggnaaacgcgtctaggctcattcgagcacggtcgagctcagacgagccgagcccgagcctctcccaaagctcgcgagctctgtcgagccgagctcgagcttccaacgagcttaataatatataatttttgttgttatttaataaattaggaggttatatatgttatttgtatgtcaagtattggcatcatatatttattttattatttttcctcttccatttacatggtgaactagaaattattttttaaaagattatccttgaaatatatattgttttactgaaaaatcgagctcagtagtcgagctcgagccgagcctgtttgaaagctcgaacattttataggctatgttcgagctcagctcaagcttgtatcgagctcgactagttgacagccctacttcggcccaaaaatacatgaatgttagtttttggcccaaaatctcctaagcttcaccccataatttcatgagttagcttttggcccaaaattccatgaatgctaaccttgggcccaaaagcgttttagtattagcctttgaccaaataacacatctagtgttagcctttggccaaataacacatgaattagcctttcgccctagaacacatgaacattagcctttgaccaaaatttgtgggtattagccttctgttggcccaaaaatgtgattgttttccatcggcccaaaaacacgcacatattagccttcggtcccatgagtattaaccttgggcacaaaaatgcttgctagccttcacctataaacatgcaagtattagccttcggcccaaaaattaatgacccaaaaatgcatgattattagcctgtcttgaaaatacatgaatgtttgcctttggccgaagatttgttaagtattaacatttcgcccaaaaacgcacgacttaatgccttataaagacatgaatgttagctttggcccaagatttcagtagtattaacctttggccaaaatttttagtaatattaatcttgggcccaagaacatgtttagcctgttgccaaaattccatgagtgttaaccttgggcgcaaaaatgtataattattggccttcggcctaattacggatgaataagctttagcccatttacacgtatattagccgatactccctctggtccaaattaagttcacttttgtacatgaatttggacataggttatatccagattcatgtacaaaagtgaatttattttggcacgaaggtagtaatgttcatgtgttatttggtcaatggctaaaactaatgcgtttttatgcccaaggttagcactcatggaattttaggccagtgactaacattcatgcgtttctggcacactattaatactcacaaaattttgggccaaaggatattactcagaaaatttgtactaaaagctaacaatcatatgtttttggaccgaatttcaatgcttgtatgtttctgtagcttttttcaaaccgaaggcaacattcatgtgtttcatttgcgtaaaggttaatatcatgaaattttggaccaaaggctttatacttgtgtgttttggggatgaaagacaaataatcacgtgtttttgttcccaaaggtattaactcataaattttggttgaaggctaatggtgatgtgttttgggagcaaaaggctaactaatgtgtttttagctagaggttattagcgttttgtgcctaggttagcactattggaattttgggctaacatttttatgtttttgggcccaaggttaatactcatgaaattttggaccaaagggcgatactcatgaaattttgagccaaaggtcaattctcatgaaatttttggtgaaaggcaactcacgtatttttacgtcgatggttaataaacactcatgaaagtctgggccaaagtttaatagtaatgtaattaggaccgaaggcaaacaatcatgggtccaagcttaatacttgtgaaatttcaggcaaagactaatggtcatgtgttattcggccaaaggctaatattaatgtgttctctaaatatgagtattaccctcctgtgcaaaacttcagggtattaaactttgacccaaaattttccccttcgacctaaaaaaataagtgtgttagctttcagcataaaaaaaagattagttttagctttcaatctaaaaaatatgcctccaactcaaaaattcacgagtattacttaagagccaaaaagtcttgagtactatcctttgttccaatatgtatgagtattagcctaaggccaaatagctcatgtatgcctttgggccatttatgtatctataaatcttcaacccaaaaattcatgagtattatgccttcggcatgtgtacgcatttatgtatgatgaattcggcctgataactcatgagtattcacctttggcctatttactcatctgtataagccttcagcccaataaatcatgagtaaaagcctttgacccaataaatttatgagtattaaccgttggcccatttacacatgtatttgcctttgacccaaaaacacgtcagtattagcttttgttcctgaattcatctgttatacttgggcctcaaaacacgagtattacacctttgatccaatagtgcatttgtattagcatttagcctaataatccatgatattagcatttggcttatttaagcatgtatgtaagcctttgttccactgacttgtgtatataagccttgctcaataactaatgagtaaattatgccttcagcccagaaatgcacggaattacatcaaagctataacaggatggatcca

SEQ ID NO: 17962 - DNA, 953 bp, Oryza sativa
cacagggagggaggtgtcctccaaccattagatcaggtgcaagatactatagaccaggcccacatgttcataacaaatgtggtctgagctgaaatctttcctgacacatgaactaactgtcaatcaacctgtgaacctgtggtggaggatctcgatagaattacatcatcatataattgagtgtactacaatgttttggcaaaagtattttccccttgacagatggcacggggaagcaacatcgttgccgtagtcacacaatgtacacagcaccacaacgaccagccatggactattcacagaaacttggatgctacacggcaggaagtccagaaggcagcagttgctgcttttagaattgctggattctggtagatgctgcatggaagcaagacggtaacacaatcggtcagttagctctagttacacagacaccaaaaagagcaaatatatgcaccctcatcaggtactcatcagctgtgggcttatagctacatgattaaatcaaagatgccactctctatccaaggatgcaataaatctaattatttaaatgcttgaaaagtgtaagttgtaaaaatacttttagaggaaatggcactgctcaacaggtggaagaaactaacctaactaatcagaggtaaactaccaattcaaaagctcacagaattctaacggcttatgcagcccctgtagtagaaactaatatggggagtttctagagaaaccaatgcttggcaattgtccagatcaatacaccattctttgatatgatgttagcgaaccactttagatcatcctaaaccaccttagatcatcctaaacattggttacaagtagactagtaacaatagcttacccaatagcagttgcactccatgatgctatattataaataacttttgttccatcccatgctttctgaagcttgcttttcctcttcttagctgaaa

SEQ ID NO: 17963 - DNA, 4071 bp, Oryza sativa
cgtcccatatgtctgccgcacttatgatatcccatgatatagtttcatctactgttacaagagcaattgtggaacacttcagttgtcaggtttagtgcaaggaaaattattagcaaaaattttagcatgttgtgccaaggaagtgtatctattgatttataggtacaatcccaaacataaaaaggaaatatgcacctgcaccattttgatataccgacttctgaatattatcgagtttttcaagaaattcaggcgatgcaaccctcgatttgagaagatcgcacaactgcaaagtaaagagtgaactaaaaactttagtatacttatagaacaaaagaaataggtataataaaacctagcacctatttttatatgataggccagaccgccagaaaacagtttaggacagttcatcaagaaactgaattcaaaaggatatgacaacacaaacacctacgtccagtcaaccatggtaaacaagatacctgtcattcaagacactatgaagactaagagccactaatcaaactattcgaagatccatagttcattatatttgcaaactgtcaagttcccccctgtgacacaattgatttgacgatccatagctttctcacctttttttttttttttgctaaacaacatagctgcacgttttgattggccaatacaaaacacacttttcttcttccacaatcacattttaccgcaattatatacagcaagcagccataattagcttagctaaatagtggactcaacacacgacacgttacgacaccagagaaacatcatagcaacaagggagagccaaattatggcgccatcatgtcattcatacaaggctaattccgtgtaaatttcagctaattccagtaggctaccaattctaatccagctaatccgcgaacatttggagcatatgacattcacaaacgcctaaatgtcatgaattaccgatcatcaatcaatcgagccatcgacgttacctggattaccgaatcacctacaaaccccccggatcacaaaattgagaggcacagctctctcccccctcctcacctcgtccgtctcgtagtcggcctccgacggcggagacggcggcggcgcaccctcctcatcacacccgtcgctgccccccacctccggattcgccgccacggcgtcggcgccctcctcctcctcctcctcctcagacacggcgatgcccagatcagcctcccgcatcatctcgagcgcgcgctggcactgctccagcaccgtctccagcgtcctccgccgcagcttcagctctgccgcctccggcaccctcctccccgcagccgcggcttccggcgccggcgccggcgacgaggaggaggcgggctccatcgaaaccctagatatgggcgtgcacggcggcggcggcggcggctcgatccgtcgtggcttcgcttggcggtttggtctaactcgacgacggtggaggggatggagagggaggcgggctcgcgtggatgcgtcgccgtgctcgaccaaatcaccaaattttgcttctcttcgcgataagggagaggtcagaagccacggtggagtagccgccgcgctaacgttgcttgcaagccagccagcgagcgagccccactgacaggtggggccagtcatatggaggccccacacatgtcagtgtgagtgtaggttcacccgatagatccaccatgtggttgttagccgtaaataatactacaacgaagaggggggtaaaagggcgagggaatctccggagagacctcgtcacttgcggacctgcggtatgttataaattgaccgtgattaattagcaattaattatataaattgaccgcgaccaattagctagtggtactaatgagtactccgtccgtcccaaaatatagcaatcttgtactaggatgtatctcatccagtacaagattgctatattttgggacggagggattactaggactaggctagtagcaaaccggtcgcaactcgcaatgaccactggctgtgttttccctctccttttctaattcacctctcttttttttcacgcgcacacttttcaaactgctaaagatacgtttttaaaaaataaatatacaaaagttacttttaaaaattatattaattcatttttcaaaaaatagctaatacttaattaattatgtgctaatgagccacgccgttttattgtgctaaacggagtagctcattagcacatgattaattaaatattagctaaaactgtgttcatttgaatatattagttctcaaccatcctaaacgaacagcctaagactgttcatttgtgttggttgggaaccttcccttccagcacgaacaacggagaaacacattagcacatgattaattaaaatattatctaaaactaacttgaaaaatagattaatatgatttttttaaacaactttcctatagattttttttttcaaaaaatgcgctaaaccttcctactaggatccgtttaacaatttaaaaagcatgcgcgcgaaaaacgaaaggataaagttgggaacccctacaaacgagcgcagcctaaataggttctataagagcaagtttaacagtatagtcaactatgggtttcagatcatgtatagtcaatttaatagccaatacatacaatagttacctataaacatatattacactattgatgtatggacccacatatcatacacacattgcgtattgtagttcgtgttacagctggctacaaatctgtagcccgttactcttctctctcctcttttatctcctcgaaatgtgtttatagatggcttatagtctgctattatacctgctttaagagcaagtttaatagtagagctaaccaatagcttacgcatattcacatacttcaaaatgaatacattaaatgcataggagaagaaaaatacatgttaactctaatactccctccttactcgtaaaggaggccattttggacagcgaaacggtctctaaaatacaactttgacttcttgtttatataacaatatttattgaaatgtgatatatgtatatttttatgaaagtatttttcaagacaaatctattcatctaatttttacattttcaaactcaacaacttgagagttattcatgatttatattcctaaggtttgacttaaatattatcttaaacgacctcctttactagtacggagggagtataagctataagcttatagttggctctactcttaaccttctttatttttcaaattttctcttcttcacatggcttatagcctactaataaactttctcaatgagttcagatttcagattcctgcaccattaataaccgtgagctgatggtgtcaattgctgtcttgctgagcactctcctggcagtatgcttgcatagacaagatcagtaatcaaaagcagcagtagctaactgcttcgaagtaccgcttgggtaaaccataaacaacaggccatttatacttgacattgcacaggccgatgagaaaaaaacttccaccacggaccacggttgatatacatcaagaaaatctacactcagattattctaacgaatcgtataatgtcagggagcacacagttccactatatcagaccggatgatcgttacatttgttatggagcagtaaaaagaaacacaggtacagaaggtatctacaaggttgatgatgaggggaggtgaaactaatttgaccagacatgcaccaggcctttgctgtttccagtgtagatttcgttgcggtcctcgtcgtagaatagtgcggtgatgtcctcaagagcatcagaaacagtgctccgaatggtagatctgctgctgtcacctctttttcgaggagcaattgtgagagtagggtcgaggggggagatcttggcgacgcactttcccgtgaagatgttgctcatgttgattgatcccgtggggggagctgagtaggcaacttgccaatttattcatatgaattcaaaaacaaaaaaaaaacagaataatgaaatttgaaattacctatgccctcgcagccgccactatctctgacctcctttgaagctttgcag

SEQ ID NO: 17964 - DNA, 20505 bp, Oryza sativa
ttttcagtggggttccatcctcaattgagagtatctttaatggaacatgattagctgacttctgataaattacgagcatgattccaggactggagagagaggtttcatgaatgtaagaaaatgtcaaatcaaagatgaaaacttatttttttatgtaatcagtcatcagtgataaccgaaccttattttgatttcctggatgttcttatcacatatagaatacagaaagttgtagttcttcagatcaaaaactttgtaagtgctgcaaaggagaaacaattacactatgcacataccactgctgtcaaactgtaaagtaaaatgttacatacctatcctgggctgaaaaagtcagtactttgccattaacatcatcaaactcaacaaatccagggtatttcagtgattccgtttcaaataaaggaaacccatcattcaattggcctcttctaatgtacctaaaaagaagttatgataagagaaaatatgttgatgctttaaaatgagctagcaaacagatcgaggcatgaacttgtgagttgtgacaagcccaattatcactttctaaataaacataatgagagcaaagaaccagcatcttgctctgcagacaccaggaagctcaactgtttagcaccaaagatactcttttcatacacagaataattcaagaagaaataaataaggcttcttactctattggagttgttctgcacttgagcgagctgaaacgatctgattcataaactgaaacggtgataagggattcattgtttttattataaaacaaactcctaatcacttcatcaggacttatattcaagtagcatatgcgcttgtttgttgctgccaacatgagaagaagttttgttaggaacataaatctgacaaaagcaaaaccagttagcattgaagaatgagatttaccccgattaaatgcaccgcatagtccagattgggcaagtgcaaatatgacatcctttgctgcaacaatctcaataattttggttctgctccacaaaaatggcagctgaacaagaaaatggacttcatcatcataggtgtcatactcttcctgcacaatcaaattaaattcataaattagtaaacaataatttaaatattaaaatatctgaattgcaaagtagtcagttaagggaaattctgtgcatgaaagttagttgatcagatttagcaggtacgattatagaaatgtgagatcaggcgtgtccattgatcaatcctggagttttcttgccctccccttccttgtccaaatctacttattagccacttcctgatacctcagtggcgtttacatcaatgtcttctctgtttatccaacatatttggcacaatatggaacattttcacacatatatgcacacaagacaacaaaaaaggcattaaagactaaaaataaattataggaaggtcattatccagctcatgtccagactgtacatggagccgatcatgcaaatttaattggattgcacagaaagttttactactaaccttttttggaatgtagccgagttacttagatcctattatgtcaggtggacccactggtttgtcagggccaatatggtaggcattatcttcaaagaataaattggcttccataaacatttcaatgatccatgtttgttcagtacttttaatgtacagacaacagagtcagagtgatttaatgtttttaagattttactatggctgcggaggcaaaacccccataatacaatcatacatggtgccacaatagcagctacatatgtcttcttccatgtcattagcatatagcattggtcttgcacatgtcctcttcccacttgaaaatttccatattagaggcttccagtggcaaacatacaagcaaccaaaatccacaaatatcttttctttttcagctaccttcaccatattaccaaacaacactaattttaaagataccgcaaaaccgtcactactctgatatcactcggtttcttttccatgagcttcaactcaaccgattaggtatgtatgaaaggaattgtatgatatgttactgttactactcacttatatgtggattctggtaagcactcgcccataaatgtgatacagtggttgttttagttaaaacaatttctttaagccatcagaaaacagtggcattactaaagcaaaataactggcaacacccaaagaaaaggtcagttaaatgcgacggaggacgaaggtacctagaaaatgtggaatcatgaaagccttccgcctacaaattcctatcttacccatccagcttatggtttgccatatttaattaacattttattagcctagctggctagattcgcaaaagataaacaacacgtggccacgtgggaaatttttgcacgaaaagtctaatttgattcgcattgggtacgtaatgttttactgttgagagaacagaaagagtgaagagaagtataaaataataagcatgtattttaaaatctgtatagtatatgcatctcatgatgcctgaaatacaaatggtgtcatgctaattacagtttattcagctcatgcatcaactaatttcaaccccattcagatttcaaattttcaatagcattgaaccactgattcacaagttatgcaaatatgctatgaataatcaatagccttattttttttcagttatgcaaatatgctataaataatcaacaaccttattttttttaaaaaaaaaaaactaagtctgttggttatgcacactccatatatcaaactagaacatgcaaaactacgtgcaggacatcataagcatttgcagttgatattcctagcactgaattactagatctagccatggcaacacaccggtgcaatgttataacattgccagttcactaaccagattaccactattgtagcaatatacttgtgtctccacaggcaacactttctggttaaatttgatcgcatcgaatggattgccacctaaagttttaaaaaaaagatccctaactatatcaagtgtcacggatcagaatgaattaccaagcggcactaggttaatcacgactactggaaacctaggagcgaggagacgggcaagctgcacatacctgcagctggaaattccggaatttctcggggcaggagaaggcggaggaggagggcgccgcgggccgcggcggccggcggtgccccccgccgatctcgcggcgcgcgaccttgtggacggagtcggacgggtcgcggcgcggcggcttgcggcaggcgggctgcaggcccgcggacagccacgcgcgtcgccgcgcggcggtgatgcggaggcgcacccgcagcccgggcttgtggtggtggtgctccatggcctgcctccgccggcgaggcgggagcgaggggcgcgggcacggggacagccgggggaccgaggaggtgtaggggaggggggcggggactacgcggggttagggtttagaggaggcgccatggatggggaggggaggggaggggacgcgggaatctggaggctagcgactagcgaggaagaatgggggggagctggcagtggcactaggggcgtacggaattgcgaaggggaaaccgacagcggctacacgctactcgtacagatgaacccggttcacaattccaatggaatccgattcggacctcgtgaaatccgaacttttttgaatcgggccatcgaagacacgaccgattcctgaatttcaacaaaatttatttgtattttattggtttttatcggtttatcaatggattccgtgaagtccgatgataccgtttatgagcggattttgatacagtatcaagatggactatgggcccctcatagcaattttaatggtacccagcagatatcacgaataatagtgacattttctcaaatcggtaattttgcaatggtatgatccaattaacctttgaatcatagggccaaatagaaaaggtttgaataaaaattggatcttatgaaattccttataaatcattaaatttacccgctttcttaatactcgtatccaagcctaaaactctctaagatatcttaggatggagacaatatcatataagattgtgattacgaaaactcttagcaatagcatgaaaaacatatactccatctttttttaagtagataacgttattgccttttgaacacatgtttaaccgttcgttttatttaaaaattttatgtaaacgtatgagatataaattatacttaaaatactttgagtaataaaataactcacataaaaatatataattacataattttttaataagatgaattatcaaacatgtgtttaaaagtcaacggagtcatctattaaaaaatatgatagtagtagatttttatgaaaagagcgcccataatctcttctttctataaagctgctaatgctcactgaacacctaaagctcaacatgcaagcatagtatttactagcattcctaaaacctacatgtaagtataccatatcaacccattaagcccacaaatctcaacatgcagacatataataattatagctacaaatttacttcactctaaaactaaacatatacatgctaaatcatcattcttaaattattttcataatatttcaatccaaatcatttctcatttatctattgtttaacatatatcccgcagcaaagtgtagggcatcatcttattaataacacgtgtaagcacattgcgtggcaaggcattgtgatcaatgtcaagtcattatcgtgtgtgccccgtaaaccggttgataagtaagaaacgagaaatttgtcactcaaaaagttttttttttgttttatgctactatagtaatgttatgcatttgcttttgttgtccccgtgccgacattgctgtccttttgcatatgagtatacctacgtaatcagttgatcgatatcacatagttattataatataagctttggattcgaaggtaatcaactgtttattatattttgtactcttgtcgattttcagtatatccacttagaatccacgtgcttaatttgcatatatagaaaagaaaaaggctatacgtactaattttttcttactaaattcttactaacactgatgtgtcatgctatgagtacatctagattttttataacttccatctatttaatcaaacggttgagatgattgttagtaaatgtttagtaagaaaaatttagtacgtgtagcattgctctatagaaaatatgctagcaaagtgtaaaatagtgggaaaactcaaatcatcccttaaggggatatccccttatttttatatgtcacttaaaaagtaattaaaaaatttagtaggatagatcaatatgtgatatgtcgcttcacaaacatgcaaattcaaattcaacttatacaagtagaaataaaaataacaaatttaattatgaatagaacacgtaattcacagtcatatttgttatttttgtttcgaattgtataagttaaattttaactcgcatgtttgtgaaaagatatatcacatattaatctatcttgtgaaaatatatatcatatattgatctatcttgatattatttaaaaaaagtataacttttgaactacatgtacaaaacgaggggatatctccacgagggacaaaaatctacttccaaaatagtgtgcatctgttgaatgtgtgtatgcatgttaggttagtagtacaggttcctgctccaacacattactatacccagaacatgtcgagatagatagagcttttgaaccccacaatgcagaatgcagaagcaggtggggcgaagaggaatccgagagatcgggagcacaccggtgcaacaaggtatattggcatattgttttcctatagaacaaagcatttctgactctgaagataacttgacccccaataaggtctcttctcttgtcatacatgttcggagtactatactagactctgaagataacttgaccctcataaggtctcttctcttgtcatacatgttcggagtactatactacgggtgagtgtgtttagttcacgctaaaattagaagtttgattgaaattgaaacgatgtgacggaaaagttggaagtttgtgtgtgtagaaaagttttgatgtgatagaaaagttagaagtttgaagaaaaattatggaactaaacacggcctactataggtgatttgcttccaaccatgcgtccatggcactccattctcgtgacaaacacagcagcttaattggaggagccagaggctatacagactcagtgcagatcgagcagaggcgagaagcagagggtgtattcctacccggggccggcctgttggagatcagagcacaggagcaaaaattcctcatctgaatattcagacagacttacagttacctctgcatcggatgctcctatacctatccaactcaggtcagggatattaaatgctcatcagagagagatcaggcacagcgagagaagatgctatacgctgaactgaatttcttccctgttcttggtgatcgtttcgtcacctgtgattttcattctcttggacaaagcgcacccggggcgagagcagaagaaacggatctctgtctttctgacgacgggtgtgtcgatcctggattggcagcggcaaatgacagggtacagtacatgcctaggtttcgcacgttaccatgtccatgttactctcgcgaaacaggagtaccaagcaatgcaggtgtgcatagatgcgtggtgtttgtgacctctcgttgtataactacattctctaacactgactaatcacaatgcatacgtcagatgaagcgtgcgtagctcaactgattaagttccttattgctcgtatttatagctaactattcttttaatggtaggctacgttccaaattattctttcagtggtagcgagactccaatggtaacttcgtcaattttaagatatgccgacccaatctttcgaatgtgctcacagaggtaaggtatgcgtgtgtgcgtttataaagatgagtgtgtgtgtgcgttgtgggtgcttgtgtctgttctgtatttataaaaaaacaatgcatagatcggtttagccttaagacatgaaaaaaaagaacacgtttaaatccttgcgaaaaaaaaaaaccgtgccaaactgcacgaagctggcggcggcccgaatacgccgtgcggagaaggcgtcatgcgcgcggacggacgatggctacaaggtggattacctaagcataagcagcgttggacctaacccgctcgccggcctgacccagacccgcccaaccgtccccaccgcccgcccgcggcctccccaaatatccactcccaccgcgcgcgccacctgtacaagagaaaaaaaaaaaacgaaccaaacccacccgtcgtcgccgctccgcccgcgcgtgtgcgtgcgcccacgaccgcgcgcgacgcgacgcgccggcctcgtcaatcccatcgatcgatctcgccgtcgccggcatcgtcgcgatcatgccgctagatggtggggaggtggacctgtgggcgatggcggcggagctggagcggcagttcgccgggtacaagcagcggcgggcggagaggagcggcgcgccccgcggcgacgacgatggcgccgatgcccgcggtggcggcggggaggaggaggaggaggaggagggggacggagacggcggcgacgtgagggggaggaggtacgaggcgtacacgaggcggagggacgagcggctgcgggaacgggaagggtggcgcgcgcgcatggagcgcaaggaggccgaggtcagggcgctctgggcgcagctcgagcgtcgcgccgccggctgtgccaccgccaccgccacggcgacggacgacgacggcggcggcgcggccggagtccgagaggtaggtaattccgttgccaaaaaggtcgttttctgcttgcggtcgccggcacgacacgttccgtctctttgttgcaacttaacaagcgcgggtcgtttttaacgggtctcaagttgctaagttgcttctagccttctaggatatgattgattgacccaaatagtttggacgttgcgtttctgcaatctgcatgccattccatgattgatgaatccttctatctttcgctgaaaaaaaaaatccctagatcgatgcttcctgtgcatgcaagtatgcaactgcattctctttgatcaatccccctctcacgttttcgttctgaaattttttcttgagagagtcaaaactaattcgttctagttttaaattacgtgttatagcctataccctccctcctaaaaaaattattgtactacgaaaccggatatgccaagatttgattcatggcacatacttcatccgtcctaaaaggctaaaataagctaactatgtgttgtttagtaaatctaataactaatggtcatctttagactgcagaattctttatagtatttcgtagcgctttcgcgaaaaagaatagtgtttcgtagaggtcagttcaattttcagaagattaattatttcaccattcgaaacgggacctaaagtggtaaaatttttagtacggcacaagggttcacgtgaaacgataaatggtgggttcacgaccaaatccttgttcagcactttctgctgcagcacatatctctgccaaggagttaactcccggtcccgggaagaaactgcatgcgcaggcagcaagcaaggcagcatcaacactccgtgtgtcaataaatcgtacgtgtattcctgatgatatctctcatctcaagtctgcgagtccttccctgtgaatgcgtgcgctcccgtgcaaacgcatgcttcgtcaactgctcgactcatcgtccgtaaaagagaaaaaaaattggaaccgtgcttgactgcgtgagcatggacttgtttctctttttttttataaaaaaatatatatattcatgtcgaacttgtcgaaagagattgtttttacaccgtccaaaatgagagttacttgttggactattgggtttataaaatatatatattgctgtcgcatcggtcaactattaggtttcgctgtcaattgtatctgccctagcttacacgttgccacgtgaaacattccctacgtggtggtgctctgtgtgcatatgagttttctgtataattgtaaaaaataaattatgtgtgtatgtgtttttcgtgtaatcgtaatttttttatatatttgatacttatgttttttaatatatgatgtctttaactttttaaaatctgtttgatcattcatcatattcaaaacaatttatgtaactattatttatttattgtcaaatgttttttaaaatacgatttaaattttttatatttaaaaaaatgaataagataaactgtaatacggttatgaaaaagttacagcgtcgtatattaaaaaaacatttaaataatacattcggttgttgtttaatcgggtgtggtggcgtgtactacagaaagctgggaaagacggcgagaagaggagaagatccgacgtggctgctccggcgagtaggatctccggcaagaagcacgcacgcaccaggagcttctcgtccaccgccacgaagagcagcctccccgacgccggggcgcggcgagcgctgtcgcaggagccgccgccgccgccgacgtcagagcgacccaccacggcgggcgccggcagccatcgagtagcgcgggtcaccggcggcggagcgacgacgaccgcgccgaaacccagggtgttctcagggcacaggagctcgacggcgaaagagcatggctcatcatctgccaagggtgggacgacgaagccgaagccgccgcgctccctgccccggcggtcgagttccggcgggttggagaatctcaaggaggcggttctgtcgaacacctgtgccgcggttgcaccggcgcagagctgttcgaccgagcaggctactgtccatggcgaaaccgggaatgcttctcccccgtcaccgttcgctggcgcggcggcagcgaatgcccgcgccgcctcgccggattcagactgcggcgaggcagtggacggtggatcatacgaccgtgaagccgaggcgaagcgtgtcggcgagcacgacgccgaggaggtcacggtgtctccccagaagctggcgaatggagagatcaccagtgactcggacaccgagccgagctatgtctacgtcaagaaggacgacgtcgagggggaggaggatgccatggcgaggcgttctgaagctttggctgtctcagatgccaaacctgcagagctggaggtggagaagaataacagcgacgccgccgcgcgcggcgaggagaccacggctccaccgtcggacgccgtcgcggcagagagcgcgacgacgatcgtcgcggaagaggcaccggcgagggagagctccgacgagtcctcctcctcctctcctcctccttctccggcatcaggtcagggcgcggctcccctcccagcagcgcgccagcttcctacatctcgcgagctccgtccatcgagaggctgctcgaggaggacgccgcgctgctgcgcaagaagcggcagcagagcgccgacaagctcgccctgatggcgatgacgacgacgacgatgtccaccccgccggccagggtctccggcgcggcgcggtcgcgaggattcaagagcttcttgagcttcgggaagaagaacagacgaggcaaggatgtcaccgtcatcgactgcacctcgccgtcggtgccctcggtggccgacgacgacagcggcagcggagggtggccgtccggtgagacgatcaagccaaggatggcctcctcggacgctgcctccgacgacatggaccatggctatgccattgccgcctctccacagggtaatcaaatttcatgttcttccatagagtacatgacaattagtaattactagtacatgatatgttgtggtagatttctgatgcttgttaatgtgaattttcaaacgcattttgcatgttttaactctgcaggttgctctttgcaaagccttgtggttgcatctcctgcaaagtctgaactgcatgagatagacccacaggagaaatcaccaaaaggtgaaaaaaaatgttttgattttgttgtgtgttttgcagatcattcttgtttctttctgcctctgtactaatgttgtctgtttttttttggtcacagctcatcggtcgttcttctcgtttcgatcattcaactgtggcaggagctgatctgaagaactgggaatagacagttattactactgtaaatatagaccagtgtggaaattaggtcgctgcctgaaatattcagaaatcagaaacccttgcatcatcttgattcaaatttcaaagaggtgaaatgttgttatctgaatactattccttgatacagtaaggatattccatagaccaatcaggatgcaagaagagcagatttggagatacttctgtacgtatgatggcgtgtttatgttttcttctgatgttcttatcttaacagtctatgttttggcaactacctgtttgcatactgtaccatgaaaatgagaactgtccatccacaatatatatgtcgtgaactggttagttggaaattagcactcgtgcatgtttcagaacattcactttgttagcgaaatttcagaatatatatttgtgatttttagctttggttaattaaatgtgatgaaggtcattccaaacatgagtaaaaagctgaacatgctttcccctagtgatgtatgctctctacttataatttgtatatgtagctcttttctctacaaattgacattcagatcaaaacattgtaacaaacatgcatgctaggaacagtactcatttgtgcacttccgctgggagagacggctaggattatcagtttatcaccaaatatagtgcatctaataagacactatatgaagtagtaaattaaacatacttcttatcattcgttgccttctgatcgtacatgtgtgttttgttggaggtaaatctgcttgtacatgtgtagaagcatctcatggtttctgccgtataggaaccgtctatatactcactggaacggaatattagttaataccatgctatcatccatgaccaatattctcaagaacactattgtgtgatttaactaagacagttagctacctcttactggaacagcatattagcactgagaagaacatacctgagctttccatgcgtgtaggaccaaccaacatcaaacactgttggcttccctcacctgcatctttgctttctctctctgaaagtctttgtcactttgtcatgcttaacgaggacagtatgaaaatcagtagctagctctctgcaagttccttttttcttgttcaggaacatgcatctaagttctaggtcttgctttgctcacagtgatacccaccttgtctgtccataagcatactttgcttacatataactacatgctattaatagatgctactgtacaaactttgaggaaaagtataactttcgatggaactaactcgatctatccattggtggagaaaggaattaactttgacaggagaaattaaaaagtccatatatataccatttggtcaaaatcaggtgatccatttcagatgtgtctctgaaccttcctatgggctcagctagctaattaacacaccatattaatgaccaaattaactcgtcagtatcctgtttacctcaaaagttttcaggcaaatttccacgagtttccatgactttctagcgacaaattggctcaaaggtcaagaattcgatcaccttgtaggacctcgtttctgactaactcgtcagctagaccagctagctagcttaggtatcagctgcattcataagatccaatcaagaaaacataaacaacacttagaacacttctacttacaatgcatcggcgaatttcgatggccgatccatccatccatccatggacgtgctacttagctcgatcgatcacgagctcaagcccccactctaatggcggcgccgccgcggcgatcgacggggcgagaagccatgctggagaaggagcgcacatgctgcaagccggccggccagccagccccgccgtcgagcacgtgccctgcttctccagcacggtttgctcacccctccttcttcagttcttctcctagggctagagctagctaggccctagcctctctctcgccattggaggaggagaggagagctgggagaggtagaggaattgcatggtgatggctgcaacttgcaagcgatgtggcgtatatataggcgggcaaaagcatagtacatgtggtaggaagacatggttgtctaaaaagacctaactttctctgtgaaagggagcccaaacctgcctctcgaaattaaagttttcttctttttcatcgatcaaaggcagaccaccaaacctcggatccccatccatccatccaatccaattaatccgagttcatcagttaatcaacctaaaaacccagagttcagttcatcagttaataattaatccgagatgaaatctctgtctgtgtgacttgtgttagtcgctgtcagaggtgaatttaattagagggatcattcgagtttaacttttgacaaaaagccgctttgattacctggagatgatggcagcgtcaaggctagtttaaccgcccgtcggcccggcccttggacggcgaccgtaaacgattgtatgactctgatcaagcgatcgagatgaaagcctgcagcaactgggggttttgttaatggttagccacatgttttaacctaatcttggccgactaaactagtctttcctcacttatgtgtagttcttatctttatggtgataattaaccatttgaacactgctgatcaagtagaaactaaattaactatttgaacagctgatcaagtaggctatacaatctcagaaggagagacgacgacgagttgcggacaaaaagttgagagcccagtgcctggctatcatatcaccactaaacaaatgcacgcgcggcaactgatgtgatgtcagtgctcaaacgcagaactttttaatttgtaaataccatttttgtatgccaatttagggcgtatagaactatataaatatgcaatttacgcgacaatttggcgtgtatgtggttggggattggcatctaatcggcaacgcggggtgtcgtcagatgcagacagtgcagtcgcggacagagttgagagccggtggcatcagcgagagtgatgtgtttttgtggctaaacaaatgcacgcgcgctcgctgttgtcgggtggacatgggcgctgatgctgataagtaaatcgataatccgtgtgtgcccagttgcgaatttgatagaattttgattggattggtttaggcagagggtcaatgcatgcgtgcgtacctagctccatgggtggtttactcctgtctgccatgctgagattgctgatgcagcagctttaatttgcgttttggtgcagatgcagagctgcagatagcctactcctgttggaaagaagcttggagagagaatgtttggcaggaagaggaatgttgtgtggctactgtccccaacaaccatgaggttcttcagtgtaataactgtttctttgtgcttcgttgggaggaccattttgcttttacttgggagaagatggcattttttttctgtaacagtgtgtgaatatattaccattagggtttcaagttggttaggacattctggtttgggatggtagacctcagcatttcattttccttgacctacctcgtactatcagtctctttgaccggataagcataacttaagtcttaagacatgcgctgtagctagtttaagactcactgttgtaatttctagtcatttttcttcctctcggtcctcatccattgattctattcgtatcttaagaagtctttaaaatcactttgacccttaaatgatctcaatttaaaacgagctttcgactttctctttcagtttttcttagaaccttctcattctagaagtattttttttcacgaacgcgtaaaaggattgcacgtcaatatattagaagaaaatagttatagttacacgacgcaatcagccagactggcttatgcaaatagaagggaaaaaaacaaaataagaagctgaagcttttaaaaaaactacattctagaagcattttttgatttgttctaagcatgtaaccttttttttttcacccttcttagaaacttctttttatttatttgtttatttttcttgtttgtactaaacacaccactttatattggacactccaggctaccaaagttgaaagttgttaccaccagagccaatgagtcccatcttcctcaccgaagactcttgtttgggaagacatgcaatcctttttcaattttttgtggaacaaacaccaatcttctgctctgcatttcttttttgagatacagggaataagacaatagacatggaactattttagcacgtccattcgaagtgttaattcatttcaacttacaaggctataacctccgtcccaaaaaaagtttatttgtgggtttctgtgtacaacgtttgaccctccgtattatttaaaaaatataaaaaactttaaaaaaagtcacacataaggtactattcatgttttatcatttaataacaacaaaaattactaatcataaaaagcatttaattaagacggacggtcaaacgttggacccagaaacccacaaatgaacttattttaggacggaataagttcatctgaggtcccttaacctatcaacgaatctgattttcgtccttcaaccgaaaaacccagatacaacgggtcccttaactgtcaaaactggtgcaatataaatttcatggtggtttgtacgacggttttcgctgacgtggcgcttacgtggctaatttgactcagttttcatatgacgtggcagttacgtggcgcttacgcgacaatttgatttggaaaataataaaatttgtgaccccacatgtcagttacacaaaaaaataatttaaaaatgatgggcccacgtgagccccacgtatcattatcacccctcctcttctacctcctctctcagatgaacttattcctacagagggtgtaagcgattgtagagcccaatctaggcctcgtaaggcccattacgttatacagatccgtatctaggcccatccaagacattttgaacaaggaatacacagcccattaatgatacagaaatggcccgttagtgggtcgggcccaccaacacattgcaaaaagtgcaaaaccactcaacccgtgtgcgactcccacgcctcgccaaaaaccctaacgcattcgcctccccgcctccccgccaccggccacctcccgccgcccgccatggccgacgtcgacacgggcgagctcccccagacgccgcgctcggcgaccggagacgacgagctctccctcatggacggggagcccgacctggccgcggccgtcctggcgcggctcggcgggtcgccgcgggaggacgaccagcacctctgcgccaccgccgccgccatggcgcaggccgtgagggaccagggcgtcgccgccacccccgtcgcgtacttcgccgcggcggccgcggcgctcgcgcccctggcccgcgcgggggccggggccgcggaccggcacgtctccggcgcgctcctcgcgttcctctcggccgcggtgcccgcgctgcctccagccgtggcgcgcgcccgggggcgtgaggtcgcggacgacgtggtgcgggtgctcgagttcccttcgacgcctgactccggtgtgagggctggggtaaggtgcctcgcgcacttgatctcggctggggagaaggcgaactgggaggcagtggagccgctctatggggtggtgctacgtctagcagttgatccccggcctaaggtactagcaaaataccaattctctcaactatgttgctgtcaaaattattacttatgcgggtaaatatgcactgctgtgtaacttgttgtgatatactgataaggtttactgggcatccaatgctgtttcagttaatctgatttaggatgcagaataccgtttagtttaatgggaaattctagacttcataattttagagtcatactccctcatagtaaaataatataactaaactcatttctcccgatgtcaaataaatttgactggagagagtaataatcgaagaaggatactgcacacattgtattcttggctcagcagattttgttcatgttgttagctttactcgtatcaaaattcaattgctctgtatcatgctgaaaaatcattcatagtttgctttgatggggctgtaggtgaggaagcagtctcattcatgcttgcgagatattctgctcagtttccagaggcaagctgttttggtccctgcgagtgaaggaataacgagatgttttgagcgttttctactgcttgctggtggatccaatgctgtaaacacagatgtagcagaaggcggacctaagggggctaaggaagtcttgtatattctgaatgctttaaaatgctgcctccctcttatgtcatcaaaaccttccaataccatcataaaatattttaaagctctgttggatctgcaccaaccaatcttgacacggagcatattggagattctgcatgctgttggcgacagtccaactgtacagcttaaatctgacgtgctactggatatagtatgctctttggggctatctgtctctgttgaaagaaaatcaggggatgaaatggcttcaattgcaaggcttctaaatgttgctactagaaaaatttataatcagaataagaacatatgtgttgtaaagcttccactagtatttacttcacttggaggttggttcttctcacaaaacttggcacctttaagttgatcaattatacctagtaagtcatattatgtcttttgtgtaaaagtcttgttgtaaattgttcgccagatatattggcaagtgaatttgaagaagcaagattttctgctgtggaggctttcaaaagtttaatagaagactgcatcgatgaaagcatgatcttacagggaattacccagattaagtctagacatccagggataagatctgatcccacaaccatagagaagatatgtgctatcctagagggcttgctaaatgtccggtacggtgatgtctgggacaaatcatttcatgtgatttcaatggcatttgacaaattgggtaagtataccactacgttagcatatcctcatcattcaatagcttaggaataatatgagagtctctattttagtaatctggctcctctggtcagagcattaagattcaatgtagcttcttgttcacatcttttgtgttggactctctttcttgagccattaacaacctttatccaaaggtgtttttgttaaattgaattatgctattggtaattagttgcttgattatttgtgataattgttcctgtactgatctctaatgcaaaactacaggagaatcgtcagctgaccttttgcctgaagcacttaagaacttggcagacatgcaaaacttgtcagacgatgacttctctttccggaagcaggtaacttttcccatagaaaaagcaccattgtccttcagcataatataaacaaatttatacctttcatgcaactaactttgtttactccatgtatgtttggttatctcctggcttaccttcatatgcatttatttgcagcttgattcatgtcttggttcagctgttgctgctatgggaccaaagaacgttcttaaaatcctgcagattcattcaatatctgatgaaaatgaatggatcttccccattttagaaaagcacattgttggtgccagtttacaatttttcttaacagatattcgggacattattagagctgtagagaagaacattccaaaggtatcgtccattttttttgaaaatcctaatagttttaaagcaaaaacagattaagcactttcattttaaactgcactgactgtttccaacatcttcaattgaacagcttttaaaggaagataagcttttctccgccaagagagcagaaggttatgtgtattcactatggtctttgttaccatcgtgctgcaattatgcacgtgatacctcaatccactttagagctctgcagaatgttttgtgcgacacgcttaaaaaccagcttgacttgcgtggtatcatttgttctagtattcaggtatttcacactgcatctggttagttctatattgcaagtacttctgtttaagttatgcttttgagcttatttttctttttttttggcttgtatattttaggttttgattaaacaaaacaaggaagcattgtcagttcctgttgaagaggccatacttgctgaggatgaaataagcaaatctgaaagaagagcaaaagaacgctatacgaaagagtttgcagaggaaaacttaaaagcaatacgggctttctcttcaaagtttttggaagttctatgttctatattcttagcttcttcaaatgatgctattggacttctacaggtatattgttgatgccttctatattgtgccatctgcttgctgggctctaaggatctgtactttcgggaattgtttgatttggctctggaagttgatttcttctatgatcagccgacaggtcaaaatttgaaatgtttgataataatctaatgacttcatccgaatagatcacagtggggaactttgaacctttgggtgttaattgttgttgaggattaataattggattgttttgttgattgtttttatatcatgtacaagcataaatgtgacttgttccttctttattgaacagcctgcaataagtgatatagcttccatatcagagaaagacactgttggcaggttctttcttgatgcaataaggaagttgttggatgccacaaaagctgttaatgcagaacaaaagaatgatagttcaatgcaaatcgaagctaattccaacacaaataacatggcaaggtctgcgcaaaatttatattcttgttacttcttattcatgtctagattccagttgaagccgattgttaatttcaatccttgatggatcgtagggctctcctgttggactttgcagcttcattaatgcctggtttagctgcaaaatcgatcaatgtgctattcagttatgtaaaacctgcaattaaggtacatatatgatatattgcaagtatccaagctgttctttttttttaaaaaaaattgtaagttgtgttgtacctgatattttttctcacgctcgtaggatactgactcattgattcaaaagagagcatacaaggtcctttcaatgctgctcaaggtatgtctccgttttcagtttgcactttatgtgaatcatcatggcagatcacagagagataacttgaaatctttatgaatgtttatcatttcaggatactgagtttattgagcggaatttggataccttgttgggcttgatgatttcttctttgccatgccaatttccatcaaagcgctacaggcttgaatgcctgcatcacctt

SEQ ID NO: 17965 - DNA, 14517 bp, Oryza sativa
ggtcacctcagcaaatttctccaacggctgggtttgtatcaacgaacgacgagcaatgtcactctgatttctgtaagctgccggtcctgagtccctacgataaattccttgcgggctctggctgctaagatgaatgttacttggggaatcgaagaacacagcccggcaaaaagaatcgaagaacacattgttggcccaatgtctatcgactaacaaagaaaggatacctcaaaaccttggatattcggtggtttcttgattcatgccttcatgtatccttgttatgcaagataagataattgtttgtatctgggctccccgttttgtgtcacgtgttgattcgtacatggcagtaagttcatctgctcaatcgggcaacccttcttactcatgagaaggaatatcaattttggtgattctgtggaaggaatgaaatactgtcagctccaacaatggccttcttcgtctgcagggtacagcctatgcattcgctgttgttgacacaagacactgtacaggctacaacgcgcagccagccatggggaatgcagcagaacgagcccaaatattgattttgttgttgttattgttgatagggtttttttagaaacaaatcataataattgaggttttatattacggattcttcaatacttaaggttttgtgaaacttactagatttaagaagttacggcaatttcaaacaaagcctaagtggttgtacacttttatgtctaaattgactttactaaatttcagtagtgccaaattttggcattgtccaatactgtttacgtcacaaaatatgactatccagtactggatgtgacacattctaatactacgaatcgagacagaagtcatagtattaacatgtgtttcatctagtactctctatttcatattataagtcgtttgattttttttcttagtcaaagttctttacgtatgactactaagtttatagaaaaaattagcaacatttataacaccaaattagttttattaaatttaatattaaatatatgttgataatatgtttgttttgtattgaaaatattagtatatttttctataaatgtgatcaaacctaaagaaaatttttttctttaatgaagaaaaaatcaaacgacttgtaatatgaaacggataaaatactagataacaacattttcggatagaggaagaatttgataaggctatgatgtgcaagctattacctttataagtttttatgagaagaagattctaaaattaccaaatcttaagagtcaacttttgacaatatttagatggttacatttgctaaattttagctttaaaatgaacagccccctaaaatcaggcgttggacaggataacatcgtgagaaagtttgtttcgttttccgcgcacatgtttcccgaactattaaacaacgtgtgttttgcaaaaaaaaattctatataaaatttgctttaaaaatttataaataatttatagtcaattaatcatgcgctgatgactcacctcgttttgcgtattttcctctcttctcaaactcacccctaggccgtgtttagttcacccccaactacctctaactttcaactttccatcacatcacatcatcacatccaaaacttttatacacacgtaaactttcaacttttcccaaacttataactttttcaggaactaaacacagccctattactagagggcgcgtgtcagccagatcagcactgcgaccggaaaccaatcctgacgcgccaccccggcgagcaggtagaggtacacagggcgctcccgcgagtccgccaccgcaaccacctcgcctcgcccagacgctgacgacttcactccactccacgccctccttcccccgatactgctctcttccattccttccaaggaatcctccccaccatcttcatctccactccctctcctctctactcctctacgcggtcgagcaatcaacccgccgccgccgccggaggggccgctctccgtcgagggctcgccatcttatatatgggccggccgcctccggctgcgctccagctgatcggccgccggaaaggtgcggcggggtttcgtttcgctcccatttggatcatgccacgcgggctcaggggctcctcctcgtgttcctcctagatctggcttggaatccatggcggtgccccgttcggctgggctgggtgcggtgggtgggtggttgtgcgtcgttcccgtgcggaaggcctcctttctgtttccgctttagagctgtgggcatgaataactgtgcactctttgcctttgtgcacacctaccttgacaaaattcctttatgttttccatccacttgcgaatttgcgaagaattatatgcttctgttaaaaacaatactactagactgaattggagtacattcttgggcgaagttttctaggggtggtgtgagagtggatgctttggttgtttcacttgctaccgtggtggtaacgctaactaaattcgtggcttttgggagagacgttgtttggtttatgagctgtgagaatggggaagcaggctgcttgctacatttatggttgcaactttttttagtagtagcatttttagaatgggaaaatctctgaccgtttaaggttagttatattagcgaaagtggattgcttgtagctttgtaatttctggacattgtctacctgtattcttgttatctagttgtgatgacctatttttgtcttctttcctttttattcttcccatgctgccaaatagtctatatcactgtgtagtgcatattcttggttcgctgttggaatgttttttcttcagttaaattttagtattcctagaataggaaatggctgttgccaattgccactatgttccagcatttacttactgctggaactgttttccatggcttggataaattatcatctggatatattaccttgtactggtgacattgcacagaatctgcaagaagatgagttcacatggattttctacaaaaggcggagatgcagggtcaaaattaccaagtacagttaccaccctaaatccaaatgcagcagaatttgtcccttcaacttttaggtcgccttttggaagtagaacagttgcggatgtaagtaaaccagattttagggggctctctggtaaaacgaaccttggtaggtcggaatcatcaaaatctaataactcggatgatgaaacacaccagttttggcatagacagcttcctgatgatattattccagacttcagtgatatggaaaaagttgaacagcaacatggagaattgtcattttctggattgtcattgaatgcaccccctttctttggcacagcagccagcaacttgtcgagagagcatcatgggttattgtctcaagcaggcaagaatcttgacctggggcacaatgatttgtattatgatgagaattcaggttcaaacagtgggaagcaaaatcatgcagataacctatgttatactaatgggaagcttgacctcctttatgatcatgacccacttgagtatttagcatcccagtttcctggtttttctgtggagagccttgctgagttgtactgtgctaatggttgcgacttcgaccttactgttgaaattctcactcagttagaggtgatctcctaatctagtccttataattaaatattaatataaggaaaataaatctgtaaaatattcttgtcttgatagccagttgtgcacccatcattcgcaacattgtggtgtcccgtattaattgctttgctgggatgcagagttgggtattataatgtagtgttctattactttgctttgactggtgctaacaacttggacatcttcactaagtgagaataatgaccaaaactagtataatgttcactcaacttccgtttgctcatctattagctgctgcattaggctgtcagtacaaagcacaaactgtatgtatgaataattcgtgctatactgctatgcattagtattagagctttgtgttgctatcttattgttttagcctcttttgacctgtaggcagatcgttttgttttaaagttattcttttttcaagtaaaaattttaaaacttctgcttggtacttatagatgggacattacattttctgtgtaacagtacaaagttgacccttaaagctagagcatatctatatttaactgtacatattttttgtcttacattttttaaaaccttttagtgcatgttgtgttctggagattttgtggcatatatatgtaggctgggattttcccattctcttaaaaaaaatgcagtacttgcacgcaaatccgaccttttcttttgattgcagatgcaagttgatgctagctcctgtcagaatctgaatctggccccaaatacaccaaacattggcacaggaaacttccctgtactacctggaacagaagaccttaattgtttgtttgaaggcaatgtaggtgcccatggaattacaaacagacacaactcttcaacaatgtctaggactggagattttgtttcagctattcaaagacttgcattgcaggatgctggccacatgaagtttaaaaatgaaagtcccaagtatgctaatggtcttttgagtattgttgcgcggaaacagtatggctgtgatacaaggtcttccttaggaaacaagttccttaaggccagtagtaatgttcactcagccccagtcagtctaaagactggtgatgccatgggtaatattctcatccagacattttgatttccgaccatgctccagttatggattgatagcctgcatttatgctactgtccagcaagcatgtgctcagaatcaaggggggaagctggtgattttgcccgcatacgcaatacatgttttgaacaagtaagcactcttaaattgcatgttcatcttgcacaatgtattcatggcatcattttgtttacttgctttgagttttcttgtgttgactacctccatttattgatcactgtcctttgatctagtggaatgtttattttggatgattggaatattttctggcaggccacgcaagcttatatgatgggaaacaaagcgttagcaaaggaactgagcatgaagggacagttgtacaacctgcaaatgaaggcagctcatgagacagctagggaagctatttatcagcaaaggtggattaactccctgataaccaattgacatgaccttaacctttcataaataaaagtatttttcaacctgccaacttactgaccactaacaaaataccaggacctggactgcacattgtattcatcttttctcctcttgcatacaagtatcttttcgcactctaaaggcgcatctagttttttttagcttcccctgcttcgttgcaggaacccattttcatctgaacaaggccaggaccgtctgatcgacttgcatgggcttcaggtgagcgaagccatccaggttgtgaaggctgagcttgccctcctgatgggtgctacaaggtcagctggagaaggcacagatcatgatctgcattggaacaggacaccacaccaagggctctcgcgaggcaaggttgccggacgcccttgaacatttcctcctggatgaaggcctccatcacacgcagccatagcctggtctgctccatgttaacctgtgctaacatcgtcttctaggtaaacaatctgggagaagaaaaggaggttagggggaaaaaagaaggtgagccctaacctgacaatgtaaaatatatctatctatacctgtatgcacaatgcacgtatactaattagctactccaagggccagagaagaacggcacgaaacatcatgtatgttgtattgtttctcgttgtacatgtcgtatgtacatatcaggtataacttgtttttagttaattaacgtggagacttacggtagtcctctcaaccaatgtttatgttcttattggaattgccacatgtgttgcgcatgaatttggggtggaggtaaactcatgattttccctttttctctggttaaggtgattattttttgatgttgaaatggaggtattatatatagggattgagactaaactgaaattatctagctaagaagtttcttactgaggtttgtggtcatgtcaggaatctggaggggacggaagtttcccattagaatctctcatcatttttactgtcaaaatgtgcgtattagagcatgctcaatgtataatgtctacttaagcaataaggtgggacccggtattagttatggtgtttgctacaatatatatggcaagagaaggcattagcctgggtcctactagtttcactcaattatatggcatgtgagagagaagaggagagagagaagagaaagtattgttattttattcttatgacattatgggtagcttatcttaaagactactatatggattactttcacaatgtataatgaccactttagagatttaagaccctctcctattgctacattgtggctgcccggtagatgtcagacctaaaaaagaaagggacaatttacagaagttagttaaaccgagtgcagtctgcagtgagctgggccttacaaagtgaaagctggtcccaacgagaacgagtgggtttgcgatctcgattgaccagtgaaatttgagcccaacgagacgtcgactaattttgccacgcttcatcctctcatcttttcgcttatgcttatcagctaaaatttaaattttcaaccttaaatatttgattttaagatttctttttcatcatagtttgtttttcggcctttgcttttaaatcgttaagaacacgtatataaaagttttattcacaaattattttttatttgcaaatgtaacgttacgcttttgcttattatcaaccaaatgatgggtctgtcaatgaattttgacaaatcctaaacgaaatccacactcgagacgatgagaaatccgatcgaaatttatcgacattctgaaccctactactcacaagccgtatggccacacacagaggtattcctatttccgcatgctacgtttgcccagggttataattcaatgaaatccaaaaatgtggacttttcggatttggttaaaaacaaaaacctcttcattttttggatcaagttttatcggtttatcaatggatttcacgaaatccgatgttaccgttcttgagtggatttagatccgctatctgaggctgataagctaattggtgaaaatattttgacttttagtttattttttagttttacaattacagtttcttgtgaagatctacagagcttgtgagagctgaagggtgaaggctccagctccccaaacagccctctctctctctctctctctctctctctctctgactcttgactctctttcgctgtgcctgtgagcaacgctgttctcctccctccggcctccggcctccgctctccgcctcgcctcgccgcccgatccgcgcgtgccttctcctcctcccccttcgttgcgtgctcggcctccgcacccaccctccgcttcgatcagccgcagcccgactcccccctgcttccccgcctactccgcgccgcccgcctttggcgctcgccgccgcggtcgcccccttccgcggctcgtcgctgggttctcgtccagcacgcgggtgccggttgcttcttcttcttcctcctcatccggtcgccgcgtcaccaggttggtgtccccgcattgcctgctgcgccgcgcgcggtagatagattgggcactgtcgaatgggttgatttttttttcgaggatgagctgctgctattgcagtttctagatcgggaagctcttagaactcgattgctttttgctaattatgtcactagagcaggaattactttgacctaattcacccccctaaaccctaaacctttggtgtactttctaagttctaaggaactagggaagcgtagtgttagcggttgcatgtgctattattatctgagttagtaaagccagatttgtttgattttgcgatttattttttagtatgtgctcaacaccaccattgcagtatctgtagaaatattttttcatcattggctcatgtcctactatctgtaattgcagggttagtgcatggcagtgacaccgcatcatcggctatatgaatttgctaagactgcccttatcaagattttcgcattcccttatgccacggtctgttatctgctcccctctttcctgatcttcgattttgttccagatcagcatgttccagatcagcgtgaatcttagaatcagaaaactgatgcttctctttgttgattgtgaaatacaataggtctgtgacctgtattgtgatggtggggttgatacagacaagtggggcgatgcacaaattggtcactacatagggattggtaggataattcacactagcctaagcctctccatggttacattgtctagtctgtcttgttaatttgacgaacatactactttctacaatagatgcctctgcatcaggtgtcaatgatgctcgtgagctgtgggagagcagaaagaaacttttcacgtctgagttcatcgagttagatccttctgctgtacaacctccatccctcctttcatacttgcaactaaatacactaacattctagcatgagtagtttatagctgacacttttagtggtttatacaacaggatgactttgaagctcaaatgcaagaaaagggcatccaagcagatatagtttgttgtatgcagcatttgcaggcaagttgtctgttctctgttgctgtaatatggtgtttacttatgagctttgctaatcttcactgttaatctatattgaaagacagttatgtttcgagagtgaggaacatgctcaaaagcttctgaataatgtatcatctttactcaaacctggaggctattttgttggcataattcctgattcatctacaatatggtatgggcaactcatgagaattctgtttttttctgtctagcgttatagaccaaggtcttcaaggctgcatacaggcaatgggtgcctaatcttgtagcacataaatagcataagtagtcctttatgctgcataagtattacaaggggcataacacttaagttttttagaaccttgtttatgtcttaatttctttcttcttgcgattttttaaaaaaaataatatgattttaatggaaaatcgcaaaaatataggtcggttaggcgaaatcgcaagtttagcaccctgtcgaacaaccgtggtttgacaggggaacaaccgtggttcgacaggggaacctatcgaacaactgtagtagtttgacaggatagttggtccaagaaaaaaaaaataagtacttgctacagtatccggtaggaacatatcgaacatgcaaagttcgataggggacatatcgagcaggcaatgttcgataggggcgcggctacagtgctacagtgtttttttcttttttttaaaaaaatattttatcacatgtcgaactgtcccagttcgataggtaccctgtcgaactacggttgtttgataggtactctatcgaaccacagatgttcgacaggttgctaaacttgcgatttcgtctaattggcatatatttttgcgattttccattaaaattgtattatttccaaaaaaaaaatctcttcttgcattatagattatataagaaatagccaatggcataaattttgcagttgctaagatagaaggctagaattattaccaagaagaataagatcgatacctcaattgagttagccgtaactgttggatgtttctaacttatatgatatttctaaattgtaggacaaaatatcaaaagaatgtcgaggcttcacataataagggtctgaagactgttccaaatagcattcgctcagagaactatgtcatcacctttgaagttgaggaagaaaagtatgactcgagcttgtgtattttaaatatatataaaaattcaggtttgttatggtgagggatcatatgcaatatggtgcaggtttcctttctttggaaaaaagtaccaactcaaatttgcaaatgaatcaatgttcgagaatcactgcctggtccactttcccagctttatgaggtaatattttccttattagtcttccaacaattgttgtacagccttatttcgtaaggtatcacattgttagattatgttgaaacagattagcaagggaggcaggacttgaatatgtagagatccagaatttaaccgagttttacgatgataacaggtgccaatatcctattgcaagttctatattattgtctttgcatcattttgttgtttatttagagtaaccattcttcggtttttttatttgcgatgcttaggttaccctgtttaaagctgatagttacttttttgtgtgtgtgttctcaccgactccagaactcagtttgctccattgcttggtggttatggttccagtttggtggatccgcgtggaaagcttgtcgctcgttcgtttgatattttaggtgatgtagccttttcccttcaggattcactgaaggtcccagtttactcattgcctgatataatttctgcaggcttgtattcaacttttgttttccagaagcctgacccagatgcaatgccaccaattgtaacacccgaattgcatgatcctgagaatgatcaagaagaggtctgctctgcatttagcaggtgttgatatttactatcacattttactgatatttttttgttaactgtgagtgaaatatcaggaatggctctggacgcagcaggcatcaatggacgatggaagggtctcacgtactgatatacttcctcctgcggataatgagaaaggcatccttggtcctggacctgcagatatgaggctttaagttcactgaacaactggatataggctcactgctggagttggagcaacgatgctcctgcaaagctgcaattggtggtttatggatgcatacatatgcatgatgctcacgtagtttctaaatttatttaggctctacctgtaaaaagaaaacctttcagttattcttgagaagatagaattagcaccaatgtcatatgtcacggtagaagatattgatagagtagttcactaattttgtagtggatcctttaaatattactccctttgtcctataatatagcaacctaatactagatgagacattgaaatgttacaatgaatctagataacctcctgtccagattcggtgtatcatgaaatgtccaatccggtattagattattatattatgggatggagggagtacatcattacccgtttacgactgactcagtaccgactgtcttttcttttgcatgatgtggtaacaaaccatcgcgaatcacttccgtctcacacgtctacgctgcatttctttccccctcatgaactctcgtatccattccatatgcatgtgccgagagaaagggagaaaagaaaagataaaaagagcggtgtctagaacgcgacgacgaactcgatgcaaagcaaaagtttttttgttgggcatcactcgtgcctgccgcgatgcgcttccggacaggcgacatctgcctgcggttttgtgccgtgccgcgcgctttcgcgaccgggtgtggaccaggagggcacgcagacgcaggcaggatggaccgaatcgcgcgtgcaaagcgggggacgcggttgatcgagttggtgttggaaggttggtggtggtgttgccgctggccactgcagcactgctggatgattgttgatcgcccacggcggccggggacggaggcacacggaccgggaccggtggcccgctctcacctgcacggcaccacgactgccttccttccccgctcaggagagcaccaaacctcaaaaaataaaattttcacctgcttcaagagtagtaccaatatttgtttttatatactccctctgttccataaaaaccaacctagaactagatatgacatatcttattgcaacaaatctagacatactagaatatgtcatatccagttctagatttacttttttaaatgaaaaacagcacaggtgtaccttttcattgaatagagtaggagaaaatacaacccctaaaggtaaaccgcttgaaacactggccaagctagaaaaggtaaaactgaaattcatatttttatagagtttgtttgaattgttgataactggataacagtcctgatttggagtttggacgggcacaaacacaaatcgctactcaccgtctcaccgagttcacagttccgggaaactgttactccgagacccacttcgccgcgaagtaaccggacccttatcctatggatatagttggggcccccttccccggcccaccaccgcacgcaacgcatcggaccacttgacttcgcgcagcggcagcggcaaaccgcttcccggaaaagaaaaaataaaaaagaaaaaaaagagaagagccgcgtctccctcccaccgaaatccctcctcctcctcctcctcgtcccccattcgccgcagggctcggctccacacgaacgcgacgcggcggccgccaccgattccatccggaggaaggagccgcgccgcctccttcctatatccctcctcctctcccgtcctaaaccctagccgcgaccgcgagttcggggtcctaatccggatcgactccgcctccccgagtcgctcggacgcgttcttcttccgggtaatcttaatctcctactattccgcgtttgagcctttacgctctctttctttttcttgtgtgtgcgtgatttggcggtgattctcgaggtaattcgttgcttccgcacgttggttttctcggtcgatttattatcttgtggttttttttggggggttgatttggtgtaggggttcaatgatccattattactacttgtgctgtatgtagggctgggaaaattagggtttgttttcccgtttgtaacggctaattattatctcggtgaaaaatcgacggcctcgctgtaatattaaggctcgaaatctatctgtgtggtaccaggtttgactttgtgctgcccaagattgcatctccagcggaagaatcagagggattaaattaacgctgtctggctgcgccattaataaccttgggtggtggtggtggtggtggtggtggtggtgctccactggagtggaggctgtgagcaagctagtggagtgggggcgtttcttaggcaggtgctatggcgacagcaacaatggcaaccgcagctggcgcggctgcgcttctgtactacacgctgaaccgccggcttcaggtggagaagctgaatcaggaaggcgattgcggcaatgaaagagatgccgcgacgaggggggccctcagtaccaccagcaggagcagggtgtcaaggagggatgttcgtgcccctgccacatggctggagacaatttccactctgtcggagacactgcggttcacatactcagagacccttgggaagtggcccatcggtgacctcgcttttgggattagcttcctcctcaagaggcaggttggtaaccattcctttgttgctaataaacatgcatctttgtaatttgtactacttaataattgtaagctaatagggtctgcttccatgatttatcttgcaaatattgtagtgattataatatggtgcagtgtgcatttatattagctttgttagcataatggggctcttcaattttgttaaactaaaagtaaaataattttggaaacactttatcctagcctataaattgatttgacgatctgaacagctcgcagatcatttacctcatattattcaatctgtattattggctttttgtcttgaacatctgatataagtaaagggagaaggtgctccatacaaccctgcaaaattttacccctctccggaacaacaatttctggtagaagtacatgaaggatttttgtagtatggataaaaaaaaattatggtatcattgaaagaagccctttatgtatatatcatttcatgggaacatatcctgtacacaagccttctcgtgtaaacactgtgcccaccaactaacaaattttataaaaaaatctagaaaaaaatgtacaagtacttccaatagtattacacttatatgcaaagtcttaacctcaaatcaatatattttagccgtgacagaaaagataaaaactcttgacagttttgagagtataaatctgttagaaatttgtctctttttttttgctcactatatataatgaatttgaaaatgagactttacagatagatgtaatactactaaaagtacatatacatttttttttttgaatttttggtgacatgttttagtatatatgagaagacttgtgtgcataggatatgttccctcatttcactccattaaatttacccccattccttttgtatgttaccatccacaatgctgcccatcctaaatacatacaactgaaagcatattttttacagcataaaactaatctgtagtgcacaccggcacacacacacttcagcagagtttctgatccactggttgtgacatgtgttccaggggaatgtacc

SEQ ID NO: 17966 - DNA, 865 bp, Oryza sativa
gttcccgttgtttttggaggcgactggctactcttcggaggatgttcttatgcaagagcctaaagcaggagtgagtgaattttacctgtgtttctttaggggtatctcttctcttgctgattctgcattcctgtaatatttcacaaggaaaaaagtgcctactttgcattgatctggtgtttttcttgggatccttgcagattttgaagccagctttcaccattatacttgatagagacaagcaatgtatacttctattaattaggggaacccacagcatcagggacacactaacagcagccactggtgctgtggttccattccaccatactattgtacaggaaggtggtgttagcgatttagttttagggtacgcgcactttgggatggttgcagcagctagatggattgcaaagcttgcagccccttgtcttgctcaggcattgcatactcatccagattataaaataaaggtacagcgctttgcactgtttttgtgctctcctacccactgttgtaatagtgctgaacgtcgtatcagcacaaccatttagagacggatgcacttattctgtattgtgttcatggtaaatttgtatagattgttggacattcacttggtggtggtacagcagctctgttgacatatgtcctgagggaacagcaggagtttgcatctactacttgtgtctcctttgctccaggtatgtgtgctatgatgtttttctgagagttatcttgctgcacactgaacaatgaaaattgaaaatactgctttgtcacttttccttattccactggccatctcctttgttaacataaacctgcatctcatgcagtaaacattataggataacggactaga

SEQ ID NO: 17967 - DNA, 722 bp, Oryza sativa
atcatccataataatagatatctttttaccaaactgaccagatctacgagttgaagagagcacagacccatatacaagctgattatattcctcacggcttagaaaaggtgtgtccagctttgtcaggagtacagcaccaataatgtggtcctacaaaaaggtggaatataacgagcttataatataaaaataaccgttacagcattaataaaaatagtgtgatttttaatatattactgacaggatgagttcactgatttaaatagatagatgcacaggaaaggggaagcctgattatacaccactgaatgtgctcaacagcaacagtgtggaagaaccgaaacatcccaactgcatatgcacagtgttacctgaatgaggcctctgacagcatccccactccttggaccaatgtactgcttatttgcatcaacaatgttgatggcctcagcacgagatatttcatcttgtggaaagtgcacattcatttcatctccatcaaaatcagcattgtatgtgctaaaaagaaatacagtgtttgatcaacagaagtagacaaataggcagtgttgctgaagatatgttgtaatacctgcaattagcatagtgcattcgaattgtcttctctccaggtagcacacgaacaacatgtgccatcatgctgggcttgtgaagagtaggcttcacatcacaagaaaaatgaaattagagacattgcagag

SEQ ID NO: 17968 - DNA, 2103 bp, Oryza sativa
ttcctgcagccctttgagaaaggacgtgctcagtagtgtggaacaaaaacttgcataaggtactgcattgatgaaggcttcctttaaactcaaacagatagcagtattataacctctgtagtcaagagatgtttctttcctgatgatgccaccatttctttgattgtatcatcagaaatgcgtcttgtttcattggttgatcttctggacaaagtaccaggtgaagttagttcttcatcaagaccggaaacaccagtttctcttgagtcattaacatgaccatctccactcagtttagcattggcaatcgcatttgctcttacagaggaagaagttgtatcctacaaaccacatgtagtgaatagtgaagaactataatgcaacagacatatcagttccaagaagtataagatatcatcaaggaaaaagcgaaattgctaatgctgctgacggatgctaaatcatgccatgcaaaggtacacgacctcggcaaagagcatgcctacttactcaaccaacctgacctacccataaatataccgtaaaaaattgcaaacacaccggtcactctgtcagtaccatttgacctagtgtagtgcaataaaataaggggaaatcactttgctttttctaatgcatactatgaattttatattcatttagttgataaacaggttcccacagagtggcatccacccccccccccctacccatagcttaccctcccctttccagagggtgaatggaaaagagaaggataagcttaatgcaaggaaagagatgttataaaaccttaccaaaaaaaggctaaaatcgactgagaagcaatttttaaatatatatatatatatatatatatatataaagagtactggtggacagtacaaaatcgcaacctataccaaactttatctctgttgtttactctaatatgccactgaatctaatcataaaatattgtgtggaattataacatactacaacatccaaaatttgctagattatatttgatgttcatatttacaccaccgggtgataacatgggccaattgcatttctgccactatggtttaacggcaccgttctatcactcctgttaggctaattgctgtcatgccactagattggaattttgttgggatacttcccacccatcattaaaaaggaattacacccccccccaaaaaaaaaaaatccttttacagaagtgcctctacattgcactgcctgagaagcgtgtatcgtaaggctgacgtcaaccagcaccctatccatggtttaggaagacacgtgttcatctttaaaaaatcaatgtaacctgtgggttagatggtactgcctaaaagatttaagccattaaaatcatcacgggtaccttgatcaaccaaccatatataggatttttgataattggattctttttttcacaatgtgcacatttcttctgtcttttcttcattagctttgagaaaatcgaaagagcctccttcagttggatcgatgtccaagttttattctccctctccgaacgagccgatttatcacctgaagtggcctcagtttcatcatcttctttcgaaagtactttgccacccaagtcttccaaatttttagcatgagcaatatcacctcttactaatagttcaagctcatttgtgtatctgtctgcctaataaagtaaacagaaaatcaaatattttagtgatgcgacagaaccttgaatgctccaagataaagaaaattgaaaaacaaaataaataagatgaacatgggcacacctgttccttgttcaaccggaacttgtgacaatggaagcacgtaacctggagaaggtttttaagactcataaaaagcaatggattaaatagtggtttcgccaattcgatatggccaaaatggccggggcagcgaatggactgctgaccacaactcttgcagctgtacataaaatttagacatggtcaaaaactgaaaattctaattttcccaaaaaaaaaagatacatgcaaaaagaaacttcaagggttgcatcaaatatacccccgagttaaagtaaatgaaaacaaaaatagtccctcaaaacatgtagcattatagattcaa

SEQ ID NO: 17969 - DNA, 7208 bp, Oryza sativa
tgtcagtatcattcgtgggtcccattgctgggtcaagtaatccacctggcacaggacagttcttggcatcgacacgatccgactttgttatctgtttaacactgatcctcttaatttcatcatcattgtagaagctgaagtgatagaattcacttcctctgatgcggcctgcgcaagaagcaaaaccatttaacagcagaccgtaaatgatcacctaggaataaggctcaaactgcaatatacatatgtacactaaaagtccaattagaatcatgcgatttatcccccactaactcgaaaccaaaagaaaaaaaataagacagtcagtgaaaagtgacaagacacaaataggccatgcttttcctgaaaacctttcaggactgaagcgccccaaccttaatcgtaagcatatcggtacgcgttctaacacaccaaaacaagcgcaacgagatgaaatttctagcactgagaagcaaagggaatatatgctacgacttgcaaaatcactgggaatgatccggcaaccaaacctcgtcgggccgcacgtcggccatcctcgagctcgcgagcgcgcgctctgcccagaaacaagtggggggaggtggcggcgggcgaggagaggaggcggcggccgccccccgcgcggcggaggcgagaggggggaggaggaggtggggattcgccggccttgggccaccgccgcgcagtgtggagggagaagggaggaggaggggtttcaagcggcgctagggtttaaggttgagaagcaagagagtcgacttgcccggcggcgtgtttctcgggctgtagccccacgagtccgctcgattggatcgcttgtgcttttgggccgggccagatttctacgtagagagccgaaatactcctggaacaaagtataatttacgtccctcaggtatagcccgagtttgatttgcatcctttaaccccaaaatcagatatggagcatcctccaatttctaaaaccgacttccttgatggttttagaagcttttttaattgacgtggtgtttcgactgcgctgagttatcatgtggctgaccccacccttgctaaggcccagttgtcaacctcgtggatctagggggaagtggatgatagagaccatatccaaaagcaggcagcggcccatgtttgtgtcggctccaggggtgtcatagtcgtagaggacgacaacggtgagcaatagcgcaggggcaggaagccacgccacggcatacgcctcgaacttgtgcctcttgacttcatcgttgccatcaccgaagttgtccttgccactagggtgaaaagcctcggcctcttctcagcgaggcacgagcagcgacgagctcctcctccgagctgggccatgacgcgatgcttatcttgcccgagcgcgacgatctcctgattttgacgacaacatgcctcccagtgagctactttgacggcacctacttgaagaattgccacctctcccctgatcaccagagccatttcaactaagccctccgtggtgttaaaaaaaaaaaactaagccctccgtgaccggggaatagaagttcttctttgaatgccttcggcgaaatggcccaacctactgccttgtttagatggggaaaatttttgggtttagtcatcacatcggataaacggacacacatttgaagtattaaacgtacatagtctaatacaaaacagattacagattacgccaggaaactgcgagacgaatttattaagccgaattaatctgttattagcagatgttactgtagcaccacattgtccaatcatgacgcaattaggcttaaaagattcatctcgcaatttacacgcagtctgtataattgtttttttatacattcaatactccatgcatatgtctaaacttttgatgtgacgacgtgaacttttttttttatgaactaaacagggtaggggtgggcattcggtctaaccgaaaatttcggtctcagtcttcggtctttcggtctttgaaaagtgaagaccgaatttcagtgaaaaaatgtcaagactgacaaattcggtctcggtcgtctcggtcttgaccgaaactcaacaacattttcatatatgcaaaaaaataatggaaattttcaatacaaaaatcacaaaaaaattcgtaagcacttatgagtaaagactcttattaggttgcatgcctagaagaagtagggatgtgaaaattagagtttaatcctattaaacatagtggattgtaagttgtatttagacattttttgataattcggtctattcggttacccaaggagactaaccgaattgaccgaacaaaattcggtctttcactacgtaggaccgaatttctcgatctcgatctttttggttcggtctttttctgcccacccctatgcctacgaatgctcccagtagtttagttgaacctccgctccgccgggcgtgcccgtgcattagcgaagacaagacaggagtggcaacgcatgcgcgcaagcgattcgtccagagtatcagtttcaaccccaagcccaaaaaggttatgctgcgccgctcagggacttgagcggcagggctgtcagggagagagacgtgacgagaagcccggctccgcctgcttttcctgccgggttccggtgtgacataggcgcacgtccggccaggctatcctcctcacagtggcaacaaaaacagcctcagaatcccctcaggcctcaacaattagtatgatttaggatgtgcttggttaggttttttaacctgcttttacttttgtaaaagctaaaagccaactaaagagttcaaaagtcacagctattttgctcaaagccagcttttagtgtagtacaaataaaaagtacctctacccctactttcacccgcttttgagagaaaaaattacccacctctgccattatgaaaaaacggttcgacattctattcctatctcctctcgcttcgtcacacgcgcccgacgcggggatggagcggcgcatctgccctccggccagccagcggccgccgtcccctcccaacgcctaccgccgctctccccgcccgacgccggccgccgccctccctgccctccccgcctgacactggtcgccgccctccccgcccgacgctgcgtcgcctcgatgagctgccaccaccgtcgctcctcctcctcgccaagacgccgccgctcctcctctcgtccccgccggcccactccgccccctccccgctcgacggtggcgccgccccttctcctccccgtctgacgacgccccttctcctcctggcaaggtagcaacatcccggcaaagcggcgcgcgtgtcctcctcgccgagctgacgagccgccgccgccgctcctcctcgccgagccgccgcgcgtctgcctccccgccgcacgtcctccttgccgccccgccgcgcgtcctcctcgccgccgcgtctgcctccccgccgcacgtcctgctcgctgcgcgtcctcgccgccccgccgcgcgtcctcctcgccgaactgccgccgccgctcctctttgccatggccatctcccttttcttttttttttcacgtgtgtatgacatgttgggcccgcttgtcagcgggactagttatatcaaaagccacagctgttgaaccaaacgagctttttcaaaagttacagcccatattccaccgctacttttcaaaaagtcacagcacacagctacttttttaaaagccacagcccaaccaaacacacccttataaacttacgttttttagctcgaccgccttgtgttttgctagcaactcgagcaaatgcagagggaataagagaaattatctgtctcaagatggtagtagtatgttgcaacagaattcagccgaacttcttataaactgatctgttcgatttgtaatctatgaacatttttcagttgtttccatatcgacagttctctattcagtttcttcaagttttgatgaactcgataaattcatgcatatacagaatattttgtccctcggtgtggaataggattcactcgcattgatcattaatttgatccatatctttgacgattagaccttactgagtagctgaagatacgtatgggatatttgagaaaatgatatttgacacataaaactcagtagagaacacttgaacctgaaaaaaaaatcctctttgacatgataagactacagggaaatctagccaaatagtatttgtgtagattccagtattccacatatactaaacgaagaaaaatcttcccaggaagtgtggttaccatacatgttgttttcatctcgtccataattatctgaggccaatcactatttttcccccttcctcgtttttattgagaatcatatcactccacttggttagtgcaatcttttcttgttactatttatgatttttttctttttttttgtgggggtggatgctcactttgtgacaccacttgatacattgtggtcggaaatgctgtttggcgatcgatcccctcccccctccctccctccacggctccacccctccacctggtttccttttttggcactgcattacttttctattttagtaaatttatatacctaaaatttatacacctcaagtttacacatctaaaccaaaagtttatatatccgattcaaatttgaatttgaatttaaatattttgtatatatagtatttctatacatctaaagtttatagatctaaagtttataagtcaaaagtttatatacccatttcaaatttgaatttgaattatatctgattcaaatttaattttgaattcaaatattttgtatatatagtatttctatacatctgtatatatagtatttctatacatctaaagtttatatatagtatttctacccaaagtttataagtcaaaagtttacatatccgagattcaaatttgaatttgaattcaaatttttatatatagtatttctatacataaatttttctaacttttgttttttaaaaaaatttgtgtggtgtactgtagtagaaatagaagaaagggaggaggaaggggagaagagggaggcgcgggggggggggggggggcaaaccgatcaccccctggcgatcaatcgcccattagtctcccccattgtggtaacactgggcaaagttgtccgtttgttccataaacaactctgtggcagcacttgatacccctagtcccactgcccgtattgtttgtttcataaacaaagggacatgctatgtgcacaacccacttgcatttttgttcgtgtgttgagttaccgacttccctacctcgtttttcaggtacatacttttcaaactgtaaaaatgagcttcttttgcaaaaaaaaattccatacgaaagtcactttaaaaaatcatattaatctatttttaaaaaatatattagctaatatttatttagtcacgtactaatggatcgttcttttttatgtgcgaggagcacacgatgttggttatccttgccttttagtgcatgtactgaggtggtgtttgaatccagggaataaactttattccctattacatcagatgtttggacactaatttggagtattaaatatagactatttacaaaactgattacacaaatgagagttaattcacgagacaattttttaagcctaattaatccataattagagaatgtttactgtagcatcatataggctaatcatggattaattaggctcaatagattcatctcacgaattagtctagggttatgaaatgggttttgtcattagtctaaatttaatacttttaattagtatcaaatatacgatgtgaccaggactaaaagtttttagtcccatccaaacaccacccgagaatcgacaagcttctttgagaaaaagaactctacaaatgcaacctagagatctttccattattaaactgcactattgtggtgtggttaaattatcctcctttttgctttgtagcctaggaaggaattcatgtggagaaatgattgcaactacgcccgtatacaagtagggttggcttggccacagtcataccaatatccacttttatatgcagctcttgcctatcaaattcagcaaagaagaacggttttttctatggacgagccaggccactcgccggaaggagtggaacagcgacatccggcctcccacccgcacgggagattctttggcggttggtggtcccaaccaacgtcgtcctggccctaccccccggatccaccaaaccacacatgacattttttttactcatacagttaactttttaaatatattggatcgttcgttttatttaatttctttttaaatatataaaactatatatatatataaataaaagtatatttaacaataaattaaatgatatgaaaaaaaattaataattacttaagtttttaattaacttaataagatgtacggttaaataaatgtaaaaaaattaacggctttaaaaatatttagcgtcggagaaagtattattatttcttcattctttctttctccctctactccggtgaggagcagccgccaagttattgtggagtgaggtggagagcacgggagatgacgtgggcgctgacacagtgatcagcaacgggaggcggaggaagcggatggcgtttgcatggacgaggaggccagccgctgccggtagaaaaggcagtggagcacccaaaccacacagccgctcttatcggcaggagagtggaggaggccctcacctaaaccctcgtcctccaatctcaggatggagcgcgcacgccgcctcgccaaccgcgcgctgctgcgccgcctcctcgcggcggcgacggcggagtccccggcggccccgtcccgcggcatctcgaccctggccaaggggtcgcgcccgcgcgcccccccacgcccggcgccccaccagtacaccacggggcggcggcccgtgtcggcgtcggcgctgcagccgagcgacacgttcccgcggcggcacaactcggcgacgccggcggagcaggcggcgatggcgtcggagtgcgggttcggcaccgtcgacgcgctcatcgacgccaccgtcccggccgccatccgcgcgccggagatgcgcttctccgggaggttcgacgccgggttcaccgagtccgagatgatcgagcacatgcagcgcctcgccgccatgaacagggcctacaagtccttcatcgggatggggtactacaacacccacgtc

SEQ ID NO: 17970 - DNA, 2188 bp, Oryza sativa
tacacgcacgccacccgttcaccaaaatgcctgacagcgacagaggcgataagagatacgatgaatttactagtcggtagtgataaagattggctgtggtgtaggccttgctcgccaacatggcagcgatgtatgctgtctaccatggtcccgaggggctaaaggcaattgccgaccgtgtacatggactggctggtacatttgcccaaggattgaagaagctcggaacagtgacggtgcaggagctgcccttcttcgacactgtcaaggtcaaggtcgctgacgcgaatgcgattgcccaggaggcctgcaagaacgagatgaaccttcgtgtcgttgatgcaaccacggttcgcttttctgttgatgtttcccttgtattgcaaccgagtgagtttgttgatgttgagtgttgagcattcaattcaagttgtgatgtgttgcagataaccgttgcctttgatgagaccacaaccttggaggatgtcgacaagctgttcaaggtgttcaatggtggcaagccagtaagtaatcattcaattggcgcaaaaatttgtgtgcttgatagtgaaattggatcgtgatattaaaatgatgtgtcgttacaatcatttttaggtgaacttcactgctgaatccctcgcaccagaggtctcaagctcaattccgagtagccttgtgcgcaagagcccctacttaacccacccgatctttaacatgtatgtgatgttaaaaggcatgctgcttttcttcactaatttcttgcagtgttaaaagataaaactgaacttatgttgtgggcttccaggtaccatacagagcatgagcttctccgctacctgtacaagttgcaatccaaggacctttcactgtgccacagtatgatccctcttggttcttgcactatgaaactaaatgctacagtggagatgatgcctgtcacctaccccaactttgcaaacatgcacccatttgcacctactgaccaagccgcaggatatcatgtgaggggaattcagcatttgtttagtttctaaatgcaaactgttcatcagatgatctgaaatggcttgttttgtgatgaaggaaatgtttgatgacttgggcgatctgctgtgcaagatcactggctttgattctttctctttgcaaccaaatgctggtgcttcaggggagtatgccggattgatggttatccgtgcttaccacagggtatgtcatcataaataagttggcatagctctcctgttttgtttcacattttatatttacaaaccatgttataaaaactgcaggcaagaggagactaccaccgggatgtctgtatcattcctgtgtcagcccatggtacaaatcctgcaagtgctgctatgtgtggaatgaagattgttgctgttggaactgattccaaaggtaacattaacatcgaggagttgaggaaagctgctgaagcaaacaaggacaacttggctgctcttatggtactgttctttttgctctgtaaatgttatcatttatctggtcttctggtagtactgtggaatgcctatggtctctctggtcaactattcactgttaaatttagagctagttttctaatactgtactatcactgcatcaccttttcgctatatttagcgtgttgcttaaagtcataaggctatttctgtactttttgttgtttctaatatatattaggatagaaaccagatagctgctccataacatgatccctatagtggctgtatttgtatacattcaataatttgaagttaatcgacatatataatagaaacaaatccccagttagtttagtttatctttttccatatgagcaattttatagtctttgagaaggtaccatgagataccactttttccattgtaaagttgatacctcctggtatctaattactaggaggtaccaaattttacactaaatttttagtacctcatggtatcttctcaaggattgtaaaattgctcttttccatataggctatagtccgcgggtgatttgtgaataagattttttttattatgggcatagaaacataatagttcactcaggttgatttgatttataaaacaagattttgaaatatgttggccttatgcgtaaagtaacagaatgttgcgtggttgctctgttcaccaggttacctatcttcgacccatggagtctatg

SEQ ID NO: 17971 - DNA, 20738 bp, Oryza sativa
gccttcctttttgacctttgcaagaattgaggccggtgttgaggctgtacttcgaaagatccttgcattacgctccccccagatctcccaggtgactagcatcagtagcgttcgcagaggggctcttggggtgctgggggattcgacgacaaggttccaccaatgttcaatcgaggggcagtcattccatttgtccatttggaggtcagtatgtgtccatctttggatttctgcccaaatcctcttagtgactctacatttggccagaaggtgaaccgctgattcgtcgattgtgcggcagagggggcaaaccttttgatttcgctagcctcaattccccaatctgtcagccgtccatagcctattctgggtagcaagccaagagaagaatttgcatttcggcggcacccacgctttccaaatcgattggtagaaaacggatcttgctgctcccatgaactgcagagatgaaatatggatacttcagtcattaagacccacacgtcagtgagacataacacgtaccacttcaacacctaaacttaaacatcacaagaccctaaagaaaaaaaacttaatcatcacaagcaaataaacactccaataaatcttcagaagagaaaaaaatgaatccaaaagacctggatgatgaagggtaaaaccgccattgacgtattgaccactacatgatccaaatgaagcctatgttagctagtgcatgttaagggcatgtgggcatgtttatattgtagccaaaataaactttaccaaattttggcaatgtcaaaattttggcaatttggcaatatggccaagttttgttaggatttattatgtatttaccagagtttcataaaaaaactaaatgggtgcacatatttgataaatttaccaaaatttggtaaggtttatttcgactacaatctgaccaagccttaagtgaccacgtagttttagtgtaagtacaacaaagtgatataaacatattgtaagagtttttatatcaaatttatgtcaagttaaaaagaaaaaagtagctacaacagatttacaactagctgcagtataagctccaatcaactttttatgaaaatgagttgtactatagagaaagtattatatacctaaggagacatcccctcgtatattaaaaactatccaaatggtcatagaaagttctttaaaaaaataacaatattcaaacaacatatttatgccacatcacaaaatcttaactctaaaatcaactcacgtatcgagatataaagaacaaatctatgaactgtattttgcactcaaatttatctctttatttttctcaatgtctaggcgattaatttttttaagtaatagatgtcactatacttataacattattaaaataatttaaatttttctaataatcatttttctctaatcaacattggatttaagtgataaaggatctgtttagattggtgccattttaaaccataccgttgtttggtaaaattaacaaatatatggttgcatttagtttgttaccaaatattggtaatgcatagaaaattttggcacaacatatttattccaacatatcaaaatttggcaattctatcaatttgtcaaaaatttggtattgtcaaattttggtaaggttattttcggaactaatctgaacatgccgaaaggtttagggtgaatacccaacgtgatccttgaactttcgcttaaggatcaatttagtccctgacatttcgtgttgtccaaataagtaccttaagttcattgtgtgattcaatatggtccttagaccctctaaacatgccatgtgtacatgccacatcatctatgcatgcaaattcaatatttaaatatcctttacacccttatgttttcatatgaaataaagaaaaactattgagaaaacacacaaaaaaaagcttttgaccattggcaaaaatgtgtagtaggggtgaaaacggttcggaatttttccggattccggacctgttttcggaaacggaatcagccggtcgaaattttttcggaatttctcggaaacggaaatattttttcggaaacggaatcgaatatgataatagcagtttccgtcggaactcggaatcggtcggaaaaaattccggaaagtttgtcggaatttccgaagttaaaaaggcccatccaaatagtccataattcctccagcccaacccaagtccctactaaccgaggagacaggctaaccctaggatagaggcggcgcatccaggaggttgagtcgagcacgccaccgctggccgccgtctcgtcgcccttcctctctcgctcattttcgccgccgccaccaccgacgatgacgccgacgacgccggccactggccacaccgccgacgccggccacaacaccacactgccgacgccggccacagccacacgaccgacgacgccggccactagccacaccgccgacgccgccgacgcctcgccttgcaggcagcagcagccagtagcccagtggcagcaggtgttcctgcttctgcttatattatgttctgttaattttgtagaagagaactgtattattaatatgttctattgccattcaccaagcactccaataaagacagactgctagtatgtccagctaaagacagacggtgttcttgagcctaaaccgttgatttgatttcttttatcgtacagatttgtgatttgaactttgttttgtgatgactgatgaactatgtactaatggagtgatgtgttatgagattgaactaagtactgaaatattgatgaaattatatgaagttatagaagactatattttgctgtgaagctcagtttgagtggtttctgtattccgataaattttcgttactgtatccgcaccggttcattttcgctccattttcggtttcgataatattcgtttccgttttcgtttccggggtttccgatttcgattccgattccgaaaaaaatatgaaaacgaaaacgataaaggttgtttccgtccgtttccgtaccgttttcacccctactgtgtagcattgatagataaaaaaattaatattttttgttttatgattgcttcttcttgtttttcttttctttatttgatagaaaattgaaggttaaaatggacatttaaatgcacgaatgacgtggcatgttcatgtggcgttttaagtggtctaaggactatattaagccgcatgataatctttagggtcatgtttagacattataaaatatgaaggactaatttaacctctgagcaaaaagttaaagtactgaactgactattcacccaaaggtttacgagggaatacttctcgaggatcagtggtggattaactgaagatgagatgctctacgtcaggtcaacatcggtctttgcttgtagcatcgttcattccacgctggtagtggtactatcttaagctagaaggccggccatctcgtggtagagacgtggacgcctctgcccttgtgtgcccctcagttgtaatccaccacgtctggctccgtttcagcctcccgttgccctatctatctagttatgtaagctagagctggactttgcttgtactccctccgtctcctaatacgagggattttgacattttttgcgtataccatttgaccactcatcttatttaaaaagtttgtgtaaatataaaaaacgaaaagttgtgcttaaagtactttgggtaataaagtaagtcacaaataaaataaataaaaattccaaaatattttgaataagataaatgatcaaacagtggaagcaaaatgtcaaaatctcttatattaaaagacggagggagtagcatatactatttcctgtctgtctccactgaaatttcgtgagatttcagttttcaaaatggggcctagccatgcacgttcgttggcttcttgcaagcactggatgatgttgtccttgtccctgagatgctgaattctaaactaatcacgcattgcttatcttattactacctccatcacaaaatgtttgacgccattgactttttaaaaaatgtttgaccgttcgtcttattcaaaaaatttaagtaattgttaattctttttctatcatttgatttattgttaaatatatttttatgtatacatatagttttacatatatcacaaaagtttttaaataaaacgaacggtcaaacatgtttaaaaaaattaacgttgtcaaacatttaggaaagaagggagtaattctcaagcgtcaagcgtgcacgctgagcttcgttatggcgttgaagattgctgcacagtagcagcagacagagaccttggtcaatcacactacagtccctgtctttacagctagcttgtggcctctggcactcatcagtgaggattgatcaatcaatcagagccttccctttctttttggcttttctttcctcatgcgttagacagcggtaaaggttcatctctgtagattctctacctgactatccgttacttcctccattttatattataagactttctagcattgttcatatttatatatatgttaatgaatctagccttatgatttgctgaactgtgaaggaaatcacttaagctcgtctccccagctcgtctcttcagctcccagatctgcacctgccgccgccagagctgaccggcggctaggacagcggcagcggcgggaggggggggcagaggatggtggaggatggcggcggtccgacagcaggaaggcgggtcggcaccggcagccctagaggctacggcggcggtggttcccgtcggtgccggcagccctagaggctgcggcggaggatgacggcggccctaggggatgcggcggtggctcccgtcggcggccctagaggctgcggcggcggctcccgtcggcggcctagaggttgcggcggcggctctcgttggcgctggcagccctaggggctgcgatggaggacaaaggcggcttccgacggtgccggcggcactaggggctatggcggcggctcccgtcggcgctggcggccctaggggctgcggcagctcgagacagtggcagtctgtgcactttgacggtggatgcctaggattcgggtgaagtgtaagtcaatcccgtaggttcgatcgtgtttggttggctagttccgactatacggcgaatgacgacggttgagagtggggccaacaagcggcgcgtgacgtcaactctcctgaaactgatgaagatggcacaaatggaggtttgcatcgacggcgcactaggggcggcggcgaccggtagacttccactcgtcaaatctaggcagagaagcaggatgtgtcgaggtcgtttggttttcttttcctttttggttctgttctcctctttgttgaggtgtgagtctaagtactcatatccttttggctgtgtatatccttcatggatatagagggccggattaataaaaatctattatctaaaaaaatgttaatgaatctagacatactatatacctagattcattaatatctatatgaatgtggacaatgctaaaaagttttatagcctgaaagggatgtagtaaataatttccaatggaatggtaaaaggaagccatccgaatgttataagattattaagagaaaaaagatacaataaacacaatggaaggttgttgaggttggttgtgcaatacagtgtacatccacgaaccgagtcaaccacacaagcacaaacccctaaaagggaaatatagcaccgaatcgaccgccgctatgtgtggtcgatcactgttggatctataacaataccatagatcaaagtctctaaatacgttgtcttgtaaaagttacaacgttaacgctgtcgttgtcgcccatctaaggaactggacgtagttttcatatagagtttctcgccaaaagagggagagaaaggtacatgtgaaaatcactgtagaatctaacctgagaaggtgacaaaaggtagattctgcttgttcaggaactgacgcacaatccggtagtttggtgctcttcttttgcagcctctgttccagtgttccgggcaggcagcagtacagcacaaacacaaacacgtttggataattgcagaaatgattcagggtttcctgcagaatcatgtcagttaggtgacacacaaacggctcgtcgttctctgtcaccgggggaccttgtgcagtgccgcagttgcgtcttgtgtgcatctctgaatattcattcagtcatcggaaggaagattcagacagaaaatgcagggctcacagcagatagcagcggatagcctgcccctgcctgctctgtgccaagaaagccacaggctagctactctcttcgccgctaaatgtaattatttccagcttatttagtagtaaagtttaatataaaagaaaaagatttcctttcagagtcatcaaatagtcaaaatcttaaatttcgaattacttagattccttctctaaacacctgattagtcaaaaatatttttgattcccatgcagtgaaaataacgttgtcccatagaaatactttatatcgtgtacaaaattttaatcctaaacactttttattttacaagggagtagtacgtagcaaagacagagaaacgcctagaaatcttccggctagcttcacaaaggtgatggcttatctggtataggtgaagtctcactcattaaatttatttgatattagatcattccctaatattcgccttccttttatgtatgtctagatttattaacatcaatataaatgtgagaaatgctagaatgatttacattatgaaacggaggaagtagcaatgatcaaccgtcagtgttagagcagccggccatgcaattaccgtgtgttgtgttgcgcccgagcgaacgatacggtggtggagtggaggacgtacgccgatgcaggatggaccagcattttcaagcgcaaacggcgacagccattggcattcgataaattcgatcgtggctaaccacactagagcaatagctgtggatatatctatataacattaacaggataggagatacgcgtgcgttccctccactcgcgcgggctgagcttagcttagctccccactcactcgccacttgctgcaattgcaatggctgctgctgctgctcgatgcgccggccatggcggcggcggcggcggcggcggtttcttactccggcgacggctgctcgccaccgcggcgttcctggcggcgtttgggctctgcactgctgctgctgatgacgctgccacggggagaggacaagggcatgatcatgtgatgctgagcgtggaggacatgttccctgactcgtcgtcgtcgtcgccgtcgtgcgacgcgccgccgcgaggtttgattcgttttgctcgccatggcatggcatggccacttcttgatcgagctctttccaagtctctgtctgtcatgtcagaatctcagtgtgagtgtgaggtgtgtctgctgctgttgcatttgcatatatcatgcattcattcatgcatggatagatgcttcagattgctctctgcatcagtgcttctttttctttttcttttcttggtttggtttggtttggttaatttgtttgcttattcaattgatctatcacccgtttgtttctggacttcaggtttctctggtttcagagctgcttttgtggttgttttgttgtgctttgaatttatatatacttacatacgagactggaaataattttgctgattccagtggattcacttacagctttgatattgcaaatgcttccaagtaagactctctctaaacaaaactaaataactgtagtaaatgtttctaaaataaaataaaaactaaatagatgtatgtaagactttgtgtcgttatctgctcaagtttttgtcttgtttgtccgttatcagaatactgtatcttccctgttttgtatggtacagtacacaacaagcgtaaggaaactgccatgaatttaaattgatggccacagtacacagggccatatacttgacagtgattttattacaaaaaaaaacaaatcacttttaaagattttgagtcggaattttttttggaagaccgaaagtatgacaaaaatggagctttggctctcacaggaaccccaaacatttgatactcgtaaaaaaaagggttaaatttgcattttaaaatatgttaggtgttaaaacaataaccctttttttaagtgcgagaaggacacacactcaaagcttgtgtgtcctaaaaacgctccaaaacataagaccttgcaaaacatggcacacacgtctgattttttccaccaaacaagcacacttgtatataaattttggtagataggcagatttacataaatctaaggatcggatatgtgcgtgaggaataagatgaaggcaatgatgtttctagagcataaatcaattaacaacgatggcacgttagtgaataaatgagtaacggttttgctagctatttgtggattatctaaacgtggtcaaaatacaaaattgtagctttcaaataactttattaacttttagcttgctctcttgggtttagctagctatatgcatgtgtttttatgttgctattgattatagggaaaattgcaaaaaccatctcataagtcaattgaagtttgacattttacccaataaatcactttgttgcaaatacttactcatctatttgttgcaaaaccacatgttttcataaagtgtgagccgtcaatgtattctttaccaaaattaaatattttcatagtatagtcttgacactttttttttgagattccacaaatagaattgctgatgagagcttaaatgttgatgcattgagtttctctatatgaacaaaaaaaagttcaatcaaacatgaaaaataagtgtaatgcaagcacttggagaagattgatttcgctaacttagcatgtggtgactctacatcagcgataatgggccaatttggttaagcacgtgcgcactgggtggtttttgcaataaaactgagtaggtgatgggtattagcaataaaataacttatgggatgaaatgttaaaattcaagtgacttatggggtggtttttgtaattttccctatagtctctttgttttactagcgaaccaaccgttcgttgttacaggaattagaaaaatcgcattggcatattacaaggaagaaatctattttttaattttagaattaaatttgagttttatttatctttttgtgttttagccataaaaatatttctagcggactacgttgacttcctgtcactaaataaatgctcctcccttcaaaacgttgcatcatagataatctatgaattctaccatatatgcgttttgtttgaggaggggcactgatttcacatatgttttggaggttaatggtgggtggtgaaagatgcaccaccgctcccttttataagaatatagatactggtaagtggtaaagaagttgaccattttttttgttagttaatttcaagcattatatgtttcaccctaataaaaagaggtacgtagtaaatatgtgagttgttttgtgttgacacttgatacaatatttcaaccaaaaagaaaggtgattgacaaataagttacccactcagtgaatagatgcatggtccaacaaatgtctagtttatatgagaggaacgtattttcaacgaagaaatccgggtctatcatattcctgatgaaaaatatgtaatactctgtccgtccctaaatataagggattttgaacggatgcgatatttcctagttatatgaatttagacaaggaatatattcaaattcgtattactaagaaatgtctcatctgcctaaaatctcttatattttgcgatggagggagtagttcactactgcacaaataaacaattataacctccctaaaaaaaaccctctcgtgctttggttgggccaagtgtactttttttttcatttatgctgcattattgttcagacacaactgaatgtactagaaaaatataaagagtaaaatccatcaccggtccctaaacttgtaccgttgtgtcatcccggttcctaaactcgcaaatcgaccgttcaggttctcaaacttgtttgactgtgttatcccggtccctaaacttgcatatcactcatttagatcctccaacttattcagttgtgtcaccccggtccctaaacttggatttgaatatcatctgggtcaaataggacggtttaaagactttatatttaaaaataattcataactttttcatgtgaactataatgaagacaaactttatatgaaacttgtagccctcgacgcgatctacaattttgttgttgaatttttttattttaagtcattttttcccaaaatgtaattttaaaattaaaatttcaaaatctataaacatgcaacaatattttgggaccctaaaaagtttaattcaaaaacttttcaactacaaagttctaggtcgcgtcgagggctacaattttgatataaaatttgtcttcattagagtgcacatgaaaaagttatgaattattttttaatataaagtttttagaccgtcctatttagggtccgggatgacacaactgaacaagttagaggacctaaacgagtgatctgcaagtttagggaccgggatgacacatgtcgaacaagtttgagaacctgaatagtcgatttgcgagtttagggaccgggatgacacagtggtacaagtttagagaccggtgatgaactttactctaagtaaaatatagacataaagtgatagaaaaaattctgaatttcattttctgaaataattccgattgatccaagctgaacatctccctggaaattcagatcacagacatgacgccacgtcatcaaccactaggatgacgatcgtccaccggcacggcccgtgctcgccgctagccgccgcgcacggcgagccgccgtcccacggcgagatcctcgccgccgaccagagccgcgccgagtcgatccaacaccgggtgtccaccaccaccaccggccgggtgaatccaaagcgcagacgccaccggcagcagcagccgccgtcggcgccggcgccggcggcgtcgctgtcgtcgtccaccgcgtcgctcccggcgtcgccggggcgcgcgctgggcacaggcaactacgtggtgaccgtgggcctcggcacgccggcgtcgcggtacacggtggtgttcgacaccggcagcgacacgacgtgggtgcagtgccagccgtgcgtggtggcgtgctacgagcagcgggagaagctgttcgacccggcgagctcgtccacctacgccaacgtctcctgcgccgcgccggcctgctccgacctcgacgtcagcggctgctccggcggccactgcctctacggcgtccagtacggcgacggctcgtactccattggcttcttcgccatggacaccctcaccctctcctcctacgacgccgtcaaggggttccggttcggctgcggcgagaggaacgacggcttgttcggcgaggcggcggggctcctcggcctcggccgcggcaagacgtcgctgccggtgcagacgtacggcaagtacggcggcgtgttcgcgcactgcctcccggcgaggtcgaccggcacggggtacctcgacttcggcgcgggctcgccgccggcgacgacgacgacgccgatgctgacgggcaacgggccgacgttctactacgtcggcatgacgggcatccgcgtcggcgggcggctgctgcccatcgcgccgtcggtgttcgccgccgccggcacgatcgtcgactccggcacggtgatcacgcgcctcccgccggcggcgtactcgtcgctccgctccgcgttcgccgccgccatggcggcgcgcgggtacaggaaggcggcggcggtgtcgctgctggacacgtgctacgacttcaccgggatgagccaggtggcgatcccgacggtgtcgctgctgttccagggcggcgcggcgctggacgtcgacgcgtcggggatcatgtacacggtgagcgcgtcgcaggtgtgcctcgcgttcgccggcaacgaggacggcggcgacgtcggcatcgtcgggaacacgcagctcaagacgttcggcgtcgcctacgacatcgggaagaaggtggtcggcttctcccccggagcttgctgatgaaatgtgccacgcgtcacccccagcaaacgtacacgtcagcacgcagaatgaattaactgtctgcactctgcagtgtaatgctgcaatccaccaggtggtcagcgactggttttattaccatgatttctgaagatatataatcatatgattacaaatatgctaatattattttctcttcttacatttatgatttgcttgaaagaagggaaaagcgaagattgatagaaaaaaaatatgtaaaacaaaatgagctattggcgcatgattaattgagtattaattattttaaatttaaaaaatagattaatatgatttttaaagtagcttttgtatatatatatttttaataaaaacgcaccgtttaggacgggggagtttttctccgaatccactgctgtagaacacaaacttgtggtccgatgatttctggcaagcccaaaaaaatcattagacgttttatgtaaccatctatactatgaataaatttgatcgggttaattggatcatgccattaaaatatactggttttgaaatatgatattagtattcgcatatctgaaaccataccattataattttccacatatttgagatataccactacttacccattggatgcatttttttttaaaaaaataaggaccaaactatccctttttccccttagtccttctcccttcttccatggcgtgacctgaccaccggcctcctcctgcacgtcatctccctccacctcggcccgccgctggcctcctcttgcatgccagcgtgtcccagatccagctgcctttcctcgctccgagctcccgcggtggacatcgccggcgacaggatttaggaatcaatggcggtggtggtcgctgagatcaatggcagtggtggcgccgccgttgcgtgagcagcacgacgacaacacaacgatctccctaacgttgaccgctgcccggagcctactctgtaggtcgccgtgcttggcaacgttggcgagcagcgccaccgacgcggtcgaggagccgatggcctcctcgtcgagcggcatgacaagcacccgtgccgccaggacgtcgtcgagcaagaccgacgacgctgacgaatcagcctgccacagcgaactacacgatcgccgtggcgagtgcgcgcgccacgccggccgacgcgaggcaccgccgatcctggttggactcccgcgcgaggcgcccgacctcgcacaccaccgcaccgcgcctcgccgcgtcacttgcccatgcagcggaccttggccaacacacgtcggtggcactgctgtagggaagagagaggtagaagatgagggtattttcgtctgatacatgcaaaatacgtatcttagtggcaccattgagattacatacaagtagcagtatcatcgttataaatacgtaaatagtattggtacatttcaaaaccggcaaatttttaatggcacgtatctaattaacccaatttgatatggtacaaaacattgattcttggttactggtacatattcatgttcttttattatttttcaacctatcaatatttgaacaatagagattcaatatgactataaaattatcattttttgtggtttcaacctaatgttcgacctgaattgattttatcagtaagaaactctccatctatcttaaaaaagaatccattcctaaatatgaatctaggtgccagtctatatttatttttttggattggacttttctaaagcaggagtaattcagttcatataaacaccgggtgcggtgatgagcgacgagcgacgagcgtggcggccagtgtgagaagggggcacggcggcggcgggaagaggcgatggcggcaagtccaaaggccggaggcggtgacgacagcgggaagaggcgatagcggcgagcccgcaggccagaggcgaggaggcggcagcgggagagggcgccggatctggatgggacggatccggtgaggcggtagggggttccgtcgtcatcgtcgtcgaccggcgagtgaaacaggagatagggtggtggccggcaaatgaggaggtgaggcggtggcccggagacttggcgatggccggcgaacaaggaggcgaggcggtggcctgaagacgaggcaacggtcggcgagcgaggaggccagcccggaggcggcggccggcgagaagagcgcgaatgacctttttttttatttttttcatttttctcctttcccccttctatttctttgtgatttcttatatttcctttaagattcttttgtttgtagtaattgatattttggtggttttgatgaatttgaagggggtatactcgtcgccttaaatgtaggggtgattgtatccactcatttatcctactcttcctaaccaaaaaaaatggatcactaaatccaccttcatccctacaaccaaataaaaataattggatcgccatattcactccaccaaacaaaaaactggatcgccatattcagtaaaatatggaccgccgtatcccatccaactttgactgtgaaccaaacgcaccctaaaacaaccaatctggatggtcctatgacatttaggttggatcttttttattgagggagtggttgggactagagctgtcaaaaaagcttgaggctcgactcatcctaggctcgattcaaactcggctcgacctccaaacgagccgagcccgagcctagctcgagcttccaacgagcctagtaatatattatttttattgttattcaataatttaggatatcaaatatattatttacatgcattgtattaacatcatatatttattttattctttttcctcttctattaatatgatgaactaggaacaatctcggtagtcaagcttgagcttcatctagctcaaaccaaatctatctgaaagctcgaacattttatgggctcgagtttcgagctcgctcattgacagccctagttagagcaagtttaataatataaccaactattgtttctaaatcatccatagtcaatttagtagccaattcatacacatatgtatcttggagtctgtgctccagctacagcaaatctgtagccaactactcttctgtctcctcttttatcttcttgctggtttatagtccgatattgtagtcatcttaggacgggaggtttttgtaaatcctatcttacaataaatttatcccccactaactccttaaacttaacatgcaaagatgccacatcatcattgacggagcgtggggctcctcaccgggagaccgagcaggcccccctttgccggttcggccgggggcgctaagtgaggttcttcgccctcgatcgatctggagaatgttcgcgagagagcaagtgcacgagacacgggcgatgtagacaggttcgggccgctgagaagcgtaataccctactcctgtgttctggtggatctgtgtgtgaaggatttacagagagccggagagccagagagttcaggctccagaaccccactcgccccctctctcctttttttttttggtgggcaaggtcctccttttatatctcaaggggatactacatgcaccacttctacctacttttcttctgggtggggacctactctatcttgaccaaaacttggcttgcaccttcgcctggaagctaaatcacaacttgtccttgagtgaggctcagcgccgtctctcgcctgacaccggggatctccctgttactccctcattaatgggcgaagatttgccatggctgctttccaaatgaccatccgacgagatgggtcatacctacctccactccaccggaggcagatgcatcgtgggagcacggttgtctgccgatgacgcgaccggcgtcagaccagtcacagaccggtcattcttgtccacaacgtgtcagttcagcatgctacacgtctgcccttcttcatacaatgacttccttgcaatggttgcgatgaagcctggaatgtatctggccggggctgacgtgccaactccaggagttcccacgccggctccggctagggacgagtgcctggaggccctcatcattcagacgggacggggcgaggcgtgtgtcaggccgcctgttgccacctaacccgcgatctgaccggtctgtgaccggtcacacactgtgacctgtcacggaccgaacgagtgtgctgcactgcattaaatgcggcgtggggcgctcgtccaacccgcaataaacgcggttaggtgagcgccgctgtgctcacctaacccacacacgtggcgccaaacccacagggggccggggcgccccagccctcggggccgaaacgggagcggcccgacccctcggggagacagagggaggggcggccacatcaccctcgggcccgacccccccgagggggtcaggccacgtgggtgactgcagctgccccaaacctctagtcaagataccctcggtcccatgtcaccgacaatcatccactaacaagatgccacatcatcatccactaattaataagatgccacatcatcatccactaattaacaagatgccacatcatcatccactaacaataatcacatttaaacatcatgcaaacatgctatatctttatagtttttataatttaagagcttttcaaatacaatcatgttaaattattatccaacataattcacataatgttttaatgtatatctttattatattttatgatatcctatctacttatatagcttatcctcacttagttagtgcttaaatgattaatctatggtccaaattatatttctcattttttcctctaattaagtcatatcacatcaattgtttttagcctttagatgattaatctacggtccaaactatctccctacttttcttcttccgtaaattcataccaccttacattttacgtttgaatcaccattctacatactatttaaatttaaattatcataaatcatattaatttacttaatctgatattatctagctattttacatgttattttttcattgttatcgtactaaatttccgaaacagggtttaacttagttccaagaaaaatggaagcctagcaagcggccactgtttcctcagttgtcaccagacgtctgactcttatgagttctgacacagcgagaccgggacgcatagccctctctcactgaaagtgggcccggataggggacagctctccagaacccaagtgcactgcaacccctgcaaagaccctagtactagtactactctactaccgagtaccgacaaacatacgctccgtaggaatgccaccggaagtactcctacgccctaactttacgtataccgtatcttgtcagagaaaaaaacggacggcccagatgcactgcacgcgccacaccggtcccaaaccttcccaacgcgcgcggcgcatcggacggccaggattcgccgcggatggaccaccgtccgatcttactccccaccctgtcgctgtgtgcctctctctctctctctcccgtgtctctcgccgcggcgtcctccggccaccaccccgcgccgcgccgccgtctacggatccccgctcctcgctcgagcgagcacgaaagccctagcgcgccgccccctgcaccgggtgggttccccaggtgagcactccattcgcgccgcggcgccctctctctctctcgttttgttcccacggatttctgcgggggatctcgttcttgggtggaaatgggaggagggggttggggttctagttcgtttcgaggtggttgttgacttgttgtggcggattgggtgggttttgggagggttttgtgtaggattggggggggggtgaggtgaggttaggttggtggcgattcttgatttgttcttgcgcggcggcgatcgggctgggttgcgtctgtcctctcctaggttttttttttctctttttcgctcgtgtagttggattctttggtgggttcttagcggaagtttactgttttttgacggagcggtccgcaggaatgggggccaatgttttgattttggggtatctctgcacgccctaaaaacaaaagagatttgaagggagagacttccctccaaacatttttttaagaagaaattgtgagcgttgttggggattgaacacatctttgtagcgagatgtcggcttttatgttgaaagtctgaatggtacatttttttgtatgagcatacatggtttattgtggggaagtataagtgtgtttctagtatatgtttcttttttatttcaccattctgatttaggtggtatggtggatggatttttttgctacccttatagggtcttaaatgactattccgtagaagaaagttaagttttttttttccatatacttttgtttgtctctttatttaggttttttttttggggggtgggggggggctctactagggagtttagttcatataactgttggtgcactagttcctcatttatgaaggaactgctgaatttcatcctttcaggtgtgggcacctatatgtgcgttatattttactttatcgcaatttatttatcaaccagcattgactttgattcagagatcatgtcggctttgcaggtttacttgtttttatttttaaaaataatccaagggttttcagaatataaataattgaatacggtcaaatgtgcagctaactaattatcatgaaatgccatcaatatgtttaaagacttacatagttacgtttagcaggttgttgagctagaatgggagtggcagggcacaatgatcctttgataggtgaaacgacatgtggatctttgctgcagcaacttcaggtgcctttgtctcttccaatgttcttttgtatgtgtgctttataatgactggaactaaggatagcagcaagccattttagttccctatctacaccatagcatctgtgcaacgaaaagttatatgagtagtgcataggattggacaagtgactgactagtgtcatttcagttgatatgggatgaggttggtgaaagcgatgaagaccgtgacaagatgttacttcagctagaacaagaatgcttggatgtttacaggagaaaggttgatcaggcatctaattccagggcacgcctccttcaacagcttgctaacgccaagtctgagctttctagactcctttgtgcactaggcgagctgtctatttctggcattgtaagtatcttgataaatattttcatgaatataattccttattttccccaaaagtacacacacacctacaatatgctgcatctggctcattactgctgacttttgcagcctgacaagacaaccggtactatcaaggagcaactagaagcaatatcacctttcttggagaaactctgcagggaaaaagataagagggttagagagtttgctggtgtacaacttcaaattcaaactatacgtggtgaaatcgctgggagtctgcaagttggtgaccacatggaaacaccccgtgttaatgaggatgatctttcaacgaagaaattaaatgaatttctttctgaattgcaagctctacaaaaggaaaaggttggcactttgtttttcattttcacaatctgccaactgcctttttctggacctgcttatggaataatcttccaaatttcatagcccaaccatgctaaagagattctttgttttgcataataaataataatttcacataatatctgctggtcaaattctcttgataagcattgtataacatcaaacatccctatgatggatgatctctaaattttgacgtaccatattagtaccacagaagcaggcatacggccactgatatagctgatgataatctttgcattatacacacattttcgactatttaaaatttattgacttgaaatcgtatttctttccattttcttgcattgcagagcaatagactgcacaagattcttgacttcgtgagttcagtgcatgatctctgttctgtccttgggatggatttcctgagcactgttactgaagttcatcctagtctcaatgactcggttggtgccgagttcaagagcattagtgacgcaacattatccaagctgtctaagatggtaattcaacttaaagaagagaaatcaaagagacttgaaagggtaattctacaacgagcctcttgttcttactcatccaaccctttttgtatctctgtaacatagtacatcctggatattatttatgattaaatgctatgtttctcagattcaagctctagcttcccagctaactgatctttggaacctaatggacacctctgctgatgagcgacaactttttgaccatgtcacatgcaacatttcctcaacattggatgaagtaacagcaccaggagctcttgatattgatttgatcgaacaggttaggagattttcttctcaaagtgctcctaggagaatagcataatattttgtctgacatgttttgcgctccaaaggctgaacttgaagttgaaaggctggatcagctcaaagctagtaggatgaaggatattgcgttcaaaaggcagactgaacttgaagatatatatgcccaggctcacattacgatagataccagtgctgcaagagatagaatactgactgttattgattctagtatcttcgagccttcggaacta

SEQ ID NO: 17972 - DNA, 39599 bp, Oryza sativa
cactgcctgccttagacctatgctacatctggcataatatgacatggaaaattaattctattcctaatctgacttttgggttcatctgtgactgttacgagtgtagtcattgttgatacactgatggcaaagacccgggcatgggaacaagagcatggtatgccgttcagctatgacggtgttcatcttctcgcaatgctggatgagtacaaagtactaaggcagcagaaggaagaagagaagcgacgaatgagggtacccttctgtccaatccccattaatctttcgcatgtctggctctaaaaccatatctcattccatttgctttcttccaaaactcatttcaggaccagaagaagataaacgaccagctagctgcagagcaggagaagctcttcggctcgaaaccgagcccagcccggccccaatcctcaaggaaggcgcctggcccgcgggccaacggtggcgcagtcaatggcacaccgaaccggaggctctcggcccaccagaacggcggcggcaggtcggtgagccgggacgggcggagggacagtggccggccggctgctccggtgaactacgtcgccatctgcaaggaagagtccagcaacaacaacccggcggcgtcctccccctgacgatcatcctcgccatgattgaccgtacatttcttggtgccagtggtagagagatactccatatctgtgcagtagcaggaaaaaaagaaaaactatagcaagatactagtaggacaagtgattcgaatgatagtagcagtattttggctgtatttgaatcgatttgttgctgtccatttgctggtagtggatcgaatggatcgagtgggtgcagccgtgcaggtgcatccgccatggaagctgagctcatgtcgtcgtgtcccgttggagtttctttcgcctgtcactgtcggttgttgggcttgagcttggcgggacggcgaaaaacgcaatccgtcagttacagtggttatcgcttgaatttcgtcgaatcctatcaaagtttaccgagctgttatcggcagttttgcggttactgggctatcagctgttaggctatgaatttaaatttgaaaatttcatgccagtaatccaaaatttcaagttttggatgatgtatatcaattccgtacattatttaagcactaataacaacttggagtagattacaacgcgacatacatgcaacagcagcgaaacattcgtcagtctttcagacttccgcactcaatcaccaatcacttcatcggtttaggaggtggtttctcgttttggatggataatcaactaaaacaaagcaatcaaaagaagaaaaaaaaggggccaaatttcatagcaatttgattacacaacacagcacagcaattcggtggaggctccacgcaaattgaagaagcatatgtacatcatcgatctgctccttccccggtcagcttttgtctcagtaatccgtcggtggttggttgccgtcgtaggcctccgccgcggcttcttccctctcctgctcctgatctcgccggtgcaccttcttgctcaccttgatccagattgcaaaatgttatagcatcggtgagtggaggagagatttttgcaaagattttgattcttggttgtaaaatgtttcatcagtggagggatttgcaaggattgattgattgatttaccttgtgtgatcttgcgtggaggcggtggtcggaggaagccaccttccggcgaggcaggctccggccgccgcccctgaggcggctcttgctgccgggcttgtagcagctgaggctgccgctggagccgtcgaagctgacgacggacacgtcgttggacccgcagctctccttctcctcgccggcgccggcgccgaggtcgtgccgccgccgcaccacgatcacccgccgccctccggccgccgccgccgtcgagccagcgtccgccgcgttcttgctcatgcagtcgtcggccgacgcctccgacgacgcctgccgcgtcgccatccaccgctccagccagctccaccccacgttgtactccgcctggtccgaccgcgccgcccgcttcttcgtcgtcccgccgccgccgccgccgcagctccgcagctgctgcgagaacgcgtaggccagcgcgcgctcccgccgcgtcgtcgcctcgatcctgctctgcatccgcatcctcgacacgttcgagctcaccgtgctgtcgtcccactcctcctgccacgcacgcatcatcatcagttcatcacatccaaaatctcgcgacacaactcgccgatcacatcactgttccatcatcggttgcagagatttgatcgagatcgaagtctacattgcattgcggacatgttcttgcatggtctgtatataccttcactctgaacgcctgtggccgcgaccgctggctgctccggtgctgcgccgacgtcgccgcggcggcggcgctgtcgtcgctgaggcggaggttgctcagcgactcgccgacctggacctccaccgacgccgcgatggacgccgtagtagggctcctcggctcgtcggtggtgcagcagccgttttctgagcatttgagcttctgcaactgcctcctcgcctgcaacaccagtggatctgcatgatcgatcttttttttctaacctccaatttttgaatttggatcaagaacgcaccatgaatcccctgaacacggattggatcatcgtcgccgcttcgacttggctgtcggtggccggctcggccgccgtcggaggcgcgatgtctttgatggggatgctcatgctcccatgttcttcagggtggccgccggcgtcggcgacgccatccacgccattcgccggtcgagcaaccgtcagcgccgccgcctgcggttcctgcggcattgcgcaggtctcgaagctcttgacggagaccgtcccatcatcgtcgtcgtcgttctcgtcctcggcggccgcgctgatctcgtcgccgcagaggtagagccggagagagctccatctcctcttgtgatcagcagagcccctctcctgcaaaccaaaaatcagaacaatcttcttcactcgattaatcaaactccattttctgttcagattgtttatgtcgcaggcaggcaaaagcatctgcaattgtgaagatccatgaaccgaggtgccacgacaaagtacagaatcgaaagtacattggcctcatcgccggttactgattggtgtaccgagagatcttcactttttctcgtactgaacctgaacccgaacccaacaccgactgcacagttgcactgcaccaccacaaacgtatgccctacacaaaaacagtggacgcaacaccaaaagagcacctacattgtggcaaccacggccgccaccgccggccgacgagcaggggctcttggagaagactcgccggacaatgccgccggcgaggcccatccccaccgtcgccggaacagaagaaaagcctctctcaactatctaggactaggaggcttcacatgtcagtgtagtagaacgacggcgatcttggttggcatcgccatgagccggcggtgctgagctagctgagctctcactccacagtgatggctggcgcgcgcaggcgaggctgcaatggctggcttccccttatagtagcaagggagaggccaacgaccgtgcagtggtggtggtggctaaaatccacaagaccaccagaaccagtttggcttgggttaaaataaaaagaaaggcggtgtgcgagatgcgctttggtgcaagtagtaagctttgtgtaaaggcgccggtggcgggaggcatctcattggtggatccatggaggaaatgtggagtacactgcacaactgtggtggcactaatgatttagagcgagagtgaggaagaggacccatgtgttaggttattttttggtctggcagaggaggggactttagagctggaggctggaggagttgggcacttgggcatcttgttttttacactgttggtggaaggagtgtgggggaaaaaaatggtgtgctgctaggctcacagtcacacacagctgggattgtttttgttgcaacaaggtattgtgttgaaggtttcctagtcttattgtagtaatctgtttatatttttggggtaatgtaagtttcacctttttacaagccaagtctaatgcatttttactgtgttactacagtgagaaaagtgaaaaaaaaagagagaaaaaaaggatagcactaagggcaattttgaaggatgagtagaggttatcttttagtgtcctcttgtcaataaaagagagcactaaagacaacgcatacaagaaagccaagcatggctcaattggctagtttgttgtggaggaaaaagttggcatccatggattggatcgaacctatgtgcctcactggaaattttttccctagctccatgatctttgcctttgcccaaggggttaacctcaagtagatgtattcagtgtgaatgtgtgtttccatacattggagccctacacttcgtgtgaagtgagtatggtgttgtgtccttgtgcgcatcgtgttcattcttggctacccttaaaaaaaattttgtgtcatggtcgacacatttcgttcattaccttatctctcatccacctcaaccattctcaagattatgacgatggctgaggtgttctattacgttggtgtggttgtccacaagtagacatcccattagttggttgattgggtgctagggcagccgtactgtacatagtacagattttggttgttagaccagactgcagtgtgtcggcgagagatagcagtggtttactggcttgtgtgagcttagcatttcgagagggaaaaaaatgtcagcaggaaagaatgttggaagggtccggaaataaaggttctagacgtgcacccttttttttttttactgaagggtcacatggcttgcttcatcccagcctaaaatgttggttttgcttgctcttgggtgtaagcatcatattcctcccctcaactttctaattccacgccaatccttatcctcacttgttaatcttccctaactatactttgtcagatgccactttttcatcatttctattcgcaagtaataaatactactctttcgggtgtgttcggcagctattttttggctgcagctgtagctgtggctagggctatttggctgtgcgccgcagccgcatacacgcagtgcagcagcagcagctgttagaaacttgcagccgaacacacccttcatctcagaatatagcttagttctaaaatttttagaacagactaaggattatgatgaaaagactaaaatgctcttcaccaatggtggtcgtttcgagagggtgctggggatgagtggaaaagaagtgtattataggccttgcaccactaaaaacaccccatagtatattctaggataaaatttgaacgttagaaatagttatattttgagattaggaattagttattatcccatataaataacaccccatagtatattctaggacaaaatttgaacgttagaaatagttatattttaggatggaagaattagttattatcccatataaataacaaacatcatataaaaaaaaatcctcactaatttcccctggcccctctctctccacaacaaagtttgtgagcacgtgcttaacagattttagtggctcgctaaagacatttgaccatcacctgagtgtgcatatcttgcgaaaacggtacacataacaaataaacaaagcacgtcaggttcggtacccagctaacgctaggtttccgcatcaaggcccacaaagaaaccgtcctgagaggcgacacaagtactgtgccggtctccatttcccaacggcaatggtgcaagccgtgtcgactggcctttctggcctatcatggtagaaaccccatgccgacacgatttgcacacagtgacacagggaatcaccacgtacggaagctcatgagatcactagctcaagtaggtattatgtgagaataacatgcaaacacttgcacgagccaatgaaccatcaccccaaaagaacaaattattaacaaggcaagcctattgacataaagatgtaactatcaaatcatcctggctgctttagttcagtatcatcatagaacaaaccaagcaagcaaagcctaattaaccgcagtattttattcgtactacagtgaagaatttttttaatctgtgcaaaaagggtcagaggtaaaatactttaggagcattatttttttactctgatgcaatgtctgcccgcacatgttaaacaaagcttcaaggtctcaaattcatagctacatgtacttaaatgcgtgcaaatgcaatgcgactgctgattgctgtggaagtgtcggttcatccaccagcacaacagcatggcctcagatcaagatctgttgaaggtggaaatttcgacctgttctaaatttatgggtttaagtaggggaccgaaaatagaggggcagagctcttaccggtttgactccgcttcatccaattctggcagatggaatttcctcgtggcgcgcctaagatcaatcaatccagcacatatggtaataccggctgatcaaatggagaaaaccaaatgacaaaaacaggttagcgtgtaaaagagcatgggaatgtaggattacaggtaaaagttacaattgtggtagcaggagaaccaagggtaaacctaggagaagtctaacagatggaagcatgcactcctgcaccaagatggcaagatctaagatgaaggtatgaagcatcattgacataggtaggccagacgtgtgtctccactgtttcttcaagtaccaacatgccaatcaacagataaaaggaaatggcaatcggagatcttggggaaaatccattaaggccaactgcatctgaatatgattacatgaatacttccaaggctagatcttgcaagacagtatcattgtcattgttagtacgtactaccaacagatcctcttgttattgtgctacatcatttggtcacaggattcacagccacgcaacgagagagtgtcatatcaaattatcaacatcatccactactccttagtcaaatatgttgagtataagctccttatcagcaattcggtagtggattgtgatcaggtcaagctcacaacagatttcccttaaaaggttattttgttgaccatgagccaaatatcaactccttgatggtttcatggatcctgacaagaaacaagtaattcagataggtacccctgaacttacaaatatcatcattagcaattaagtgtggaaatcatgagatgagcacgtgctaaaccaagaaatgagtgtatagtatggacatctacatcatgtcatatcagtgtctaaggagaaaaaaaaacagatgtcctatttgtgtcataaagcaagtgaatggagaaaaactgtgatccttaatattcggcacaaaagggaattatgtactaattgttgcaacaaccaataatgtttggttccatgagaataaaagaaacgattgaaagaactggccaatatatccctgttatcaagacaaacatatgccatggaacatagtagtatataaagctatcctaaaaatacaccaaaaggtctttgcaacggggtaactaaaactagttaacttagcctcacatttttaaatagctttggatcctaagacatcaaatttcttcgcaactgttatgctaaatacctgtaattcaggctagtatttcagattgataaggccagaaaaaagggaaacataaaaaacagatcatcaagccaagtacagcaatacttacccgtggaagaagccaatagttgtggacagcttgtctgacagttccatctccatggtagttgaggtcatcctgtcctagcctaccacatctacaaagtctatggtgttggaccagcattaaccaacgctgtaaactggattatactgttttttctgaggtgattattcctgtttcctaccaattgatgggatgaattttgcactgtgcaagctggtgtcagttttcagtggcagatcatgcaggaccttttcttagagtaatacatgatagtattcatccaggctcccagcagttcagatttcagaaatggcacatgaatattaactcagagctcagaatcactaagaaaagcaaaaccatgaaaactatacaggctgtcttattctctatccatctcattggaaactaagcagaaccgtgaaaattatatggactgtcctaagaaatatccatctcaatagaagttacaagttccgaaacttcctcattactattgcatacatgcagtttgcttctgttagcatcaacccaactcattccaggttcctttttcacctttctcgattccatcagccttctaatctctaaagcatcttcccatcgtcctactgttctgtacacattttcaagaagaatgtagctcaaatgatactgcggttccaattccatcattttctttgaaaccctttctgctacatctgggttagaatgtgttgcagaagcaccaaggatatcggcccacaaagaagaatcattcctaaaaggtgacttgtttatcaaatcttcagcctcttcaagaagctctactctgctgaaaaggtcaaccatacaattgtagtgttcaattccaggggcaatgccatagtccttgcacatagagttaaagtagtttcttccttgctcaaccattccagtatgactacaggcaaaaagaacaccaataaaactgatatagtcaggcctgggcccttccctgaccatccgattgaacaaattgatagctcgttcaccatggccattctgcgcgaaaccacctatcatggcattccaagtaattgtgttacggacagtgcttgcttcaaaaacactatatgcatagtccactgcgccacattttgcatataggtccacaagtgcagattcaacaaccacatctctccaccctgccatcctcagaaaccgacaatggatctctttacctggctttactgaagataggccagcacatgcccgcagaacagtccccaagctataccagtcaccgtcctccttatccatctccctgaacaatgcaatgaccttctcgtactccccattctggcaataccctccgagcagcgcgcaccgtgaaacttcattcctaacttgcatcctgtcaaacaccttgcgagcctccaccatcaacccacacttggcgtacatgtccagcgtactgctttccacgatcacattcccacacagaccacgggtcaccacctgagcatgtgcctgcctcccctgactccccctcttcgagttccccagtgctgtcatcatcgaaccaaaagtgcagccatctggcctaaccccattcatcattagcatagatcggaaccacctcacggcctcctcaaaccaatcattccgcacaaatgcggatatcaacgacgtgtagcatatcccgtccggtgcacgcatttcctcgaacaccttccgcgcgtcaccgggcgcggccacatgaccgtacatgtcgaccagagagcttagcacgacgccatcgtcgccgaatccccgaacgaggacgctcccgtggaggcacgcgccggcattgcggtcccggagcacggcgcaggccttgacggcggcggagagcgcgtgggcgttgggcgagacgtcgtcgtcggcgccggcgagcatgtccctgagggaggcgagcgcgcggcggggcatccccgcgcggaggaacgcggcgaggatcgacgagtgcgcgacgacgtcgcggcggggcaggtcgtcgaacgccctgagcgcgtgcgggaggtggcgcgggaggcggacgtagaaggcgaggagggcgttggcgaggtaccggtccgcgaggaggcccgcccgggccgcgcggccgtggaggcagcagccgaggcgcggtggcgggtggcggaggagcacggcggcgagggagaccggggacggggaggaggaggaggagggccccgctcctgccgccgccaggcgcgccgcggccgcgaggtccccggagtcaaggaggcggaggacggcgaggtgcgccggcgcggacgggggcatcgtggcccgaggatgccgcggcgcgggcgcgagagtggcgcgccgcgcgcgccgtcgccccttctccgagtccgagcttggcgtcgcgtcgaatgcccgtgtgcgcaaagggtttcctttccgtgaggagacctttttgtggcggcccatgggccatgtttgcacttagcccacgtcttccctcttttttgtaaggcccaagcccgttggattttcggcccacatcacccgttaaacaatggtaatttttagcaaaaggcgaagttattgtaagccactttagcatgaagaattcaatttctaagattatcaaatgaagcatcccatgataatcatcacatagtatataagtaagattgtaacattaggtaaaacatcataatggtgtttgaaatagcttcgtagatagtactgcaagaacgctaatgatcccttttactagtaaacacgagtacacaacatagttgacactaagacgcgtatatatcaacgttactatagttaacttcatcgaattacttaaacttaatgactttagcagattaactgccttattaattaacttagctactactataacgataatatgcatattgtgcgtgcaaagcatttcgacaagtactaagataacaaaggacacgtacgtacgcgcgtgcacaccatacgataaaaaacccaagcgatctactcctcatgaaccttgctcttctcacacgcatcctcctccttgtcctccggcgcttcctcctcctcgccggccgccgccgccgccgcctccgccgtctcctgatgctcagcagccaccggcgcagcgacgacgacatcctcgtgagcctgatcatcgtcgtcgtcgtcgttgacggggacgatcgccgccttggacgccgctttctcggtcgtcttctttgcctgcacacggcgtcgtcctcctcctccttcttcctcgggctccgcctccttcgcgtcagcagcagcaggaggggtctcgacggcgagcttggcttctacctcatgcgcgatatcatggccgccgccgtcgccgtcgccgtcgccgtctgcggtgtcgtcaacgacgacggtgatggcggcggcttcctgctccttggtgatcacgacgatctcctgttccttggagttggggccgccattgttgtgcagctcgtcctctgcaactgcaagaggtgctccttcttcttcctctcctgctaccttggtgttgggcgtgtcgtggacgtcgcggccgttgttgtcgtcgtgcacggcggctgctggaaccacttgctgaacctacacatcgacaggaaattaggagatggaatttcacgtgattttgctagggacatttcaatcagtggcggacacacccgttgggcagggtgagtcggccggcccaactatggtccgtgtcgccccacacccctaaacctcattttagtcctatttctaacatattagtcatcagtatactgttgaattaataatcagataaatcaagtattttaagtagggacaaaaacttttatgaaaattcgtgtataagtaataccattgtgaccgtttatgattttggccatacataaaatttaattttctttctatttctttagcatataatacagtcaacagtaaatagttaaattggtaaatatataaaaaaatccattttactcacttgaactattttggcgaagcacttaaacccctaaataatttttcatcttgtttcatacccccaaactattgaaattggttccctttgttgtctaaccacatttctcattttttttcatctctctacatacaagtcatatacgtttgttcgactacccatattcgttgttaactttctcgatgttcgtgccatacgctattgcgccaatgtcgtgaaccattgactatggtttgtgtgcgttgtgctatcacttaattagggctagctctgttgccccatctatattttaaagctgcttctgccacttatttcaattccggcattaacagaggccggtgttgacgtgttgttctcttacagagttctggccggataactgttctaatttcttctcactagttaactgagtaatataccccttttccttttttcccgaaaagattttttttcatgttccaaataatgacctaatttaaagacaaaacaggtatgatacatctagcttttttgactgacatatatatgttcgtgattggcacgcatgtaatatcatgtatgctgattgctgacagtaaaaaggaaaatttagggaagagatattcaaacctcagcggttgccattgtgcagctgcaaaatttagtgctaatgtgtgtgaggaacaagagcagtaggtcgaagtaggctagctggctaagattgctctgatacgcaaagtgcatttgccacggttcccttttatagctggtgagagggcgatgaggaagtactaaattaggctcccaaatgatggatcaatcaataatcgatcaaagagctgatctagttagctagagagatcagctcatgacttgttggatcgatcgagtttgggaggaggagatcagaggagttgggatgatgaacgcctgctgcctctgtctcactgatggcactgaggtcaagtcccgaatgccgggaggtgtgtcctgccaggaggcgacatggggatccaactcgggatcagattcagatcatatattcagatcggagccgccattcagacgccacgtactacatacctgcctactcacccatctcggcgaggccacagctgcatgccggcgtcgatccgatgcgcatgatgcaccggcgcgccattttgaggccggcctcgtgctacgcggtgtcgggaatgtacgaggcagctagcgcctttcgttggctctcccaacccaatgcacatgccaggacgtcgtcgtcgtcgatcgcctacctctccgcccgcacaccgccgccgctttgggcaattggcagccgcgcgaggatactgccgtgcagggctaaatatttcgattttggcatttgtatcgggtgtgccgatatactgaaattttaaaaatttcggtccgaaattatttgaatgttaaacaaaatctatcaaatttgaataaaagattaccaaattaacaaataaagaattagacatttcagccgaaatgatatcgtattggaggtccgatagaaccaaaatttcggaaatctcgctctggaatttcgaaccatactgccatgtcgccccacgcccttgtacgggccaggaacaggtggacctccaatagaagagaacagaaataaagattttaggtgcattggaaatttcggaaaactttggcccggagtttttgatattttttttcttaacaagctttggcaagcttgaataagttgtgctaagtagaaaaacacaaaacatagcttttcggtcaaaatatttccccattttctttgttaaatttgggtcaccttgaataagtttcgccaagtaggaaaacacacagacacacgaagattttttttttatcgaaatagtttcccaatttacctccaaatattcagtcgcttatggctcagattgtatcaagatttatatatcacatgaatcttacctttctctagcccctctcctccccacaacacatgtgaggcgagccccctctccgcctgtggccccactaacactggtgaggccttcacaaataaatcttttgtcttttcatgatgtctacttgtggtaagaacttcaccaaatccattagatttagatcatgccaagtattcttttgaaaaaaacttcagagctctttcgaattatcgaatgaaccttatggctcagattgtatcaagatttaatatatcacatgaaccttacctttctctagcccctctcttcggtttcttcggtttaccagaatctcggtttctcaaaactggcagccaaattacccttttaaaaaataaaaaccgaggaaaatcgagaatgcttgatgtcaggcgcccagcgcggggggagccggatcgggcgctccccccgtgcccctccctccacgggcctatacagggcccactcacttctctctccccttttttcacaaaaatgtttcatctattgtatttgcaatgtttcactatttataaatctaatgttgcagtgaattaaaatactcttttgcaacaaaaaacctacatattttagaaactctctattacgggaatttggtttattttttgttccaccaaaaatgtttcacccactgtactcacaatgtttcattatgtatagatctaatgttgcagtgaacgaaacattctattgcaacaaaaaacccacatattttggaaaccccctattaagggaatttggtttattttttgtttaaccgaaaaatgtttcacccagtgtactcacaatgtttcactatgtatagatctaatgttgcagtgaattgaaacattctttcgttatttactaaaacattgtttttatataaggtgaaacaacacccgatttaaacgagtgaaacattttcaatctacttagtgaaacaattccaatatacctagtggaacattgtgcaaacaattttaaaataatacaataataagctaaaaaaaattcgtcggaatatatccatgtgtggtcttgttttgaagatttaattgtaacgagtttaatggtacaatcggattatgatttggacaaataatttaagaaaaaaatcagtttaaaataattttgcacgtaaatcgggcgctgacgtcaatttttgaagttttcgatcggatgaccgatccctagtcactcccgaggaaaataaaccaaaaacaattcgatgcggtttattcggttaccggtatacaccgaagttgattttgatccattcatcagttcatatcgcactaggagatttagccaggaagcaacaacagtgacgttgttcgtgaacgtagtccttcccatggcaataccaatacatggcttaattgccatcggacaacaaaaagaaaaagaaatcaacagcaaagactagaaacgccaaatcaaagactactcaaagcatgtgcttgccggtgagattgctcgatcgccaagacttctgtcccaagcagtggtatccatctgattaattagagccgccgcggtgattcactggtggagactggagaccaacggggatgcttcgtatcatacgagtcgtcgtatgcaacgagcgcgttcggcacttcgtcgctgatacgcgatcagccgcgcgcgcgcggaggcgcgcggtcagtcaccccctctagtctctcctaggtacggtatacatcttttgtgtgtgtgtacgaatatattttaatgcataaaaaatatatacacacatacacaaagtttgtatgcgcgtatagaaagttctatacgtacgaatacaaacttggtatatatgcgaatacaaactttgtatttatacatcttaaaaaaaaagagaaaaaaccgaaagaagataaaccgggaaaaaacaaaccgaccagaaaaaaccggagaaaaaaatccaaacagaaaagaaaaaaccggagaaaaaaacaaaacaaacataaacgaaaaaaaagggaaaaaacaaaaaaaaacgaaaaactcgctcgcggcgcgtcgccgccccctctccgcgcgcgacacgtgtccagtcgcgtggggagggaggcgcgcgactgatcgcccaatagcaatctcgccatggccagtgcggcagtgcgtctagcggcgcaagggttaggagcaacaggggtaagagtggagtaacaaaggactggatggataaggtaaagttgggccttatgagtgtatgttgggccatgggttcacaggagaaaacaaatgagtacttgtctgctcggttttggtgtgtacggttttcggccttcggtttttgaccttaaaaaaaagagaaaatcaaaggccgaaaaaaccgataatttggtgtggttcggccttcaattttaggtattttttcccacccctattccccacaacacgtgtgaggcgagctcctcacaaagcactgccacctccgcctccccgatcgagcgctccacctgtggtcccactaacactgctaaggctttcacaaaataaaccttttgtctttttatgatgtctacttgtggcaagaacttcaccaaaaccattagatttagatcatgccaagtattcttttgaaaaaacttcagagctctttcgaattatcgaattcgaaatggatgaacaagaaaaacatataaatagattgccacattttttttagataatgaatagattaccacatgctatggctatgcatgtactacatgattttaaaacaaagaaatacaagaaataatgtttgaatgattcaccggcctgtggaaacagagagaagaaatctagggaattgaacgttggacttatagcaaagaaaagtaaaataagaggcatgagctcacgctagaattattgtagaatgaggatacaggaaagcaattattaggcctgttcctttattcgaaaggatgtcatacggtttttgcagaagattttagtccttcgaaaatcctatgtttttcctctgttctaaagagccctcaaaatgtggcaaattaatgtgaaaaatctttggcagttatgatcaccatcagacagcattgctgtgtttctacctgcctgacaaagtgaccaccatcatggtgtgttaactaactgctagcccctgctagaagttggcagtgtgtgagacaatctagccatgaaagaaggttaaaaacccataaaaacttggggatcatggcaagagcagtagcctaacaaacactagtattcaatcacccagttccaagaatgcgttacagggaaggccatcataatgcatgacaagttcctcaccggccttgcaaatatatattactagctgttagctagattagccctgttaattagatgctcatataaatatggtgaaacctgcatgcagaaacctttgcttctcagttttgacacacaaacagtatgacacctctgttacaaattaccatgtcttctctgatcatcactagctggtggtggctacaggctacttgtactgctcgccaattagtcttcgatgtcagagacttcggcgctgtcgccgacggacagacagataattccaaggtaattaatcgctgcaacttggttactaatttgctcaaattgttcaaatcaaatctgaattgtcaacattttgaaagatttcattaattttgtgttttttttttgtgtaggcgtttgagagggcgtgggcgaaggcgtgcgcggcgccggggagggcggcggtcgtcgtgcccgccgccggcggcggcggcggtggcggcggtggctacctgctccacccggtggtgttccggggaccctgcaaggggttcgtcgaggtgcgggtcgccggcgtcgtccgcgcgccggccggcctcgacgcgttccgggggtatcacgagtggatcaacttcgccggcatcgacggcctgctcgtcaccggcggcggcacgttcgacggccgcggcgcgtcgtcgtggcacctcaatgactgtccctggaaaccggactgcgtgcctcctccctcagtaagttttgaagttacgcggtgccgggtgtcgaaaattcaatctgaacaatgcaataagaacctcgtgtttcaaacaggttttgacggatcatataagtacacaatgaaattatcatgtacgtgtaaatttttttcttttcaaattatattaaaatggattatttgctttatgcttcaaaaaatatatttttttaaaataaaactttcttctattgtattacttacaacacttgttttattatttatgaaaaaaattaatttatctttatggtgtagataatccataacaacgatccgctgaataaatcagacaagacgcgcgcactcactcacacaccacatatatggttttatttatttttctttcgagtattgtgagcgtttggcttaaaatatttttttttatgactcaaatttactatgtgtgtgcttagtccatcaagctggggagcgtgaggaacgcgaccatcacgggtgtgacgtcactggacagcaagttcttccacgtcaccatcgtcgggagccacgacgtggaggtgagccacgtcagcatccgggccccgcgcgacagccccaacacggacggcgtccacatccagggctccacgggcgtccggatcaccgacacggcggtcgccaccggcgacgactgcgtctccgtcggccccggcagcgccgacgtgacggtgtccggcgtgtcgtgcggccccgggcacggcatcagcgtggggagcctcggccggagccccggcgaggccgacgtgcggcggctgcgcgtgtccaactgcaccatcgccggcacggccaacggcgtgcggatcaagacgtggcgcggcggccagcggagctccgccgccgccgcggccgccgccgccgtttccggcctcgtcttcgaggacatcgtcatgaggagagtccgcaaccccatcatcatcgaccaggagtactgcccctatctctcctgccaccatcaatcggtcagagcacacacacaaagatctttttaaatactccctccgtttcatgttataaacgttttgactttggttaaaatcaaactattttaattttgacttagtttgtaggaaaaaaatagtaaaattttcgacccaaaaaaatttagtatggaaatatatttaattattgatttaatgaaactaatttaatattataaatattactatacttatctataaatttagttaaatttgaaacaatttgacttcgactaaagtcaaaataacctgaaatggagggagtaaatcttaagtttttgtctatggctgggctcaccggaggaattcattgacatgcacaggagcggcggccgtcggtggtgaggatcagcgacgtgaagttcaggaacatcaggggggtgtcggcgacgcaggtggcggtgaagctgtcgtgcagcgcggcgagcccgtgccgaggggtggagctcagggacatcgacctcagatacgtcaggcgaggggtggccaccgtgtcgcggtgcgccaacgtcgccggaggcgtcgccggcgggacgcttgtgccgcccccttgcatatgaaaatctgttttctgtttttttttcttttttcactttcttgttttctttctatatagcgtacagtcacagagagttggcgtggacgaaattttggttcttgtaaacgaccgatgacgagattgatccttaattatggggacatcttgttctcccctgtaatggaacatatgaagtactccatccatcttaaaaaacgaaccaaaaacataacatattgggttggttttttaatgacgaagggattttgctattcccctcaccttctgttttttcttgacaaatctgcattgatgttctcaacagtgtcatggaaatatatcatatgtgcacataagctttgggtgtactcactgttcacaccaataaataaatatcacaagaattctataaattcctacataatttttttaacatagtgtacatataattttataaaattatgtacttttaacataacatgcacgtacatataaagttttcacttcagatacattatacatattgtacaaagtaggggaaaaatgattagtacccccatctgtcaaaaaagatctattcctagatccccgaggcaagtttagtattaacgtgaaattaccaaagtaccatccttaactgcattcatccatcaacactgccattctctgcacacacattaaaattgagttgcatttgcccaagaaaagattacatttgccgttagaaagggaacaacctacaagaactacaccaagaacaaagaacagagaagaaccaagaatagaggggaaaaaatggaatcaagttcttgaatcagatctgccacatataggcttgcaaactttcaccttcacctcctgcatcacaacaatatgcccctaccatcgccgccgcatccatccgccaccgcatccatctcccattgttgccgctgcatcgatctgccaccgtcgtcaccgcggcatcgatctgccaccgtcgtcaccacggcattgatctgccaccgccttcaccgccaccatcatcgccgcatccatctcctgtcgtcgccgccatccctgcagagaggagtggaaagaggggcaaatttgaagggagagattgagttgaacaactgaggaggcagagggagagagaagccaaatgagagggaggggaaaagattgccgtgtgaaccggagaaaagaaaagttgaggccctctgactccttctcgagcacccatgcggtattgaatgtgtatcttttttttacaggaattagttttttgggacaaccacaccccaccccaggaatcgatttttttgcggacagagagagtagtatactagtatgggaagtaattgtacaatttttaaaataatttttaatagttgattgtatagcgagatcatccaaaactttatatgtataagttgtgtttttgttgtcggccctagttttctgaaagttgcaaagagttctaataacttattcattgatatttccttaacatcaacttttcatactagaatgctaacgatcttcatcccccaatttgaattccagcacatcttcaaggtccggaggccacaagagatctacaccctacaacacatttattaatagtgcgaaattgaaccgagtctttttttctctaaaactaaaatcaggtataaattgaaatagcatgctataaatacaatctttaaataccaatttgcataaattgatgagccacaccttttgagtggactgaaactaagattaggcaacatggggacgccaacagacgaaattcctctgaagtaaagtaaaaaaaaacgtggatccctgataggtggacctcaccttcatgaacgtcagtggctcatatccctctaacgtatgtaagaggagcctcttccgatatggggaaccatagcaatgctcaaccgccagccaaccaagccatggcctgaaaatagcaaaaggccaacacatgcctgcatgccacagacatagcaaaatcttgttgtcgccaccaccactatatatatgtgcatgccggccggcgttcaagttcgccggagagagaagcaccggcggtcaataattaaaaaaaaagaaaaaaatggctttcagaaaccatgacgctgccatggtcctcttcttcttcctcctcatggtgactacctacgccaacgcgcacggacacagcaagaagcccgaggagatcactcagggcgtttacggggcggcggcggcggtggcggccggccccggcggcacgttcgacatcaccaagctcggcgccgtcggcaacggcagggcggacagcaccggcgcggtgatggcggcgtggaggtcggcgtgcgccggcgccgggaagcagacgatcctgatccccaagggggatttcatgacgggggcgatggagctcaggggcccctgcaatggcgccgtgaccatccagctcgacggcaacctgctgggctccaacgacctcagcaagtacccgggcaagaagatgcccaactgggtcgaggtccgccatgtcgacaacttcgtcatctccggcaagggcaagctcgacggccagggccccggcgtctggagcaagaactcctgcgccaagaactacaactgcaagctcctccccaacgtacgtgttacaccatgcatatggatcaatagatcatgaaacatataataggccttgtcttttctgatcatgatacacatttcggttacctcggtttccattagcacactttttaaattgctaaacggtactccctctgtttcagattatacgtcgttttgactttggacaaagtcaaactgctctaagtttaaccaagtttatagaaaaaaaaagtagtagcattttcaactcaggacaaatatattatgaaaatatattcaattattgatttaatgaaactaatttagtattataaatattgttatatttgtctataaactcaatcaaatttaaagtagtttggctttgaccaaagtcaaaacgacttataatctgaaattgagggagtaatatatttttcgtacgaaaactttcgaatattgacgttgctttaaaataccaggtaaagccattttaaaactcaattaatcatgcgctaatgatttctcattttacgtgcccttgaaccatttttggtgcgtttgatggatgcagacgctggtgctgaacacggtgaacgacggggtggtgagcgggatcacgctgctgaacgccaagttcttccacatgaacatctaccggtgcaaggacataaagatcagcggcgtgaccatcaacgccccgggggacagccccaacaccgacggcatccacatgggcgactcctccaagatcaccatcgccgccaccaccatcggcaccggcgacgactgcatctccatcggccccggcaccgacggcgtcaacatcaccggcgtcacctgcggccccggccacggcatcagcatcggcagcctcggccggtacaaggacgagcgggacgtccgggacgtctccgtcacccgctgcgtcctccgcaagaccaccaatggcctccggatcaagtcgtacgaggactccgtgtcgccggtgaccgtgtccaaggtgtcctacgacggcgtcgtcatggaccacgtcgacaaccccatcatcatcgaccagaagtactgccccaacagcatctgcaccagcaagggcgactccaaggtgtccgtcagggacgtcaccttcaggaacatcaccgggtcgtccaacacgccggcggtcgtccagctgctctgctccggcaagctgccgtgcagcggcgtcgcgatgcaggacgtcagggtgctgtacggcggcagcgacaagaagaccacggccgtctgcgaccacgcgctggggaagtccaccgggtgcctcaaggagctcgcttgcctctaatggattattaattcgatcatcatcgatctctttgtgtgtgttcatcgtgtttaagagacagatcgaggtttggagagcatatggatgtatccgcgtgtgttccttgattttgatcttccaagttaatgtccatatcctttctttctgtaaaattaagacccaaagctgcctcctcgattcgccacgtcatcaacattatatcagccgttagattctctgtaggtctctggattgacggttcggtaatattaggccatcgcattctactcatgcgcctctcataaatccttccttctgttggcccaagcccatagcaatagtctatgatcaaagcgatcatcgctccttctccgtatttattgccgcttcagcttggcctcctttcaccaacggaggaattacgagtaataaaaagaattataagctaccaaaggaggaattacgagcaataaaagagatagtacatgaagggtcatcccaaatgatttatactactccctcttaagtttcatccgcgatttaaccataatcggtcacaacccatggtctttcatctcgtcggacagcgtaatgcaagaagcacaccagccatggatgatgggggtgaaaacggagcggatattatccgatccgatccgctccgaatccgatcggagtaaggatacggtaagagtttttagatatccgtcggatacggatgcggatgtggtatcatcgatatccgacggatgcggattatccgattttttaattggattatccgatagacgattggcggataatctgcatatttcaggccacacaactacacaattgagcctattttacatcggccggcctatctagcccatttctgttaacctaaaccctcaatcttctgatctcttcacctcctatccagctatccctatccctttgattaatcccttcggctctcccactcacgtgcgccggcgccgccacaggcccgtccactgtcgatcgactaccatccaccgtcactattgttttgccatcatgttcagatgttgttttgccatcgtattgctgcttattgtattgttgtcctcttgttgtatggattgaatacaaacttaacatctgataattttgttccgtttccgaaccgaatccaacgttcgaaataatccgcttcgtatccgcatctgcacgtcatccgcacctgctcggcatccactttgaaaaaatggtatatgatatggtatgaccactatccatccgaatccgctccgttttcaccctaatggatgatcttataatttttcaggtttggagttttgtaatcattttcttcagtgcctctaagaaacacaggtctgctccccattcatatgctgcatgatcttcttctttcctgattttttatttcaaatactctttcccgtgtagtatttgttcctattatggtttggtgctgctaaatccatctctcgtaatatgtacgattcggataacttttttgttatttgatttatcatcattatcctgattgttgcatacatatgatatataacatatgtttgatctctcgataaagaaaatgacattttccgaccacgggaggaaggagaggagatattaggaccagaatatccctatctcagtgttattggagcacttatataccttgcaaatagtaccaggccagatattgcaattgcgataaatctattggcaagatatagtgctgctccaactaagcgtcattggaccggaggaaaacaaatcctcaggtacctaaatggcattaaggatcttggcttattctttcagaaaactgttgatcctagcttgtacctatcctagcttggttgggtacactgatgctggctacatgtctgatccccacaacgccagattacaaacaagttttgtattcctccatggaggaacggccatattgtggaagtcatctaaacaaacattagtggctacctccacaaatcattctgaaatcaccgcattgtttgaggcatcacgtgaatgcgtgtggctccgcaggatgataaaccacattgaacaatcttgtggtattggttcctcagaatcacctaccattatctatgaagacaatgctgcttgtatcacatagatgcaaacaggttacatcaagagcaatatcaccaagcatattgcccctaagttgttttatccccatgagcttcagcaaagtggagaaataaacatcttaccgacaaaatcttatgataatctgttagatatcttcactaaatccctacctacttcctcattcgagagatgtgttaagggaattggtatgaaactgctcagagacttgcaagcttcaggatgagactctctgaatgatggaccctgttaaaacgcttcacattgcttgtcccttctgcgatgcggcgcgcgcgggtcccgatctcacggttccccgtgggtgccgtgggtctcggcatgagtggctgcatctacgccagcgtcaacctcgagttccggggcctcccgctgtcccattctatccacgccgagcagttcctcgtcgtcaacgctgccgccgtggggaagtcgaagctttgcgccatcgccatctcccacatgccctgcggccactgccgccagttcctccaggagatccgcggcgctggtgggatccgcatcattgtcacctcctccgacgccaagtggcgcacggtgtcgtccctcctcccgcgtccctttgggccccatgatctcctccccaagcacgtccctctcgtcctcaaaccacacgacagccctctcgtcggcaaccccgctaccgctgtcatcaccaatggcttcgccaacggtgacctagaggcacgcttgagggaggcagcagaggcggccgcgcgggcggcgcacacgccatacagcgagtgcccgtctagattcgccgtggcggatggcgaaggtagggtgtacgccggaggatatgcctggagtccgcggcgtataatccgacactaggccccatgcaggcggccatcatagggatggtggccgctgggggcgccgccgccgccgaagacgtggtggcagcggcgcttgttgagaaggaagcggcgttggtgtcacaggaagcgatggccaggatcttcctggccgcggtggccccacaggccagctttcacgtgtacaattttggactgtccgatgcatgatgcgcatccctgatcctcgtggtgggtggggagggagggtaggaggtgagatttggaacgagataatgtttataaaacaaagatgttaagaataaaacgagaagaaaataacctttgtgtattagttggtggacgctgacatcagacccacttgttcagagtgattaatactcttctgttctcatgtgtatttaagtggaaaaataaaagaggatctaaattgccaatgtacaagtagaactgtactagagtgacgcatgcatttatcttggaagcaatttgtttgtctttcgccgtctcttgctagaagtttacatatttttttctgcatgaattacacaagataggctaataattatcatgagaaaaaatggctggacctatattgggacatgctgtggtcactactgattattcaatcatgcaagctggttcttctttcttacaagcctcaaacacacatcagtgatagctttatgaacttttctagtgtggctgaatttaaagtagtcagttgcccacggaataaagcaatggtggacatttaacctattctggacaagatattgcccctaaaaaatcatttagtcaaaaacaatgaaacctattcttctcttttaattagataatgcaagtgcaattacgaaattatggtcaagactgtctaatataagcattttcttgcgttattttcttggcaggaaatttcttgtgcatgccaaccttgatttatgctggccctcttgcttcttaaatgaagagtaccagggaaaacaacaatctagacatagaaaataaaaaagcacatagaaaagttgaaaaatcaacttttagtattctttaaaagaaaatcaacttttagtagttacatatccttcactccatctgacttcggagtactaagattaaaaaaaaagaaaaagaaaaactactgctgcttgcactccgcaggtcgctcaccctgctgtccagcaactctgctagccttccgttcaaaatagagggataacaatggagataaaagcatctaaagttctaataccccagtagaacaaacgacaattgaatgtcttatgcttcttcatcactatattcatcattattgtcatcctcttcttcatcatccacccaagaagctccataatcctcgtcttgaacagcctctctagtaaaccaagaaacagcgtgtggtataatcttatccctgagagtagatctggcaacatgggcaagctaatttataaccaggtaatatatacatgaagtatgttgttcataaataatttaaagaattgtgtgtttcagtatacatcatgcataataacacaatagtaatcgcttctcctttccaaaaataaaaaaaccaattctaatcggttaagaatgcaatggagcataatagcttacgcgatgtcataatctcgttccatttggttctgcaattcttcagcctgttaagaagcaacaaccaaaaaggccataagttgggcataatgttttaggaatcaatgtatatagaataattacttgttcaacttacggtattttcatctatttttgcatcatcatctggaacttgaggggggctaaagaaattaaagaagctctcacattcttcagtctttgttataggtttagtgctctctgaactctcctttgttagcacctcttgtgtcaaacaatatcctggatgccattcgatttcagtcctaaaaaataaagcagtcagggaataattcaaataggaaatgcaagagagatttttttcatcctaacaaatacacaaatttgcaggaacaaaatgatatatacccaattgctttctctaggatgggttcatcatcttcatcgatcatgtggtatgttttagtcagcacttgatttttaaagaagggatttgtatagaagaagaattcgaacttaaaaccctttggatcatcaattctacaccatttgatgtccttaaggtactttagagcttcctcatcgctctcatggatctgtggcagcggaaaaggaaaaaatattcattacaaaaatcatcagcactaagcaaatcgggacactgaacaaataaattagctcaagttctaatgacagcataaaaacattgataactttggaaagtgggaatttacaaactagaaaagcctctcacctcctcagcaagaatctcattgttcttcattgcattgagccagaaatctggaacacccttttcctctgcatggaagcatcgtgacaagattatagaaaaaactaaaagggtacccaatctatcaataacccaaaacgtgcccagaacacctatagtatgaacaagaatgatatatcacctctttcttcggtctcgccttgtacttcaagaacaccactcacaattttagaacgttggaaatttgcaagcacaaaaaaggtcactagaacagcacatcatattgaaaactcataaacataattcaagatatgtttcttagaggagagttgcctgtacataaaacatgcatctctttttgaaaagaaagataggtgaggtaaggccagattgcattacattgcaacaaaaagtatgtgttacctttgagtacaatggtccataaagcttctgatatttagcttctagagcagctttttcctcgaagaacttcacttctagttcatcatgttggctctgaaacatttaacatgttttagaaacttttaagtatgtggaataaagtttgtagcaaatataacacaatcaataacattaaaaggctaaggtaaaaaaaaatctatttacgaaatcaatggataccgctggcatacgagagcataatttgtaatttcttagagtatctttacttatactaattgggtacattttagaagctcttatgttaaccagaagctcttatgttaaccagaaatatctgaccattgattagacgggtcgtaaaattagaaccgtagatctacaatgatatttagcatggtgggctctaaagatttaattaacgtggtgggctaatcttccttccaaagcccatcaaaactacctccagctgtagtagtctatcacgcaaacggcagatcgaatacaatctagactccaccaacacgatcaagcggagagattaatgcagcatccacgccacaactccattgagatatcccctgctcgctatattttctcggtcaaaagactgattgcttatctcaatgagaaataattagaggaagctgtactaaaccaatatcgccaagcgtgctgtcaggccattggcacgtcgatgcaaccgcgcaaccccgcaagtctggtatagctttccaaatttgttagtgttctaatcatgaacactcgattgattaattatttgttgaacttgcctgctattgcaggagctttttggtgtactgttaaactactgctagcatataatttaataaaaagactaaattgtgactctaagatgaattaaaattccaggagattaaaattatagtgtttataatatcagtcctaacattacaggggctgatgattcgtgggtctcaaggaactcccgccttaattaatcagaatgacatagatcatctcaagtgtttgtgttaataaaacaagccataggtgatagcatggactctttagaaacattttccccaaaatatggcattattcacatattgatttcttaatttatccctttatatacctcagtatgagatatatcatttttataaatggggttaccgaaactaattctaaaggttacaaggttgaaaactcatgtctgtaaatattctttaatttttatttttgtttttaagatataagcacatgtattatccaggaggtatatacctcgtaacaaacaatattggcatgtataccctatatatatacttcccgagattcacgagattcaaaaaagtttcatcattgtcaatcataaatttatttatcttataatcagttcaatcaatttattctttaaggaggtacatacctctccaaggaaatataggagaacctctataagggtctttacttgggtacagttaatacgtgcacaacgctcagtatatcgtagtttaaataatcatacaattttaatatttagagcgtcattaaaaataacccgtgcaacgcacaggttggcgactagtagaagcaactatggataataaagtacggataataaaggataaagcatataatccaaccgttttatactcacgaacataacaatactaaaatatggataaggaaacctctggaaaagagggaattaaaccatgcaaaaacttgtagtcaatctcacgtttcattgacgatattgtcactatgtgcgccacaatgggtttgcataataaacagtacgatgaacgaaaatatgccgcgaattgaagctctctctagttttagcagttttgtctttacctgaatctccatgagcacatcgacgcgcttcctgaccgagggtgccaggctctcgagcacgtcaacatgttgctccgccaacgcctgcagcttgttctgcacaagcacatcactgaatcaacaaaacatcattgcacgatcgctccaattgaagcaatcatcacagcgagagaggaagaggttataccttgagcgtctccacgaggatagccttgtcctccgatgagagctctgcataagaaacccgccgccgcaaacagtaagccataaacccaatcacagaatcacccaaaaaaaacagcaagagcgcgacaaaaaagcgaagtaggggagaggcgaatgctcaccgatcccgttcatggtgctgcggtgggagatggtggcgatgatactctccggcgtgatgaggcggcaagttttcgagcaaggagaacttgggcttcggattaggcgagcaagacggggaggacggaagccgcggaaggtgatggtaatgtaggatcgaacaagaacaaacgaacctacaaaagtcgatatgcttctcacctcaacatatcatctatttatacccaaaaatctcctattcaagctaggagtagagctcctattttcaataggattcgcccctcgatttccaaaaccaaaattgggcccgtatctgttagcagcgttaattgaacccgttacatttgtttgttttgggtggcctggaatcgaatactccagatccgggcccagtacaaatccgttaccgctccaaatcgaatacggagcggaagtagcgcttgtgttgtcgtggctcgtgagtcttgtcgtgacctagcctaagcgccgccgccgccgcttcgccttctcctcacccaggcgggtcgccggcgccgctcgccctatcctgcgcgccccaccaccgctgttccccagcctcaccggtgttgctccctctccacgcgctggccaccaccgccgctccccgagccccgtgtcgacaccggagcttggccacctctccaggagtttcgtccatggattcgaccctacccagcggcttgacttcgccatcttcaacctcttcgttcatcgacatctcttcaaggaggtcccgctcccctagccgaagatcctgaggttctctcaccattttctcgtttccacggtcaagcactactccttgttggtgagaacccccgctgaaaccatctttttttttccaactctgcaacctctctgaaattttctaataacatcttgggccaatccattcttttaatcagtagtgctcaagatttgtgatgatatgctttaatttgatgcaattttcttgtgattgatcttgaagtaagaattaaggaaaaaggaaaaagaaaaaaaactacggccgcaaataaaaaataaatctgtccgatttcacaaaaataagaaacaaactcccgtccgtttccgtttgggccgaataagagttggtttgaattataccaagtcctattcggttagcatcatcaggagaacaaatgcatatatatatatatatatatatatatatatatatatatatatacatctctactacttaaaaaattaaaaaaaaaattccgtcggccgtaaaaagaaagtctgactcaaaataaaaagcaagaaaaaaaactacggtcacaaataaaaaaagaaaaaaaagtacagtccgttcaaagaaagggtctgtttagtttgatgctaaaaaaaaccttactaaattttagcattgtcgaaattttggcaactatgctaaaattttggcaggatttgttatatacttaccaaaatttggcagcagccactttttcggcaactttaccaaaatttagtaaggttgaaaatggcatcaaagtgaacaggcaaaaaaaacgtctgactcctttaaaataggaaaaacaaagtccggccgttaaaaaaagtccggctgctgttaaaaaaaaacttctcacgtcgactccctaaagaaaggaaaatattcgtccgtaaaaaaaaattgactcccataaaataagagataaaatttcgtccgtaaaaattttttttgactcccgtaagataagagatagagaacttctcacgtctgactttaaaaaaaagaaaacattgcttcatctgtaaaaaacaaaaaaagcccaactcccataaaaaataataaatgagaaaaaaaatccggttcgagaaaccatccaaactcaacacgagaaaataatataccacccgacacaacacgagaaaaaataaccgtcgtttgtaaaaaatggtttgaaaaaggtccgacttaatgcgagataaaaaaccactccaaaataaaccgttgaaaaatgttgtttgtaaaaaaggtgaatcggaaaaaactgactgaatccatgcgagaaaaaccggatcgaaaaaattgtccgactctacccaaaaaaaaaacaccgttattataaaaagtattgctccgaaaaaattgtccaacccaacgcaagaaaatacgtgcatttataaaaaaattcggttcggcaccgtgcaatgcgaaaaaaatttgtccaatttcagaaaaaaaatcctattccatgagaaagattcatatcatttgtatcatctaccacgttggtttggtttttccaaagcatttgttgaatatttttatgtgcggatgcatgggcttgggcttggttttatcggaacaagatcaaattgatctgaggcttgggtaggataggatcttttttttccatctcctatgtacatggcttgttgctcctgtactggtgaccccgcacgactctgtatgcaattatcagactactttgataagtatagctaatagtcttgatagcgtatcatataaaaataataataataaataatttttaattgttgttaagagaagagtgcacgatgactatattttgtctagacttgaccatgcgagacagtgtaggatttgattgatcctattattagttgcaagaatgagattaaaagagtatttcagattatatgtgtacaaccacataaataatacaactctttttggtaaagcatgcattggtaggttgccatcgttgaggttaaaccattatattgaagatgttccaattttccttagggtatgtcttagttacaacgatcgataccaacattatcatcgagatgattatacatgaaaagcgtatattgtaattgaaaatttttcacccattgcaatacacggacatttttactagtacatgcatatatatgcttcctggaccatgtcgacaagcacctgcagtacacatgtacaacacatacgtgcatactacatactacacactacagtacctcgagtactgtagcaaccatatgcttcgctccaattcttcttccaattttcttcgcaaacactaacgcttgcacacatacctcgtgaagtccgttgcaaagatctctcccacaccgttacacagtgtccattcaccgtgtgccatcttgtatccaacttcgtcacccggtattcttgactgtctggacctcaactcatccctgagtctagtcccgatccccatcgttggccgaagttgaccttcaagaatctagactctagttaccttctcacatgatatctcgaccgcactaaacctctgctcctccctaagcatagttctggtgctcaccattgaccaaaactgacctcaagtcacctgcacacaatcagacaaaacaaccgttctaagcacagatatcacaacatatgaacccaattagtcacacaaactcacaccaacatccacacatcttttcaaaccaattcattaattaaatcatttgcaaatcaaatttgtccatcacaaatattaattatgacgaaaaagggtgggggaagcgatagagcggacggcccaggtttcacgggagggagacgtggccgaacaggatgcgggttcgcgctcgtgtggagtttggacttgccccgctggtcgccgcgagtccgattcagacttcagggccgtgatcggctcctctgctctgtttttttttcttttttcacgggagaacttgtgctcgaaacttctcatgcccagttgcagagcgtcgtcccaggatattgccgttactgcttcagcatgcttgcacgaccgctcacatacatgtgtcgcgagattaacaggaaagcaacactagtcaatagaaaaaaaaaagaacatactgcgtgtcaagaaaactaacatatttgaaaggaaactactatttttttaatgaaatgacaattgacaagaagtttatttatggattaagacgatacaaaatcatcttatgcaacttcagcacatatttgacgtttttgacaagttatttataaataacacactaacactgctatcattaaatgaacattggaattgatcaacagattttcatgagcaaacgctagtaatattcagcctctgcccaattgtccttcttctagccgtgtactgtcatgatcagtctgtgatagctggatctggcggaagccccaggttcagtgtccccaactcataatatttatttttctttcacttttttctcaaacatggaaattttaaaacatgttttatcattacttaaatagcacactgtttaaagaattctatatttaggaattagcttggaaaatgttctctttaaagagcagtaagatcatgaaaaattgtttcatgcaacttaagtagagaggaaggaagttcggaatgttttctggcagcagcaacacaaatcattttaaagctattgacacagaaagtaaatgtaaaaataacatactaatagttttttcctaagtcaacaaggatttataccagtttcatcgatcctatagctatgagggtggccattttggatgaataaactactattgagtcgaatcagaaagaggatgtggatgctcaccaggataccctcccctgctctgcttgagatcggcagccgcgacgcgactcgtcttggcggcggcgcgaggagcggaggagacaacggggggcgcgctattacgattgatgcacctgcccgccgtctctcttcctctacagcttccccgcgtggacgacaccgacatccctttgccggcgctggggaggagaactgtgaatccgtcgatacttgggggcaatccgagcatttcaaaaaaaaatctcaccactttcatcccaaaaatgaaaaaaataatactttcggtgtgctactgccaattacacaacttttgcagtgtccatagacagtgtcacgtttttttttatccatcagccaattacatgttttttgtgtatcctattgtaaattttaccataatatttaatgaacttttcacctctggcgcatttccatcttttgtgtgcctagatttaatgaacttttcacctctgtttcaggttacaaaactttctagtattgcccacatttatatagatgttaatgaatctagtcacatatatgtgtgcctagattcataacatctatataaatatgagcaatactagaaagtcttataatatgaaacggaataagtattaccaagtttaaatctcaaaacatatgaaacgtcttaaatcagattgtaggtgataggagacgtctagtgctatcactgtacacaactactcagtaacacaatcctgctgtttcgtactaacacttctgcttcttctgtgaagatgaagcataaataggcccatttgacagaactgcctcaactggtgccactcattctccgttcaaaatgaaatgtcatcactcatccctgaatattcataaatattcttatgtatgaatacaaaagctaatagagtgtgaaagggcatgtaatctagtagttgcaatgacctgaatagcatcccaagatcctgagttcaaatatctatatgagcaaattttagattaagttatttgttgagggctaagtttcctgtttgataggctaagttcctaatttaaaaaggttgcatatatccggttggacgtaaagatcaggtaaaaaatacccttctctaaataaaacaatactcctagctaatagagtaatagctaccattttctttcctatttttctttttatttccctatatggatagagcgcatgcgcaagatgaatcataacttcttttcctgtactcagcagtgtagcaatgctagtcaataaagctaatttcacctttgaacgggaatggggaagcaatggagtagagaattacaggagaaggtggcagctgaggagagaatcaggagctgtcacaaagctatatacaagttgggaagctgaacgagaagagagcatatgcttccctcctacaggaagcattatgacttgttggtgctgttttacaaatctgggtgattatcggaagatcgtcatgcggtagcagctgcagcttcttctgcgacttgggatccctgttgcagagtgcagatgaggttgcgatccccgtacacattgtccacgcgacctggtaagagcacacagacacggcagaatacagattaggttggtgtcaaattgtgttgagcaaattaagagcgatcttttggagacacagaaagcaagcaagtaggtacatgttgttggccagaacttggcgccccgaagccacgctgcagggaacgcagcatactccctggagtacggcttagtccatgagtcgctcatcagaagttggggcgggtgaggagcactctgcacaacaacggaacaaaacaagaatcacatgtcaacatcctggtgatgcaagagctatgcagccgcctcatgtttgaacttttgagtttggaccatgctaatgtatctccaaaattgcatacagcatgaggactaggattgaacggggtctactaacatcttatataacctataagaattgggggtaagaacataattgcccgtatatagatagataggtgttacgaacttacaatctaatatatgaaaacagatagcggtatagtagtattttaccttgaggacgttgttgttcacatctgctttgccactttctatctctgcaatttcttccctgattgagattagagcatcacagaacctatctagttcggcctgcgagataattgatgtgacattaagctcatataaaagaatggttggtacaatgctaaggaatatagtatgtgttttagtgttttaccttgctttcactttcagttggttcaatcataagtgtgcctggaacaggccatgacatagtaggtgcatggaatccatagtccatcaaacgctttgcaacatcctctggctctataccagcagtcgtctgcaaaaggttgcgatatccaattaagaaaattgaaatgcataactcaaggtccaaatgccaaaataactatgatagataccttaaatcctcttaaatcaataatgaactcatgggcaacagttccattgactccacggaaaagaactgggtagtgtttctgtacaggtaacatggtaaaacttagaaaactagttcaaacacaatcaaactaggtagcaataggtgatcacgagtaacaaatatacctccagacgctttgtcatgtagtttgcattcaagattgcaatctttgaagcatcagtgagacccttagaacccatcatggctatgtatgtgtaggaaattggtagaatcaacgctgatccccatggggcagcagaaatggtaccaagagggtcggttttctcagggagagggaagccaccggtggtgatctgataattacagaattaatctagttaatgaagtagcatctgcttttttttgttaaaaagaatgatggaattatgaacgaacacttctggttttagtaccgaatgtggtttagtagttttatcatcaacaaaaacttctacagcatttttttacataatatcaccgtactatgcttttgatatgaaaaatgatgcaggcaagtcttgcttcaggagtttaggttaatataaaatgaaaataaggtgtcacttagcatacccacctaagctaatgtggcaccaagaaagcgagaaaataaaaccagcaatagttctcgagttgaaggagttaggattacaaggaaactagtttttaaaaatcaacacagcattgttgatgacatagagaaatgtatgtttgtgtggaatcctctgaaatatactcagtccaacacatcataaaagactagttatagagtgtaacatgatttcgtataatttgcctaattctgtaaaagagtaaagatggaatttttctaaggtcgtctagcattctgtgttatatcaatcttgtctaatatttcaaggtaagtgttgggcattgagcattaatctgtttagattatcagcacattgaattcagagcacctaccactggatgagatggtaaaaatggtgctaagtgcttcttaacaccaataggacccattccaggaccacccccaccatgtggaatgcagaatgtcttgtgaaggttaaggtggcaaacatctgctccaataaagccagggcttgtcaatccgacctgtaaaaagacaacttctgttagttagggagtgtattgaatatttttggctcgacagatggggttttttgaaattacgataacagaagttctcaattgggatcagatgaacttggagaaagcttatcatattttattgaagatagcatatctcagcataattaattggataagggtcattgaaagataaacatgcaaatgaaagttggtacttctgtgtttgtttcaaaacaaggtatacttgtgtttggaactgaattaaaatagacttgttacataaacatgtttagtataattcataggcacaactaattgtttttttaatcatcgccatgccaaaagccatctgtacgatttatagagcctcaccccaatgcgtt

SEQ ID NO: 17973 - DNA, 33036 bp, Oryza sativa
  unsure (1)..(33036): unsure at all n locations
tgtattgtgccataatatcgtagctcttgccgttgccgctctcaacaaattctctgtcagaaacgtacgtcaaagttgtgtcggtgtcattgtaagtactacgatttgtcaatccgcagtcgacgtttaaaaaccctgcacagacacacatccctgtaataacagcctaaaacagacaccagatactgaccgatgctcatgtcgtgtgtttcaactgtttcaagttaaggttcatgcgagttcatcatacaatcatgcagctagatatttggtcgctaagtatacggggagtgcttacatatttattcttgggaggaagtatatgagagtgtttaattagctctcaagtattatgcactgatttctacttttctagagctgcatataatgaagtgatctgaactgtgcagatggagcatggattacaaagaagcaggctcgcagaggaaacagctctgataattaccaggaggagacacgccatggacttgtgtcgccgcgaccaggatgagcagcaacgacaatatccatgtcagcttggtaccagccgagcagctgtagctgatcaccatcaaatccttctgttttagcattggacgacggggccttcagccattttacaaattaatgaagtgtgttctatgcttgtatctgctacagatgactttatagctagcactgcaaagcagaaacaagctttagtaatatgtacattgacttgaccttgacggcttgatcgtacgttcagagataatcagctcggggtttgcagccacccgcaagaagaatctgtaacaaaatcttaaaacaaatgcaacttgccgtggaatttgcatgtcaatgatcttctcgccctataatttacggttgcgacgagaacgtaatcctaaccgcagtgatgacgaaattgcaaccggcgaaatacatgatgcaggtcaccttttctctggttatcgatcgccaatagtatattaacgcattgctgaaatgcatgttgatgtttctctgaataagtctgatcctgtcaaccatgccaaattaaataaaatagggacaaacaaaccgttgcgttcacaccatatgagatgatgagatggagaacatctgcaaattgcgaaggtgaaaatccagataaccccttacaagccattggtattttgaatcttcctctacaacttactacccctttcgggtctatcctatcctagataaccacattttgagaaagagaaggtaatttcttacaaaacactatccacaagtccattttcttttcaacttcccccctgtgtctagttttttaagtaattctcactacattcatcggtgatttctcacatcgtatggacctccagcatggtgagcgaagttaacacttatattctctgttattgggcataagatttaatacaacttatttaataatatggggtcatcttcgtgttttatcgccacacctttgataaattaaagcatacaaaagcaaaagcaaaaggagaactgcctttgatgacaagggtagcaatatagtgcaggcccataaggcacgagaaaataccggaaactgatagaaataggaagttggaagagaaaatgaatttgcgagaagtgttttgcacgaaattaatttgtaggggagagattagaaagatgagtgatttttaggagggggggggggcattaggattttttcctcccaattgcgaaatattaatcagagtgtagaaccccggaatgcgccaagttggatgacataagaggcaggggaagcaacgtatgcttccctgtcgcgatcaggtgtctgcatacagttttttcaaacgtgcactgtttgctttgtttggtcgcatgtcgaattctgacaaaacaaccgcgggccggcatcgtcgattatcctatggcgaaatatgcgctaagatcatccgtacgtgcgtcagcggcaggagaccacgggatgcaagttctgattggttatttggcttcgacttcgaggaaacgttcttcagagattatacaatatacgcgcttagttggttggatgccgcgggttcgttacggatttgttcgtcgattttgcatatcatcactgcctcttgagtcttgacttcgttttgcgcgagctcatcgccgtcggttggtttcgatttcttccttgaattaaagttccgaagaaacggcccgatcaagagtacttttactattcttttcaagaaaacaaatacttttacaacaatatctacaaataacgagatgttttatgatgacctctactaatagtagtaagcggtttttcaatggtctttactagtagtaaggtgcttctataatgttatagtaaggtgttttccatcacaggcgtgtattaggaaggtgaatcaatgtgatgtttggactggaatactgcattttctttttttttcttttttttgtgggaaactgtatggttccatggcagatgcaaatggacacatgggtgtgttggcccgtgctctgattctgcagtctctaccgtgccaaatcacgcatgaaaagaatcctcgtcgttgactcatagctactacctccgttttcagattataagattttctagcattatctatattcatacatatatatgaatgttagtaatgctagaatgtttataatatgaaacgaaagaagtggctaatttggagagcaagcggaacgacgcaatgtttggttgcacgaccagnnnnnnnnnnnnnnnnnnnnnnnncagagtcaagtgtgcatgccaatcatatacgaagtagctcggattggattagaggaaggcttcaacgatcgcgtctgtgagcgatcacgtatgcacgcgcttggcccagaacagtaggtaccacggcttcggtacggtctttttgctactaattattttttttctgtgttcgtgtcaccactcttgactttctctggcacgagcacgactgcactgagagctcatcggtttttttaagggagagctaatccgttggttagtttggaggaaactaccggcccaaacaacatatttaaaaaatatatgaaattttttttatatgtgttcttagtgatctaaaagcgaaatctgaaaaataaactttgataagaaaaaccttaaaattaattaaatttaagattgaaaattaaaatttcaaatacttatgtttatcagttaaaacttaaattttcaaccttaaatttgaagctgattttaagattttttttccatcgaagtttatttttcagcctttgctttttggacgctaagaacacgcatgtaaaagtttattcacagattatttcttatttacaaatatgccgtttcacttatgcttaaattcagccaaccgatgggtgcgacggattgatcgttcaatttctctataaaaattcggacggtcaaatattacacttagtccaacaagtaaaacactaaattatatacagacacagtcacataagtaatttatttttttaaaaaaagttttgcttctcgcagaaaagaaaacatgagtagttttccgttgctcggttgctcctccacccaagcgaagatcccgctccctgggccgagcaacatagaggcccgcgtgagccacgggagggcacgtggcgggctcttgcatgatgatggggccacgacgccagcacatgggccggagacgcgccgtgctagtatgcttttgctctgagtcgcacctggcccaaaccgcaaaacagtcgcttcgtccctctctgctcggccgcgagtgaaacgaaagccggaaaaagggaaaaaaatgtactaaaaactctgtagtacagtactgaaactaccgttttaaatggatgtagctcacgttatttatttctcaagttaaatttttatttttgtgacgtgaataaatctaaaatattcattttaaaagtttcaatgtatacatgatttacactacatattttctaaaaaaaaagttccggacaaaaataaaaccacacaaaacatatattccctccgtcctaaaatataacaacatgtagcctctataatttgtcttaaaatatagtaacttctacgccaatattctcttatcaaccaatcgtaactctttaccatttaaattcttcacctaccctcacttctcatccaatcacaaccctcctcacatatagttttacataatttcttaataaccgtgtccaactctaaaaatacttatattctgaagcacagtgacaagtcaaatatttttaactttcattattagtaataaaaagataaaaaagatgaatcatataaaattaatgttactagatttattattaaataaactattataatataattttttatttaaaacatctcttggatagttcgatctcgccagtctctagtctctaccagcgttcgagccctcatgtcagaactcagaaccccgggatctgacacctcagccgtcgccgtcgccgccgccgccggcggcacatgcgtcggcaccgccgctgaagcttctctctcctccctctccgggattggtgcggaatggatcggggatatacgggtttcttctcttcgtaaggtatgccctagctctttcctagtatcgatttcactcctgaactagttcgttctgcgttaaactacgggaatctattccaaatcgaaatgttccgattagtgtacatgcgcccatggtttaggcgtggacctctgtatagaatgcccatattaactcttgcgtaggatgcatttgatgcatatgaagcccttaatgcatttccggatgacatatgggataataaacaacgatatttccattatcttgaaaagatatgggataattaacaagtaacaacgacattttcttttacggacaagtcataggagcgagcaaatgatcaaaccatctccaaaacagatgcagtaaaatagcatttcctttcaccgtccagaaatgtagcttatttctgacatcccaccggtaggaccagactgtgaggaactgccctcgttgtcgtagcttgttgttgtagctccagaaatcatcaagtggaactgccgtggaatgtctgcatccatgacgttcttctcttgaggggttgatgtaaccgatcgtttctcacttgaaatagccaccgtaaacaacaccttaagcacagaaacaacctcagtcatgcttggcctgtcaattgatgtgttttcaaggcagttcattgcaaggtctatcacagtttgcaggtgagtggcatcgtattgatctaacagtttcttgtccacaacatcgtggatgcttcccttatcaatcttttgccgcacccaatttggcaagtggacggtttggggatccataaatactgggggttgaccagtgacaatctccaagaggacaattccaaaactgtaaacgtctgtcttaacggtaagttggaaagtagcatgatactcagggtcaaggtaaccaagggtgccggcaacaacagtagatatatgcgtgtgagctgcattaaaagcccgtgaaagcccaaaatcagatatcttggccaccagattcttgtccagaaggatgttgggtgtcttcacatctctgtgaactattgacgggctgcatgattcatgtagatactccagtcctatatccattgaaattcatgttttaaacacagtgcacacacatatgtgctaaaaaagttggatgtgtatttcaaaatacagaccttgtgcagcatcaagtgcaatgtgaagtcgttcttcccaattcaaactactatcatatcctgcatcaaagtgtgcgaaattagtactatagaaggccattcaatatgtgtatggttgtgcaaatactgctatatgtcatttggataatttgaggttatcaagggatgactatattgaaaaaaagaatagcagcacttggtgtaataatattccaatctatatttgtatgtatataagcagtcactttgacctttaaaaggataccaggtttccttctctttcgtagagcacctttttataaatttcaattaacaaggttaccaatcaactgatggaaaattaagaatatgtagctttaagagtacaacgccttacgattgtcgttttattagtcagctgtctatatatgtattgactggtaccaatagctgtctaggcaaccagacctttacattctatgctcacctacgtgctgtccatccagttttgtagaattagcagaagtttgcctcttacatgatactaacttacgagaatcttgcttactacttcgcaattccctatatctatgaccatacgtccatacattctctatatctacgaccatacaggttcaaagtttaaacaaactagcagtaatagactagtcacctgcaacaagaatatcccgttgacactggatttgaaaccctaactacttttatcgcatagtttttctttttcccctgtgtcaaatatgctttagctgattattcccaattaagcgttatgagcttgacatgatttattgttttattgttgaaaatttgaaaactactttgttcccagtaattagcgaaatctgttgatggctatgagttgttccgcaatgtgaaccttgaattgtccgacctcttttctgtttgaactgatttcaggtttgaatgattcagttttgttgagtcagaagtatgactgatcacagtagaaaattaaaataaaattggtgatcataacaatgtgcaattcagacctgtatgacttaactacttgagtcaactcttcttgatagaaatttcaagaaattgaaagaggaaaaaggcaaaaacctcctcttaaaagctgctgatgtcacgagctccggcgtaagaacgtatgggatatgaatgtgtgattggcggacgtggacgagggggtttggaggaacggcgacccgtgatgaacagcaagggatgagcaaatagagaataggaggtgagagaattagagattgaatctgcttgattaactcctccgaattgtgcctctaaataggcttacaactgattaaccaaattactgaaaacaagctaacaaactgataaggaaactggctaacagaacctatcctatcgcaatactgttgccgtccggcacggcggattacgtgcgctgcgctgcatctcctgacgccgtatcctgcagccctgtgcggcttctgcgttgatatgttatcccgaccatgacagctgaagatttcctctaggcatgaaatcataaacaagcgcaaggcacttcctgttttggcaatatcccaccaaagtgacaagattcttatgatgaactttggacaaggtttgcacctgcagcaggatatgccattcagggctgaagttagatacatatctttcttgaatatagactatatgggaattgctttagatggccttcgatctacttttgtgctgttaaatacctcagggaggaagtcttttgactctgctatagatgtctccacaagcaccttaacagctacttcatcgttattttccagtatgccatgataaacagtgccaaaacctccttttccaatgattgattggaagttgttagttatgagcttcagctctgcatatgtgaaccgtttgatgtcgatatgtaatggagcttcctcttcataaatagaataatcttcttgttctgctgattttcctgcaaactccaacctttatttacatgaaagtacagctattactaatgtacaccaaacaagcaatcattaaaccacccattgcattgattcaaaaggacttcagagactaatgttttattttacctttccagcacagcctccagaggatacaaaccagtacaaggagtaggagggataccacaggaactatcactgcgatgagcaagataggtgtgctgttcttatttgcgcagtacctatctttgacttttgagcatatgggattgccttctagtctaatatgccattatacaagttattagtcagataaaaaacaaatagaatcagctgaggaaagaaaaacttagctatatcaaccttttcaaatcatgattgtaacatgcttctgaattttagtgcttctgaacaaccatttctctaaaggcagaactattacatgctttataaagtgcatgccttcgctaatagatctattttgtccctgttttgttggaaatcatgtagatgctaaagcatttataatcactagagtctactacgtgcaatttacctttttcagttgtttttcgataatgtggtcgttgtttatgaacctttaattgattgatactgttgttctgtgataaccagtgttggttttagtcttttccttttggagtagttattttgttagattctttttttaatatcaatgaggagccatgcaactatgcaagggagtgttcccaaacctcaattcaagctgtcctgccttaaacctttgaagaatagaatccgggattggtccatcaagttggttatttgataggttgctgaaaagagtagtttaaatgattcatccatctaaaattctatatcaactaaagattaatttgaagcttacagcactctgagtgaattgagttgatagtctggaattgcgcctgtcaagttgttgtgcgataaatccctatatatgtttttgtgttcagtgtccacataatttcatttagctctggatgcaatgtggtaagaagaagcacttacaagttctccagtgatgccattttcatgaatgctatgtgtaatccacctattaatccgctggctgacagattactgcgaatgaacacatcgtaatacttgtcagataatttagtcatggcatcttaagacaataatacacatgactaggtatacatataatgactgtaatagtacatttaaaggcaaatatatttggatcagcatatattgactccaaaggttaaaatcatgatgacattatgaggttcggatttcagaatagatatgtactttacggttttgtcatgtacttacattcgggtgatccttggatttttgtttccattagcgtagtcgcaagccagaccttgccaggaatactctcttggggagcatggatctccattccagtttcttgtgtaactgtagtacttcttcacttctttcatgtaatcaactacagcaacagaaggataattaaatcaaacatgaatggaataaaggaattgctgcgtttgttgaacctgtgggcttgcatgattagttgatcagtaagttgtagacattcacttattgagtcgctagataattttatgatttaaatgttatctttaacttgtaattattcatttctctactttttcttaagaaaaaaattcatttatctgtttttagattaaattcatttctctgctagtagtctttgctctcaataaagctaatggattcttttgtagaccacatgctgccgtgcacgatgatcgtatgaacctgcgccataaatagcacacgtctaatttgtaccccaatctgttactgatcgtaatcgtaccgtcgtctggagaagtggtgaggttgtctgtatgaacaagcgagtacacctcgaatgcgttgatgagcggctggagctccgagctgggcgtcttgcgcagggtgaagttgaggcccctcttgcgcaagaacttaccactctgatatgtgctctccgctcggaacaggggtggtatgtagttgggaaacatcaggtttccatcgttatagatatcaaacgttctattctggttgttgcctccaatatcggcaaagtggaagattggtagcagctccaagctcctgtagtcgatgttgttgatgttgtcgatgtttttcatgttgtccggaaatatcacgctgacgttaaactctgagaaattgctgcttatggttgaggccttctgaaggatgggcatcggcacctgaaagtcgtcatttccaggaagctttgtcacgtcttggttggtggtcatgttgaggaagggaaatttgtagcgtagggctgcctcccagaaacgatcgaagggatcagttggatatcttgatcaccacaggagatacatggaaatgattgaaattgtgaggaagactatgattacaacgtcaatgattgaaaccgaaaaaaaaaacttttgaatcacctcgtgatgtaatcatcgaccgagccatatctttgtcgagccaaatggctgattgaaacagaaagattcagaaatgggaacattgcaccatccaattccctcaagtctaatgtagatacgaagggagttcctgatcccaagtttatcagacagacggatatgaatttgtctggagcaactgtgatcacctctttatacatcgtatctgatgaaccccagtttgtcaagttcaccgttgcccagaagttgacgccgatgtggagtccaaagagaaacagagaacccttctctgacgagttgagcccatcgtagtttccataagtgaaggtggctctgatgagatacttcttgctactgttggttggtaatgtataacagttccgttggccatcagggaagcttctcaacgttttttcttgttcatttgtagcatctgcgatgtattgtgccataatatcgtagctcttgccgttgccgccctcaacaaattctctgtcagaaacgtacgtcaaagttgtgtcggtgtcattataagtactacgatttgtcaatccgcagtcgatgtttaaaaaccctgcacagacacacttccctgtaagtaacagttttctgaaataaaaagtaataacagcctaaaacatatacaccagatactgaccgatgcttggtggagaagaaaattggtactacgagtgtttattcatgtcgtgtgcttcaagttaaggttcatgcgagttcgggcttgttcagattgaaaccgttttaaatcaaaccatcttttttttagagttaccaaatatatgtatccatttattttttttaccacacttcgataaatacataagaaatcatgtcataattttgaaaatattgccaaattactaaattttggtaagatttattttagttacaatcttaacaactccttagttcgatcatgcaactagatatttggtcgctaagtatatggggagtgtttacgtatttattcttgagaggaataaaacagtgttgtggaaaacggttgatacggccgtataaacggccgttcaatcggagacgatgagttgtctgtcacatttttacaaaacggttttcattagtcgtttgagaacgtctaattaccatcattgcccgattaatcaaccgtttctgactaatcggccgcataatctactgtgatcacaagacccagtacacagaacaactatccggcccattaactatattctgaacttagtagtatatagctagttgtgcagcctatatgtttgttttcttttctttccctttaattctctttcaaatctaaaaatttcttatgtattattgatcttattttaatcttttgtttaaatcttaaacagatgtgcacgcttgaagttcttttagtaggtgtacacctatgcgttatgaacgttatggatgtcctatttaaaaaatattataggaatatggtcaaacataagttgttgtatgcatttacatcttaaaaaggcaaactattataaactacatacatatatttacataacgttaaatatccgtcaaattccgataaatcgtccgtattccgattaatcgtttggcggtaccctctccgtccgtcaaccatattccgtctttcacaacactcaataaatatcaacttgattgttcttgctatgattatattaacttgatgatcagaaataataaacggcctgaagttttcatagtatggttctatatcaatttgatgtaatcgtttgagattaataaaagctttctttattaaaaaaacatatttattcttgagaggaagtactccctccgtcccattcggtaccaggttggttttttatgggacggagggagtatatgatagtaagtgtttagctatcaagtactactatgcacagatttctagagctgcatataatgaagtaatctgaactgtacagatggagcatggattacaaagaagcaggctcgcaaagaaacagctctgataattaccaccaggagacacgccatggacttgtgtcgccgcgaccaggatgagcagcaacgacaatatccatgccagcttggtaccagccgtgcagctgtagctgaccaccatcaaatccttctgttttagcagtggacgggaccttcagccattttacaaattaatgaagagtgttctacagtatgcctgtatctgctagatgactttatagctagcactgcaaagcagaaacaggtttagttatatgtatattgacttggccttgactttcatagttaatcagctcgggccctgcagccacccgcaagaagaatctgtaacacaatcttaaaacaaatgcaacttgctgtggaagtgtggaatttgcatgtcaatgatctcgctctataatttacggttgcaactagagtgtaatcctaaccgcagtgatgacgaaattgcaatcggcgaaatacatgatccaggtcacctttttctggttatcgatcgcgcgagtacttttgagtacagcaaatagtatagatcactgctagtctactaaatttttactaacaattatcttaaccgtttcatttagatacatataagttataaaaaatctaaatatggtcatagcatgacacatcagtgatagtaagaaaaagttagtacgtatagctttttctaatattatattagcacaatgctgaaatgcatgccgatgtttctctgaataagtatgatcctataaaaccaagccataaaatagtggcaaacaaaccatcgcggtcaaaccatatatgagatgagatgaagaacatctgcaaattgtgaaatattaatctgagtccgctatgatagaaccccagaacgagccaagttggatgatatatataagaagcatgggggaatcgaacgtatgcttccctgtcacgcactactagaaaaccatttttctagacgatgacattttttttcctaggcgggtatgcctcgtggagctaaatggccgtctgcgaaaatgacaaccgtgaggcgagattgttgtccgcacaggcggaccagatccgcctgcaaaaataaattttcgtagatggtaccttaagaggtatacctgcaaaaaggttaaatatgttaaaaacaccatctacccaccaaaatactaagtcagaacactttgccctcacacctttcccctccaacctctccctcggtagtccctcccctcccctctcacctctcctctcctagcacggggtctggtcggagggaggtggcggctacaggcagtggcggcgcggagggtggaggaggaggtggcggctccgccgggagggggagggtggtgacggtggcggttcccttccctcctcccagatctgacaggagagggtagaggagagaatggcggtggctaccggcggtggcgacacggagggtggaggagacggcggcttcctcctagatctggtggaggcgacggcagctccagacggtggcagcgtggctccaggcgatggcggttcccggtggcggatccactccctctctcctagatctggacggagaggggaggggcgatggcggtggtgggggcggaggtgggtacggtgaggaggctgggtgtggcgaggggggtgacgtttttttttattcacccaaaatattttcgcaggtgggtggatacgacgcctacgaagatagaggtgctgcctgtgaaaatcaactattttcacaggcttatgcgtacaggcgagccttcccccgtctgagaaaatgatttttagctgtctgggaaaacgatttttctagccgtggcaatcatgtgtctcaatgcggtttttttagacgtgcactgtttgcgttttgtgtttggtcgcatgtcgaattctgacaaaaacaaccgcgggccggcatggcaacgacatggtcgattatcctatggggatatgagcatcagcggcaggagaccacgggatgcaagtctcagattggttttaattcgaggaaatcttcagagatcatcgctgttagttcgttaccgcgggttcggtacggatttgttcgtcgattttgcatcatcactgcctctcgagacttgacttcgtttgtttgagctcatcgccgccggttgggccctatgtttaagcaaaaataattataaaacatcatatcaatattatttataggtatttttcagagcaacatattgactttcatcatgagctcttctacaaaagtgtgatgaagacattaagttaataaaagttgcatgtcgtaaactggagttaacggttatgcaacttttcgctaattttgtttggaggttcacaaatatgatttaataagttagtgctttattttttctattggtgttagtgccgatgtgtgcctctgtcagtttgaatgtgtcccttatatctttatgtcttattttgaggtgtgattgtatttggaactcttttctttttaataattggctatagttctatgagtaaagaccaagattctattccactatctaaaaaaaatcactattgattgctctgaggttaagatctggatttcttccttaaggctttgtttagccaatggagttggaaaataatatcccacctttcaaagggtaatattatatcctagccatcaattcttcatacctcatttaatccgccatgcatccatttttcatcccaatcccacctctccttaccaatggcggagccaacatcatcatcaagcccagacgacttaatagtatttttcagctctcgattaaattttatgagtgtcaataagtcaatggctatcaatagaggtgacggcaatggcagagcccaggcggccacttgacctgcccaggaggtggatccgccgctgctccttaccaatttgtcaaacacaccctaaagacttgaagttgcgaagaacggcttaattaaagtgtactcctatgttctttttccaaaaaaaatgaacttttattttagagtggtggtctctgctcctgccaacacaaaaaaaaaacaagatttgaagagagagagagagacactattaacatgttggggattgaacacggggtcttatggttgaaaccatacaccacttaccactacactatcaagtgtatctcaaataagaaatattataatactatgattctagtagttgttatattacgatgagacataggtagaaatagtagcaaagcacttttacggtctgtgtgttggtgctacgcgcgcatgtatttagcaaagcgccgctcaggaggcgaattggaagaagcgcgtttgctgggccaatcaaaattaattgaggctgccacgggagatcaacgttatatataagggcaatttcatttttgcccccactttcatctctaatattgattttgcccgttttcgtttttgcccccacttttttgaaccgaaaaatacttttgcccctgttttggatggagaagttaacggtgttaaataggacatttataccctctcccataactaatcattaatttcattaattgtgttttgcccccattatgcatggctttggaaaagtttttaaatatgtttaaaattaaatgacagattttgacattacaatttggacaaaatttgaatttgatggaattttgacaaaattttggcagcattttgacagaaattgaggaaaaaaatgacaaaattttaacaacattttacacaaccatatgaagtcaaaattacccaaattatgaaatggtgcatcagtaagaaaacaacaagatgcaaggtaaaatcaacattatgcagtacagtatatctttgctatgacttaggggtcggaaagagcagatgcaaagactcaccaggaaatgaaatatataggtcatcacaaatgcttaaaaaagatcatataagtaatatggatatgaagctcctggatggggtgttactggctcactgctttcgctgattgcaatacgtatccacccagaatggatggttaacacttaggtgcacaacaacacaagagattaccattacatgcattgttcaaactaaccaaaattgatggttctcataacatgacacccacttttttttccctatatatatatatatgttggattggaaaactgcatggtttcatggcagagcaaaatggatacagggatgttggcccggcccggtgctctcatctctgctgtctctaccgtgccaaatcacgcatgaaaagaatcattgtcaggctgtgtttagttgctgaaattggggagaagtttaagagaaagttggtagtttggaaaaaaaaagttaggagtttatgtgaataggaaagttttagatgtgatgtgatgtgatggaaatttaggagtttgagagaagtttggtgtgaaataaacatgaccatatactccagtttggaaagcaagtggagaacgacggcaatgtttgcttgcacgaccagttcgatccgatgcgtttcgtcccggtcgcaatcagagtcaagtgtgaatgccaatcatagctcgatcggattggattcgaggaagccttcgacggtcgcgtctgcgagcgatcacgtatgcacgcgcttggcccataacagtaggtaccacggacttcggtacggttttttgctatttttttcatgtgttcgcatcaccgctcttgagtcttgactttctctgccacgagagctcatcggttggtgcagcggtaaccagctctcggataggtcgggtagtcgtccgggcaccgtcatagacgtcttcaccgtagataaaatcgattttttagttttcagtttttctcttttttatcattttaaatcaaacaaccacgtaaatgtcacatcgatgtcacgtggaaataatatctagttaaaggagccacgtaggtgttatatgtcagctacttcgtttgcacttttttctaaagttggggaatgtgatccggacatccggtttgacgttcagcgacaaatttgagggaccgaaagagaacttattccccgtgtagcgcgcgtgtagtgggctcttgcatggtgggccgcgctccgtgatggtagctttgagcccgactcgtttatgggctcgtggaccaaatcgcatcgcgccgcttttgctcctccgtctctctctcggcttggaccgtaagaaaaagcaaaaaaaggaaaaaaatagggagtgaaaaaaaaaaaccccaaaagaaagaaatctccttctctctctcgatcccgtctcgtctcgtcagtctgcacccggttgcctccccgccgctctcctctccggtctactcctccgccgtcgccgtcggcaccgccgccggagctcctccctgctccctctactgggttggcggggagtggatcggggatctgcacgcaggggccgatttcttctcttcgtaaggtatgccctagctcttccctgggatcgatttcgctcctgatctagttcgttctggtctccgctgtgaatttcaggaaatctgttccaaatataggtgtttctaggggaattattccgtccaattagtgtacatgccctgcccatggtttaggcgtggagccccgtagatgaagaaccccctcttgactattttgtaggatgtttttttagttaagaatttagttcatttgatgcgcagtaagatcttctttcatgcattgctgagcgcagtatggggtgatcttctgttttgattgattgtgtggatgtggattatagacagctaatccttagggttttttcgtgttttcttcaggagtagataacacagaatagttgaagatgagcagcataggcacaggatacgatctgtccgttaccaccttctctccggatggtcgcgtcttccaggttgagtatgccacgaaggctgtcgacaacagcgggttcggtttaactgctcccctttctttccttccttttgctaccgcttcttcctttctgtgtgcaattatgtaatgacgttctaatatttgttaacaggactgttgttggaatcaaatgcaaagatggaatcgtcctggtaatgtctgcaaactgatagataaatttcaaagaggtgtattttttgtgctcgattgacatttgtttgttggttctttagggtgtggagaagctagtaacttcgaagatgatgctggagggatctaataggaggatccattcagtgcactggcactctggcttggtaacatcttgcttccctgtacatagatcctcaaatgtattacgatttcagtgtaaaaaaagtacaattgatgaagaataaagcaaggatgttgtttatatattttaatttctacctctatattctaggatataattctcattaatgttatggtaaaagaagttgttctctgtcggggcttcttttccccatctttgtcttccactcaccccataacacatcgtgtcctttaactataaaatattttttccaggctgttgctggtttagctgcagatggcaggcaaattgtttcaagagcaaaatcggaagcggccagttatgagaagtacgcacataaacttgtaggccatgtagacataattttatgattatcctctaatgctgtgatgtactagggtctatggtgaacccatttctgtaaaagaattggctgatcgtgtggctagctacgttcatctttgtacactctactggtggctcaggtaagacgttggcataattgttgcattattactggagacatggcttacatgatttaataaaataattattgttcggttagttgattctaactatatttacatgtatcaggccttttggttgtggagttattcttggaggttatgatagggatgggccacagctctacatgatcgaaccctcaggagtctcatacgtaagctaacactacagtacacaagaagtcaaactcgtcttaggctcttggtttttgtttttttcatctctatgtgaaccattattagcaattaaattgttcaatggatgcatataggagcattccacaccatatttttatcatagatatttttatagttccttctgggatctgagcatattattcactgagctgaatcctgaacagaaatactttggtgctgctctgggtaaaggaagacaggctgcaaaaacgtaagtttatcagcttcaaattgtattgggtgctctctttgtcagcactaatatcttctgttttaaaacaaagttggtgcaattatgaaaattaactatttcatattttccaagagaacacaggtattgttaattcatcgcaacccagcttgctgataattggaatatgagggagggtagttcctccattgtccataatccatataccatcttagcatttgtaatcatcagatccttacaatgtccatccatgttttgtttggttttaacatagaagtatgaaacgaccaaaccacattaacatactgatacaattacatgtttaacggttgttatgccttttgttgtattgacccatcacttaatttgtgtgaatcactggagtgttaatgtggatccaatgatccatgtacagatgggtgggattggtttaaaacccacttttcatgaaatttcaatatgtggttttggtcatctttacccttctcatagaggaaagagaatatgtgtttttggtcatcattacccttctcatagaggaaagaggtaccattaagccatatagcttatgcaaattaggacttgtttgatgagaactctcagcaatcattttagatcgacctctacagaacaagcctgtcaattctgtaattgtctatctgtgtgtggatctgatgtcttgttggtagctactgttgagcatccaacattagcttttgcttcgatttgcaccatcttggtcatcagaatagttctgattccaacttttcaaatgctgtctttcagtgaaatagagaagttgaagctttccgagcttacctgccgggaaggcattgtggaggttgcaaagatgtatgtattgaacaccctttctccaacaataataatataattgtgttcatgaattttgcactttgttttgactgaatgcatatcatctacagtttttttcattcatatttttctatatattatttgatttcacatatgtttgatgccattcttcgttctagtggttatacctgcaacatcatgcataagatttatttgctactcccagtaaatggcgttctagaacatgtgcagttaaaccttgaaatctttactcactaattaatgcaaaaagggtcagatttcatatgtggaaagtgacattaatagatttatcatcaaaaataaattcatgtagttgtatttttaataatatttaaaggtatgactagaaaggaacaatgatcaaacatgtgaatcggaaattgtgttgatgtcctagacatcatctaaaatataacagaggtagtaataatcatttagttatttctgctttaaaataaaagtactccctctgtcccaaaataagtgcgccttctagcattggaaagccaaattatgaggggagggaaatgacctagatacctcttagagtatgtacaatagcaagctgtaagccagctgcaaacatattttaaagagataaataaggagagagaaaagcagcgggctacagatttgtagccagctgtaacacggactacaagacgcagtgtgtgtatgacaggtgggaccaggtattaatagtgtagtatgtaactattgtatagatgagctattagattggctatagatgaattggagctagtggttggctatactattaaacttgctcttattaaacgagggatagttaggagtgggaagacgtggaggaatttgaatgggtggtgattgataggataagtagtactctaaaagagcacttttttgggacaaattttaatccttaaggagcacttattttggcatagtgggagtagttggctacataatcatattggaacattttattgtaggtagattcttcttttaaaggtaggttctagctcgcatgaactgtcgatgtcaactgatggtaatgaacaaagcagactaacaaaatagtttgggatgttttttctctaataatatttagaaatcctttttgaataaagctacttgtctgacaaaaaaaaaacagttctcactttcttataatttgttctgtgcagcatttatggagtacatgatgaagctaaggacaaagcttttgagttggaattaagctggatatgtgatgaatcaaatcgccagcatcagaaggtgttctgttgttatttaaaaataaataaactctgtccatatttttgtgaactttgctcacttggcatactgcatacaggttcctgctgatcttttggagcaggccaaggttgcagctcaggcagcgcttgaggagatggatgctgattaagaggagacccgactatgttctacgtttggccactgatgaaatctttgatgtcattactggcacacagggacatggccattctgtcggattttaaaacttcgcatgtacttatggtactaaattcatggaaagtttgatgctggacagtgaatggatatctgacttttgactgaacttgtcccttaaatcttgatgaattgctcgtttcgcgtttgccttttttggtgttcacccaagattgaacgactcaatgatgtttttcctgcagtatcttgacatttgaatcgcattttagcgaccttgcctccaaaactattaactgcaaccttacctgatgatatatttgtccgtcacattgcaaaattctcagcttgcaaagtaacttgtgaaaaatgaatacggttgcctgcataactatgtaacacatgttggctggacggcgacttagcaccgcaagagaagaatcgaatcgggaaataatttgtggcacgccatcagaagattgctgaatgaaaataggtatctgaaaaatcaaatgttccgatatacctgatcgcttttttttgaacggggattatcgctaatgaaacttgtgtgaagaatgaaagagagtaattttattaccaaaatgatagactaaaatttggtaatgtcaaattagtttgatgtcttcctaagttttgatagtatttttatgaaaggaaatttttagaactaccaaattctggaaaattgtatttagcaaggttatatttagttcgttaccaacctaaaatctctgaaactatcaaaaggtaagattttatgttataagatcatgtttagtttattgctgatccataatttggtaacactaaattttaatactagtgcttttctcaaatccagtttaatagtgttaattaaaatgataataaagtaaacacttccaaaaacaaaactgagtagacggccaacccaacggcggccggtctcgccaagtcgccaacgcgatccagccagccaagtccaaccaaacgcgcacccaccaacgccacccgaagcttcggcccctgtctaaactccgacccgttccaccgcctcgccgtccacttccaaacccaaccacccccaccaccgccgtgatcccctccaatcccttcgccggcgaccaccggccgccggcgactccgcctccgccgccatgccgccctcctacaccccgaccgcccgcctccgcctcctcgtcctcttcctcgcgtccctctcgctcctcttcgcccaaaccctagcctcgtcctccgcggaggccgaggtctccgacccctgcgccgcccccgtgtcggacgggggcagcgaggcccagctttgccccgtgcggtgcttccggccggacccggtctgcggcgccgacggggtcacgtactggtgcgggtgccccgaggccgcctgcgccggcgcgcgcgtggcgcggcgcgggtactgcgaggtcggggccggctccgcgcccgtctccgggcaggcgctgctgctcgtccacatcgtctggctcttcgtgctcggcgccgccgtcctccttggcttcctctgatgtgcgcgcgccacccgctacacctcctccctcccccctctgtagttgatttctccacatttatccgtttcgcgattatttttctaggttggtattagtgcgctgttatatgatctgagggatgttgctgcaacaatttgttgtaaacttgtaagtttggaggatttcgtcgagagatgtcacacgatttcgtcgagagatgtcacacaattctttcatagatctgtttgattggcctgggctctcatttcagagctgagctgtgcagatgggtcgtgatctgtagttgagatcatgttttgacagtttgtaaatgtatgctaacaattgcagcgatcagtttcatggttttgtacaaaatcgagcttcatggtttaccatttttaatgtgctctgttcgttttgttctatgtgtggtagttgtgtacatgcatgtgaattgtgatgtctggattgcttaaagcacttgagcaaatgaatgtttaattgaaataactttaaagtctcatctcttatctgccatagtgttgtgatggagccaactgttccatttttttctgaaagattaaagatggcagtagaagcaattacaactatcatttgattagtcattatatttggttcatatttctcatgtgaacatcagggggtaaactccatacttaaggacttggggttcatgcgacatggagggaagtgaactgatatagtatatctgatccccattagctgattatattgttcttgttttatgctttggcatcatggcatgattttagcagttatccgtagaatcctatgaaatactcaatgatttgtggtgttagatacagcacgattctcagttctctgtattatcatgtggatagaatgaatgtataactgcatactgtgggtctggctatgcggtaagaagtccaatttttgaaacattcattcctctatttgatacatagtttatggtttcctatcttgaataaaaggtcccagttcctttctgttccatgtgcatgagaagacgtgtgataatgagagaagaagaaagatgtgtggagtatttgcatacatgaactacaatttgcccagattgaagcagtatatatatcctagagctgcagaggacagtaagacagtactgcccatatggccctgcaacttatgatggacaactacctcttgtgttctgccatgaagggaagattgtctgtttactctggtgagtcatgtgcatctgattagctgctggcttgatgcaccttctgttatgccatttttgcttcttttttttgtgactcaaaatttagcgcctcacttcattcttatccaataaacattactcctatgcatgggtttgggaagattattgaagttgttgagcctgaaagagtaactaaatgacaaaaatattagatgtcttaaggtccacatgttatattatatagtgtttcaaatcatattatgcttttacccacgttacatatattgaggattgttctttattttttggctccgataataaatagagcttattctggtacttgaagttcttctttctacagccgttttgattctatggatttgaacctgagtactgtggaagtaagcaataattctctctatcagcaacagcttcttataaaatctaagtatcttatcattgttaataccttctagactgcgatcttcataggagagcaaggttggaagatcaagtgttattctcactagtctcaaggatcacctgagagatattcagcactgtagaaaaaattttgtttccgttggttttcatgcagctctggtgcattttaacttttccttgagtcagaacatctcctgcctaaatattttcctgtctcgccctagatatgattgtcatggtggaagttgcaagcgacattttagtgtttcacagttaaaattgtacattacgttatcgtttatagtaaatccaggcatacaaaagtcaaattacagcgataattatgatgacattaggattgaagatgtatgaaacttaaaattattgacactgaagatacatgcttaaaggaagccctttctgtatgtccatcctatctaccctgtttctctcggcaaagccagtgaggccttgaaacttgttgctcatccaaggcatcttgcaacatcagttacatcatcagtataaaatatggagatgtagagacggagatgtaatagttgcagcggttcatggtgacgtgttgtaatgatggtgccatgtgacggcagacaacgatgttatattagctatcagaatcgtgttttgttcagtctcactttgctcgagccgtttagccctttatattaaaagatcaataaaaagataatatcgttttctcatttggataacctcaaaagattttgagggcgaaggatgtagaaagacaatttatcgtcttcacatgtatgcatgtcttattacgaaacatcgaaaaaaaatagttatcctatattttacaatggaagtagcatcaagaagtaaaatggatcttgatcgcaagacgttcattgagaagagagaaaaatagacttgatgatccaatggtgcttaatgaaaaggttggcactctatggattagagataataaattgatcttccaggtacattaatgccaaccctttgtcatttagagctcttaacgcatctccaacagtatgactatcacactctctaagctaaaatttggtaactgtgaactataaatgatagcagacccgctaaccggatttctagctagccaaacttagacatctggactagctggctaaacctggttgccaatcgtgggccccacaccgctcctccttccactttccgtcctcgcaaagatcgagcaccttctcatcgtcgtcgccatcacccgtcgccgcctggatccatcggcctccatatgcatctacatgttgtttcaatgattggttgttcacccaacccaagtacccagcacttactatgtgaactagatttcgaaaatattgtgaaaacacatactatatagcaagcttttgatttttttaaaatacataggtgatccagatcataaaatgctttattacttctttagaaatgtgatgcataatctggatatagaatgtcgtgaaaacgttttattaacccagtaggctaataattctttagaaatattgcacgcgaactggatttagaatatagtggaaacattttattgcttacctagttacctgacatgctattgattcttcataaatacgataaaccatgtggatctagaatgttgtaaaattaatttattacttacctataatgctttacgccaattagatttagaatttcgtggatctctagaaatactttacgcaaaatagatttagaatatcgtgaagacattctattacttatttgacaggctattgaaaaacataatatgtggtttggattagaatatcgtgaaaacgttctattgctttccaatagatgctactactaattctttaggaatgaaattaattccaacaaaaaaatatgcaaaatttcttcaaagcattcctttccactcctgcggatggaaacgaggagggattttaattttgaataaaaaaaccgagaaaaaaaataaagaatgaccagaatgccctcttgatgttctctcctctcctccattgaccattgccttcttttctctctctcgctcgcttcctcggttgctcactctgtgtgtgttccctccttgtgctgagccgcggccgcggccggccttccgcctcctcctcgcctcctcgcgcgcgccgctggcgagcggcctcggagtgcgcggcgtgtgcaagtgctcctactctccttcgcgatcccactctcctcctccgcacctcagctttgctctcgcgcagggccagcgagctggttcggagagggcggtgtggctggcctccccttccactgacctccgtctcgtctcttctcgaatcgaatcgaacgaactgaaggtattcattcttctctctacctcctcttccgcgatgattcgtggggcggcgtaggtagggtatccatcctgacctgggattgatttctttccctccacttaacacacacagagtttttattttattttattttggggtgggaggggttctttgatgcatgttgcagtactgatctctattcgtttccgaaagaaataaaaatgaaaactttggggtttgagctgaacccccatgccccgtgttagtgttggcccctgcatctgtcaagtgtcaaagttgtctctcttttttttttttttgaagtgaattgtgcgaatagaggttagagaagtcgcatgcagatgctaaaggttgttcctttttttgttcattttggcaaacagtgatgtgccgggattaacctgtgatttgttaatgcagatagtcagctgatactagtgaagatgaaccgggaatcaaatttcatgcctactcctgatcaggatgttctggaagtcaagcccctgaggactttggctccaatgttccctgcaccattggggatcgatgtgcttaaccggttgacagccccaccgttggtatttgtcgcaccagctgggcagtttcctgggggttttggatctttgaacattcctgcggtcagatcgtttgccgctttcggtggtcaggatgctagtggaggcaagactgctggtggtggtgatcaggatgctagtggaggcaagactgccgctggcggtgatcaggatgctggtagaggcgagactgctgcttttggtggtcaggaaactgtcagaggtgaatttgttgcaaatgggactccaaatgtaggtgctagtgcaactgggccaattgacgccactcctatctcagcttgcaaatcaacacaaccaagtgtgatatcactggatgatgatgacaatgatgatgatgagccttacggtggtaaccaaacatcagcatctggacggaagatcaagaggccatcccatctcaaaggatataatgtaagtgatggtttgggcaccgacagctccaacggaacaaagaaacgccctaagacctctaataggaaggctgctactgacaatgagatttccttgatgcctccatccagcgatcccagggaggttgtggaagtgcttctcatgaccttcgaggcactgcggcgtaggcatcttcaattggatgagacacaagagactagcaaacgtgcagacctgaaggctggtgccatcatgttggccagtaatctgagggctaacattgggaagaggattggagctgtccctggagttgaagtaggggatattttctacttcaggatggagctatgcattatcggcttgcatgcacctagcatgggtggaattgattatatgaataagtttggtgatgaggatgactctgtagcaatatgtattgttgctgcaggtgtttatgagaatgatgatgatgatacagatacactggtctacagtggttctggaggtataagcaggaacagtgaggagaagcaggaccagaagcttgagaggggtaaccttgctcttgagaggagcctgtccagaaagaacgtgatccgggttgtacgtggttacaaggatccagcttgcttgactgggaaagtttatatctatgatggtctttataagattcatgagtcctggaaagaaagaacaaagactgggatcaattgtttcaagtacaagttgcagcgagagccaggacagcctgatgcagttgcaatctggaagatgtgccagagatgggtagaaaatccagctgctagaggcaaagttttgcaccctgatctatcatcaggtgctgaaaatctcccagtgtgtcttatcaatgatgttaacagtgagaaaggaccagggcacttcaactatattactcaggtcaagtacttgaagccactccgctctatgaagccatttcagggttgcagatgcactagtgtttgtctgcctggtgataccagttgtgattgtgcacagcataatggaggtgacttaccgtacagttcatccggattgcttgtatgtcgcaagcttatggtatatgaatgtggtgaatcttgccgatgttcaatcaactgtcgtaatagggtagcccaaaagggagtaaggatccaccttgaggtcttcaggacaacaaatcgaggctggggtcttcgttcatgggatcctatacgggctgggtcatttatttgtgagtatgttggtgaggttgttgatgatactaaagttaatttggatggtgaagatgattatctttttcgaactgtctgtcctggcgagaagacattaaaatggaattatgggcctgaattgataggggaacacagcataaatatttcagctgatacttttgagccgctgcccatcaagataagtgcaatgaaaatgggaaatgttgcacgtttcatgaaccatagttgcaaccctaacaccttctggcaaccagttcaatttgaccatggagaggatggttatccacacatcatgttcttcgcactgaagcatattcctcccatgacagaactgacttatgactatggcgacatcggatgtgaatctaggggtgtaggttctagagctaagaactgcctttgtggatcctcaaattgccggggcttttttagctgactgttgaagatgtgcattatcttatcaacatgcaaatatatttacctggtaaaaaaattcaccttattgatgttttcaactttgaccaccgtgcatactaataatttctctgctgttagaaattcctgcttgtcctgctcatgcattcttgttctcacctgatttccattctgcatgcaattatttctatgtccattcttgctgccatgcatgcttatgctgcgctgcctttcatatggacttctgacttggtcctaaaattaaaaataataagctgttaggctactacccctgtaggctgtagtaggtcaaccatcataattaactcaaaactaatctcttttattttggacgttttgtatcactcctcatgtcattgtgagtggcaacaatctgcagtgaatttcttttatgcagtaaggcaactatttgctgtaggcagctatatcctccatacagaattttgcccctgtaattaaaagctaggatttgacatttgagaacacccccccccccacccaaaaaaaaaaaccaaacccccttctccctataggtcttctatcatagcttgtttgcagttgaataattcgtacttccacataactgtgttctaggaatgcattgcaacttgcaaggatatggttactcatgtgaccctgtcattggagattctttattttcaagaccattattgagacatattacagcacagccacagtagttgttgatcgtttatttcaaatgactaatttgttttacttcattggttatctcacttatctgtcaacgtaattactgtcctgccaagttgatgtgagattcaaacttagaactttgctgttgcttctgattgtttaattactttgaatacaagaatatcatatctgaggttcactgtctctttcaaaacactgcattgcatttggcagcgtttacatgacaccagaaaggggcttgtgaatattgttaagtataccaacttgtcatttagcatctcagattgttaagaagggtgtacttagtacttactatgatttttaaactagctccttgttttcctctatttgtggaaaacttatcttgggataagctctcactggttgtcttgcttttgcagatccttttgcttttttggtggtactaggaagtggactatgttcaagactttagaagtatggagaagctggttacttcaaatggctaacctcgtttgccgctgtggaagtagtaatagtaaattagtgcaacatttgcaatgcccattctcgtggtgtctcttgcgatgtgtgattgtaggccttgcaagatcaattttgtaaaattatgtggggggggtgggggggggatgtgatgctgctgatctgactacagtcgatgatgtttgggtaggcaaagttgggactgaacccctcgcggtcagctgtgaattcagaagctgagatatttggatgaatgctgatatggtggcatatggttcttcgaaagtctctggatttgtcttgatttttctctataattggttcaaagctaggtacacaatgcggttgcaaactttcgagtagttgcagatcttttcgttgaattaactataaaaatacgatgcgccggtaatgctcgcttttacctacgacgtgactttggatttctcaaccatcacaagatcaggcaaaaagctactacctactttagcgatgaagagtaaagttcaagcaagtagaactgctagtcattccacaatatcactgaagcatgtgccaaataataaaaccttgattacatcagaggacatcttgttccttaacattgggtgtcatgcaatctgagtataaagtttctatcatcacaggatttggcacactgcatatctgcaagtcttcaaccgaagtattgttacaccccaattacacatgttacgggcaaaatggatcaaaactatgatgtgttttttcaagaacaatttacacaagcgccttagtgatcagaagcccgggcaagtaataactaaagaatcgctaagctatggaagtaggaaagacaaaacagaaggtagattcaaaacatcttcgtgctgttccccactctgcagtcgcatgtacatacgctccttgactctctgaccacgcgttgagaccgtcgaatatgcaacttgatgtttaccagcttaccagcaatctgcatttcaggttccataagtgggcatatgaattcattgaggggatttacataaataaaaatgcaactgcaaatgaaacaccttagctctttaaagcatgatgtgcatagagtgatgggaatgcttgtggtgttaacaaaagttgttgcaagaaaatctctcttttcatggcacagctacttaagtatctagggatgctacaaaggtttgaatagaattaccattctccatgtaagatcttcaggtccaagaggtcgagcaggacttgaatatagaaaatgtctagagtactgtaaatgaatcacaagtaaaattgctgtccacaaaattgaagcttccgaaaaacttcatgcaatatatgttaaaataccaagctaaccttcagaagatttgattgcatttgtctgatccttttggcatcaatgcttctcaggtacttcaccagccaaccaggttgaacagcgtcatttgacgaaacgaacaaagctatctgcagaacaaatcaatcattgcacactgcagttcattatagaaaatatgtgctttaaattgcagcaacacaaatgcaaatgcgaaatacatgaaaaaaccatcatgctaccataaaagactcgagtaaacatgttggttattcaagacatgaagtatccacagattgtgaagtatatgcagaatagcaaccaactgctctttagtttatagtggatcaatcaccgagggcctttatttaatttataatggaaaatcactgaggtagtttctctccttgttttttatcacaagcataagcacatggtgcaagtacacaaagtaaaaaaactcctgaagtatactgaactaataggcatgtcaaatttcacagaccccccccccaaaaaaaaaaaaaaaaggaaatcacagaaacttcagagacttaactggtgcagaaaagtagggttgctacaaatagcctttgtagaattgaatccagacctgtcaaactagctgacaacatggccattgagctaccctaagtctctgactattgacatatacatggccatttgttgattgtttggggcatgcaaatagaaagtagcacagcatcccgttcttcaagcaagacatcaatttttggagctccacgcagatatactccctccgtttcaggttataagacgttttg

SEQ ID NO: 17974 - DNA, 10144 bp, Oryza sativa
acttgagcagtttaactttgaccaaagtcaaaacgtcttataacctgaaacagagggagtacgtagtaaaacctttactaagatatgtggtatgagaaaacagtgcattaatactgcgataaatcaagtttaccttcctgtagtcaagtattccttcaaaaggaagctctagttcatcactgactataactggtatgcaaccactaacaattgcatcaaacagacgagcagaagatggagtatccccagccggattcaagcaaaagagagacctgccagtcaaatatattcagtaacagctacaatacaaataaaatagaattgtatatttacttgcgcatgccgttctgagctgctgctttgccgtcagctccagcagtcccttcttctatgattatgccttctgcatcttttagttctgtcacaagtttactgcggatcttgcctccctaaacaaaaaacagaataaagaattaagattcacataagccaacttgaatttgaagtattgcgtgcatgtatttcatgctgtcgaaaactggaaaatgacaagaagaagcatacagcattccttctcagtcttcctcgaaagaatagcaatgtgcttcttctagattgagtttctgatacacacttagaatcacaaagatcaacatttggaacatatggaaggatgacatccttttccaaataaacttgccctggtttatacctgagaaaaggggcgaaactgagtttggtaacacaactattgcacgcagaagctatttaaggcaaagcagcagacaattaataccataccagttcccagtagaatccatgtcaggcagaagccatatagccttcttcacaaatctccgaactgacttaaacgaccatgggtgatgaacgggaattacatgatctctgccttctgaacgttgccaagcaggttgatcagtaacccatttcaaagcttcctaacaccaacaaaacaacaatatcaatactgtcctcttgcaaataaacttgggtgaagaaatttcatgacaatatccttctgtaaataaacctagccacctaggtgaacaaatttcaggacaaagtccacttgataataaacttaggtgaatatattgtgcaacatgtggagaaatagatgaaaatgatccctacagtcaagtgaaccaagaaaagccatcacaaaaaatggtaagaaaactgagctcaggtaaagccttgccctattccagttatgactagagaaaagttcaactctctttactactgagtattgaatgccagactgccagcaggaactatcaaaattttagttgtaaataaacactagctagtccatgtgcataccctacaacaaacactagctgaaaaataaaccttgagagatgctcccacaccctataaagtgccttgcattcttgtttctccagcaagaagtaactgattgttgtgaagaatggtacgtagaagatgtctgcttcttcttgccgccgaaccctgataacattcttcaaaagtctttgtgattcgggcgcaatgagatcagcccacagccaatagtcaatagaatgctgcatatgtgagcagataacaaatcagagattggaaaaaaagaaaaacatactgccgacaagtgaaacctggttaattatatccttccaaattgagatagttattccaggatcttaaagagaacatcagaagctcgattgacacatgatgtacatcactaagtacggaatctgtaatgttaaaacaaaattgagcattgttcaaacttcaaccgctgtcttgaaacacaaatgactaccaatttgtacagactaaatagcaaatgtaacaggaatcacaaagatgtctagcatcaaaaactacatgtggtcactggtcaggaatatccagagctcacttctcacaaaacttgccacaaaaatcaaaatctaaaactactctatgaattggatccaacccagaagcacatgcacctcacaagatagcatcggatcccaaatacatcacacggtcgtatctaatcaatcgccaatttttttagaaaagaaaaactatggtaacaagtccttaatgggatcagaatatatcaacccactaagatctaatgtatacacaagcttgtagcagtaacatctccaaaccttccaaagcatcagagaatacttgcaatgtcgcatcatacagtagcacaatgcttctcaccccaaaacagcaagcaatccacatcaattttctcaatcttgtcaccatttgcgaacaaaaaaaattcaaacccaagcacgctccactctccacgactatgcagaaagcagttcgatctgacctgctcgacgagccggtgcacggggctcccattggaggtcaggttggaggtctcgcggtacgagtccctgaacagccgcagcagatcgtacgtgaacctgctcggcatctcgtacacgtagaccctgagaggcgccggggccgccggccaggcgccgcccccgtagagcctttcctcctcctcggcccggatcgcggcgtcgaggtcgccgggggccgcggcgggggccgcggagcggcggggcgaggcgaggaagcggtcgagggaggcgaggaaggcggtgtcggcggcggagccggggccggagctagggctagcgaggccaccgggcgaggagggagagaggaggagggagtaggaggcggcgaggaggaggaggaggaggagggcggcggcggcgaggaggccgcgcggggaggcggcgcgcgcgcgcgcgagggaggaggggagctgcttccccgccatggcggaggcacactggaacactggaagcccaagacgctggtgtgtttagcgttttgtggtagttaaaggtccccatcgtttggcttatttcctaataagtcaaaacggcttattaggaaataaaaatgaatttgtgagtacaacttttataatgtgttctttgtgacttaaaagccaatgttgaaaaagaaactatgttgaaaatatgtcaaaatcaatcttaaaattaagcttgaaaatttaaaatttggctttttctttggcttattaggccatccgatggggctgtaagtagagaggctctgaatttttcatttttttcgagacacagatgcaagcgctcgtaaaaatgcgcatataccctctaatcctctattaatacacattacccattacccacccattacccatataaatagcttcgaagatttagccgatatatcttgatatttaaaaaataatcttagaaatctaattaattgagttacgtttacttcaagactcaaagatcagaaccaaattgcattgcacatttgcagttcagaactccatatttcagaattcattcagacaataagccaaaccatattgcagttcagaacttcatatttcagaaattcattcagtccgtcatgtgtgcaggaaaaaaaattccatttgcgcgttcgaaaaaaaaaagaaaagaaaattaaaggactccagcagaatgattattttttctatccaccaaataaaactgtcataatctgatttattgagttaactaaaaagtttattcgttctatccttaaatccactagagattgtagtcccagttaataaacatctcatatcgtatagccaaaatagcctaccgtacaatctatcacaaaagcctgtcacgaaacttacagtataaaagactgtactcaaatttacagaaagataaaaaaaacgccaaaaattaaactgttgcacagaacagaagccattgccatcttcagtggtagaagatgttcttctggaaattaacggtggtagaagatgttcctctggaaattaagagcaccagcaccatctacacaaccatatgaatcgactcccgtactgtcatccataacaataccatctgcagtaactcccgtgctgaaataattccatgaagaaggaggaatcatatgcaatggcataggatccaccaccgccgccgccgtcgccgccgcggccgcggcgtctcctccggctccgggaagagaagagccagggatttcttggtgcgacgaggaggccgagccggattctgacggctgcctgatcacaatgccttggttttgtggctgttcctcctgctgtagcttcttcggcttcttcggcttcttgctgcgttgtggtttgaacttcttggtggtaactttgttgtccttgttggtaactttgcacaacacccagtcgttgagctatttataaacaggagaaaaagaaaaaaaaaacacacagtagaattactatactcctactaatcgtcacaacaactattttatcaaactttttaaacctctggctgctcatcagtttcataaaatacaaatgtgggtacatttgttttaaaagtgattctataagcttattctaaatagaaaatatatatatagtcatgcgattgatatgatagtagctaacccgcatgggctcctcctccgcgtcgaacggccggttggagttggaacacacgaactcccacatcttccacggcgtcttgatcgcgttctctttcttcaactttggcgtcggcatgctctcatcgtattcgtgataggtgaggcatgccttgtatccaatcaacatgttatcgctgagggcgtcaaggacggcctcgttcttggtagtcgacttccaaaaacccaattgaccggtgcttcggctaggccttttgcctttgttgtatttccggtttctaggtgaaaacatgtaccagtttccttcgcggctgggacccagcttactcgctagaacaaaaaaaaaagtgtgatgtgttaataaagtgtgatatatgttaaccaagaacatggaaagatgcataaattaagcggcaaacttaaaaaaaatagtgtgataggttaacactaaaaaataatgtgatatgttaataaacagaaatagtgtgatgtgttaacacagtgtgaaatatgctaaccaagaatagagaaaggtgcataaaattaagcagcaaactcgaaaaatagtgtgatatatagcaggttaattaacacaaaaataataatgtgatatgttaatatagtgtgatatatattaacaaagaacagataaagatgcacagtttaagaaaaaaacaaaactaaaatatcatagttatgttaatactaaaaatagtgatatgttaatatagtgtgatatacatatatatgttaacaaagaaaaaaatgtacaaattgaacacagcaaacctactaagttctttaggatggtcggagtagacgtcgcagacatgcatgtagctgtagctgggcagctgctcgccgcgtagtttcggccggaggaagtcaaggataagttctatatccgacggcacgaaccggattccgggcacgcccaaatatctacgcgtctcctcctgatcctgcagaggttgctgatcctgaagctgctcctgattctgatttttgaggggaagaaactgctcctgctcatgccactcctgatcctgatcctgctgcagccatggaacgggaacaagctgctgctcgcgatgatcctccgacgatggcatcagcaggggaagcggctgctcgagattctcgagattctcctcctccggccatgcagaaccggccggcattgtgctgctaatctgcagctgctgactctgctgcggccacgcagattcggaggattcagccattgccgtcgacggagattcaattcggacagcgaatttaccgcgatttaagcgatctgatgagtcggaggcctacaatttaagcgatctcacgcacgagatcgtatgatagtgcggcggggccgggggcattcaaaataaccttttaaacacgaacgaatagtgtccgtatttatcacgactgctgtaattacattattattattacgtaatactacaaggcatatgtgggactcgaataacccaagcacgcacgagtggagctttatttgtgagtttgatgggagtacgtatgatctgtcagccaatcagctcatgaccaggccccatatgtgtgttgggctgggccggatgtcaatgtgaattttacttgaaaataatattagttcacatgacatcccttaactttacatcaagtttgtctaaggtctctaaaccacaatacataaatctctacccctcaactattaaaagccgtgcaaagtaggtcctatggtagtatggaccaaaaattcctctgattttgctgacgtgcatatggtaggccccacttgtcagcaaattttcaacggagtgagctctctcattgttgtctggccagctctcggacaacagcgatgacatcggcggcactaacgcggaggttgataacggctccatcaccagtggcaagttcgtcacctcgaggcgccccccccccccgggcgacggctcggctttgtggcaaagcggcgtcggcccatcctcaaggcggagcgacgacgcgtctcaatagatccacatattctgtggtgtaaaatcttggtagtatttaattagcggttgtaatggatcaaggactatgggttttttcacaatcctatctactcctttaaatatattcctaagctaaaagtgtatagaaattaagctctcaaatttttttaggctaaaaagttaagtctattaccacccttatatttgagagatcatggacatatataagagtaaaaaagaagaaaaaaaccccaacctgtgagacatatatgcatgaatagatctcaccctttcgaaggccctatatggagcacactattttttccccttttctattgactaatcaccttgaaacgtaactaaagtgttagtatttcagtttgttcaatccagctcgcgcatgattatttctccctacttttgcactgctgcactcgtcacgtactcacgtagagtgttgtgtactgaatacgcgattggaggtgagctatatgagaggaaaacctgcatacatacatacgcatcggtgaccccgacctatgaaacgaacgaacgatcagccgccgccgcccaatgacgacgacgatcgatctcgcctcttgctgatgagacgaggtcgccatcggaggaaattattggtgcaatggggcatgcacggtatgtgcatgcaacaatcgaagagaagaagagttcccaattcgatcacgtacagcgaaagcagcacgcatatgcacgtaggcggcagcacgaacgcacgcaataagggtgtgtgtgtgtggatgggatatatatgcaggcatgcttgcgttgtgcaccgaaaattttgtagctagctcatcactttgggaggtcaccttcttttgttggctagtaacatcagcaaccaatgcattgttatttagggaaagcattttcatttctcgagagaatatataattataaaaaagtaacaatgtaaattaatacaaatgtatcgttacgcaaatatacaagttcaaatttcacaacaccaaacccttataactagagcccaggtgcaagatgttataggctttaatagatgagaccgttgattttttatatatatgttcaattatttatcatattaaaaacatatactctattgttatattaaggtgatgtgtatatatatatatatataagttaatattcgcgggaaataatcacgattttgcagatgtgccatccacatctaataattttgcagagaggtgcatagatacatatcaggccggatcgatcatctatatgtagagtttaccttgcttgtccatgtaagtactcatgtagggaaatcaagtagtagtaccataaaaaaagatcaggtccgcaaattgaatgaatcgaagaaactaagtggctacctagaatggctattttggttaggggttggattatcagctaccttacataacaaagagactgaggcttctctctctctcaaaaaaaaagagagagacagaggctccgtacatgtgatgcacgcgtagtacgtcgtcgtacgatgagggaaaaatacacacttagactttggtgcatacactgatctgtatatcaaagacaaatcaacatgatgatgcctctctttcaattcgctatgcaatgtactatatatatattcatgaactcatgcatgcaagatgcgtgtttcaacgcatcaaagcacacgcatcggccacaaaatgtcgcgtttgatattgagctatatatgacgagaggtgtgttttccttttaagatttgtcggttaacactggtgctggtacaattccttttggaactattgcgacgaaataaagtggacttcattaattaaaaggggtgggtaggactgtatacaatagagtaaccaacacaattgtgttggtatagtctttaggagtagtatttctgcacagttaacagctactagttagatgtccttttggtaaattatagtctgacttcacttgtaatgatgatgttcttttctcaagattttggtgccaaactaatgattatagtttgagtcctactcaatttgataattgtaatttgacgacactgaaagttgcttaattatatgtattgacgatttttatgcttaaaggtcatgtttgagttcacttaatataaagattaagtatggacatataaaatgagaaaaccattcacatatgattaattaagttttaattattttaaacaacttacctacatataatgtttttttaccagacgtatcatttagtgtgctaagttttttttaagataatggaatataaaatctcagtctttgctcaaaagagttatagtcaattattacatagtagcactcagagcgtaattccaaacaaataaaacataccacaaaggataacaaagaatccaaactaacgtaaggagatcacaatcattgaagtctatttgtaaatctctaaccataattgacaaaaagttgcataaccgtagtctataacttgcgacatgcaactttcagaaactcttcatcttcatcacacttttataattgtgccaaaaaccggagccaataaattgccctgaaaattacctgtatatagaaaaatgatggtgatttagtgtgctaatgaaaaccaaaataaaatttatatcttacttggaataagaaggaccaaataattgctatttcttctcaaacatggtcgtaagcttctctcatctaacatgttcacaaaactcgatcgatgtgatgcattcatacaagagtttgagaaaagtttcatcgatgtgagccgcgtttgaatgatgcgcatgcggccatcgggccattgttcacaacagatcgcttgtcctgcccgctaacccacgtcagatcgaacgaataaacgcgtacgcctatctacgtaggttgatcgatctcgccggcgctgcgcctagctcaccagtcatcaacgcgcacaagctaagctagccaatgcaacgaccgacacggccgcccgcccacgcatgcatgccaccactagctagctagctgcttgacatcagtctttcataattagtacttcctccgtttcaaattacaacttttttttactttgattaatattaaactactttaaaatttaactaagtttatagataaatagtaatatttgtaacaccaaattagtttcactagatcaataattgaatatattttcataatattgtcttatagtagtttgaacgactataattttttataatacactggtggaaaaatcatctttcgtcggtccggcaaaatccacaatagtcccggatccaaaaagaaccgggactaaagattgtttttagtcccggttataaaaattttgatctaccaaccaggactaaagatgatctttagtcccggtttatcccttgtcagatgtatgtcaggggccgagaatctttagtcccggttggtgtcaataactgggactaaagatcaccactttagtcacggttggtactaccaaccggaactaaagattaagataatcttaccaaccgggactaaaattaaacacgtagtatataatccctatcccttatcctctcctccacacttatcccctctcctcagatctaactctcttcctcatcccctctccaactcctccccttcctcctctccttcccttctccccttcctcctcccccctcctccccttcccatccggccggccgg

SEQ ID NO: 17975 - DNA, 21986 bp, Oryza sativa
ggcgggcggaggggccgcggccggcgggtccgcggcaggcggggccgcgctcggcggtcgtggcgagcggcggcagcagcggcattggttttttttaaaaaaatttgtgatgattcactgagatgtatttgactgagaagttataaatttgtgattcattgtttggatctgtgatgtatttgagtaatttcttaggatattgtgatgtatttgatttgtgtgtataagtaattttatgatttgtgatgtgggtttggtgatgtgaatttgggatgttattttgatttggggatttgcctacttgattcgggagaaaataaaaagggaaaaagaaaaagaaaatggggaacatctggtactgccgctattgtctctttagtcccggttggtaacatcaaccgggactaaagatcctctctctttagtcccggttggtggtaccaaccgggactaaagatgtatctttagtcccggttatttcaaccgggactaaagatctttagtcccggatccttactcccggttgaaaaaccgggactaaagggggttcccaaccgggagtaaagatggtttctccaccagtgatataagtcgtttgattttaatcaaagtcaaaacgacttataatctgaaacggatagagtagtaaaaaaagacatagtacatgagaattgcgcacaaatttaacagaatcaattaaactggtgtactagatcatttggaattaataacatggaaggaaaatgggcatgttaacctgttttgtggctggactgcagccgacaccaatcgtgccgcacgcacacggtgtagccacagccgcagctgcagccaccgcaaacagcttgccgaacaggccattgctgcagctactgcacgggctgcagttacaagccagcaacgttggtatgcagtgcctcgtcccacctgaaggctgcagcgcagctacaacaacacctgcttaacagacccaatagccgtgctctgagatgaataacctaactatgaggctggtcgggagagattgctacggtcgtgtagccgcggcagcagcaatcacaacacaattcaggagcattggctgcagctgctagccaaacagacccaattcgtgtagttgtagttttagagcagctagccgcagccgtgccgcaaagcagaacaaacgagcaaaagcctctatttagttgagtaaagaaagtgccgacttgggttggggcggcgcaaaccactattgtacgcacgtatacgctggatcgaccgaccgactatacgttgtgtatacggcacgcgcgccgctctccaggtacatccgtgctgacttccagtggtgaagccagtatacaattatagtaaagactaaactaaagtggccaataaaaattaaaacatgtctcatataaattggctatatttctaatacaaaatataaatatatgaagtaaaattttagggggtataacgggggctctaatagtctattagggggtaaggggcccctagcccccacgctgtcttcgccactactgactactgctcctttcatcttataaaaaactaaaccaacctaatacaaaatatgatacatcttagtattacgaatttaaatatatctttgtctgtattcgttatcctaaaatatgttacatctaattctagattcatgttttatggggagaagggagtacacagcacagcaggtcaagtgttccgccgcctgatgtactccagtcatcaggtcagcatgagcagctacgactgacgagatcgagcattcacacggtcacaccttaactttgcagttgcaggcacatacacataatttgcaccagaaccagatcgagcattgcacgcgttttcaaagtccaaacacgtacccaagtacgtatgccgcgccgctaccaaatactactagatgcatcgtgcatgcatgcacggtctctttgcgtttggtggattaattggatcggcaactgcacggcaatcatcggtaacacagatcggggcggtgaccggtgatgtgtgatttctctgtaccagtattgacttgcttggggggtttaccggtttactagcaccctgctcctgctgcatgtacgtacgtacattcgacagggcgaatctgaagacttcagcaggttaactaacaccgatctcagcatggcagtgaggcagtgagcctgctgatgcgcatgcacagtatttcctcttttccggccagccagctaggcgtcaagtcgtaatcgtagcacggcgaggcagagcagatccttgaccggtgcaacattcgaccgagtgtgttcagtctgcccacatgggaggtcggaaacacaccgatgtcgtcgaccatcgctcagctcaactgctaccaccaccaccacgcacaacgcactggcctgaacaaatagagaggccacaagtttcggaacataaaaaggatgttttttatagcttttaggaggcatttggagtttttttttaattcgtagtatcggaggtatcgaaagataccaaattttatatttaaaaaaactacttaagtactgtaaaatcacttataacacggtggatatcaccgtccgtgctacgttaaaagtccaaacagctgaagaaatcaaagaaaacagcatatcaaacatgcgtaatagaggtgggatttaagatcatggagttgaaagggaggtgaattcagaaagtgaaaagtgaattcatatcgatcgggcattcggcggcgcgagcgcgatggtcaggcgccacttgagcttgggagtttctacttgcgagagcttaggcggagagggagggtggtgggccccacacacccctggctccggtgggacccacgcctccctcccatgaggattgcatgttctggatttttcacaatttggttcttttgaaaaatttatttcgcaaatagacctctgaaaaaacttatcttgaaaatggttctttttgggcgccggcgccagtcactctggcaccgtcctactgccaccgtggtggggcggcgctgaggtggcagggggagcgcgccaatgtggctagcgccctccccccggattttttaatttttcttttatttttttgatttttttcactcttaagagcacacaagaactaaccataaaaaaagttaaactcaaatggacgaaatatgtgacatattttcgaaagctctatcgaaaagcttcttgcctcgaaaacataatcttgcaagcggaatttagaggttttaatttcaccgaacccgacaaagcggggaaaccaaccataaaaaaattaaactcaaatggacgaaatatgtgacctgtttaatttttgaaagctctaccgaaaagcttcttgcctcgaaaactttttctgtagatgtacatggatatattatttgcttaattccgagtccgtatgagaaagttacgcatgttttgtgaaattgacacctggatgtaaaaaaaacacaaaaccctaagttttttataggatgtaaaagatgtaaaaaaaaggctagaatgttcgaaatctaatctacttttttttattataggcaaaaccaaaacaacgaagagcaaagaggaggggggattttcggtatagcgttggaaaattgtacaagtcacatatttggtccatttgagtttaatttttctacagttagttcttgtgtgctactaagtctgaaaaaaaatataaaaaataatttaaaaaaagttgtacatttctctcctctaccggggggtgccagccacattggcgtgctctccctgccacctcagcgccgatctgccacgatggcaggaggacggcgccctagtagaaccattttcgggataagtttttaggaatctatttgtgaaattagtttttcaaaaatatcaaattgtgaaaaatccaggttgcatgttcgggtcggagccccgagttgcttgcttgcttcccgcttctcgcgaggagaggggatgtgggccccgctgcctcatctcctgcgtgagttcgcgacgagaaactctcatcctatacgccccaatatacgtacgtcgagcggggcggggcccaggtcgcgcccaagtggggcccacgctcgcatcgcgtggcgtgtattggcgtcgggcccaccccacgagcttttttcgtgtgccaaaactgcgtgcggtctcggtcggtcgatcggtcccggtccccggtccctgattgggtcggacgacatcggtgactcgcggaacgcgacgtgtccatgtctcaaaaaactttacagggattcatcaggtagacagggaaagtttcgaaaagaaatctgaacatatatataaacccgtcggtcttttctttaatcgaacttaaacccgtaatcaaattagtactcctcccgtttcaaaatataacaaattttagcctttataatttgtcttaaaatatacttcttccgtttcacaatgtaagttattctaacattttccacattaatattgatgttaatgaatctagacatacaatatgaatgtgggaaaatgtctagattcattaacatcaatatgaatatggaaaatgctagaataacttatattgtgaaataaagggagtaacaatttatccactagttattcaccattcaatttcctcacataccttcacttctcaactaatcacaatcttccaccatttaattctaggaaaagatacgaattaccccctctcctgaactatcgcggtcgaccgaattacctcatgaaccccaaaaccagacaccattcaccttgaactttcaataccgaacaaattacctacgcgatgtacgcgacatacacgtgacaatccagtcaacatattatttattaaaaaaatatggacccacctatcatactcctcttccccctcttcctctctctctctcgcgggtctcgcagcggcaggcgttcggcgacgcggtccgagagggagcagcgacggtgcgggacatggaggcggcggcggcggcgaactccgggagggagcggcggcggcgtcggacgtagaggtggcggcggcgaaatactcctctgggagggagcagcggcggcatgggacgccaccacctccttctcgacgccgtcctgcaggctcatgtcggcggcggctcggcgccaggcgcggggttggtggcaggggacagcagcgtgatggtctcgtcggagatcttctcctggtaggcgatgatggtggactcgcgtgcggcggcactggcgcagtcctacccatgcgcggcggcctcgcaacggttgcgtctgcggcggcttcttgctccctcctcccgccacctgctgctgctttgccagttgacgagatcaaagtggacggggaaaagcggcgaaggttgaggacgagatgcgtgatgcgccgaggcggtcgttcttcacgtgcgccgcggcggggaggtgggtgttcgtcgccggctggcatgacgaggagaggaaagcgctttagtcggcgggaacgacaccgaggccgacgcatgggtgccgctcccggacatggcgacggagcgggatgaagccagggggctttgcgtcgacggcatgttcgtcggcggtggagacggagctcgcttaggcagccacgacggcgccacctccgccgtgcacgccttgctcctcgctgcagcctccaccatgtacggcttcgccgacttcaacgcgccctccacggcatccgcctagcgacgcaacccggaggatgatgacgaagacgaggaggagaagtccggtgaggggcgtgtcctcgaggcctgggcgaggggcctagaggagtccgtctccgccgctggccacccgggggaggtccgcctccgccgtgcatgccttgcgcggttgcgcctgcgcgagagtgagagagagaagagagagaggaagtgaaggtatgacatatgggtcccactattattttaaaagaaaatgctaattgggttgccatgtgtacgccaggataaaactgttctggattcggtcgaggggttaattcatccggtataaaaagtttgggcgagtgatatctagtttccgggttcaagggtaattcggtcgaccacgatagtttgggcgggaggtaattcattctttttccttaattctacctactatcttaataattgtgtccaactttaatgtgcccatcggttggcttatttagcgaataagccaaacgatatatttgtaaatgaaaaataatttatgaataaaacttttatatacgtattcttagcgatctaaaagtaaaggctgaaaaataaatttcgatgaagaaaaacctcaaaatcaactccagatttaaggttgaaaaattcaaactttaggtaataagcataagcataagcaaaaatataaggtcttaaaacttcttatattatgggacggagatagtaatagactatagtacctgtttgaaacactgagatcctatatttttcttttcccgaatttctacagaacatagctgaatgtttaatatagtcctgcatgctgtttttttgagtcaatcgtgcacggctatagctgggatgtactactactacttaagtctggtttagttaccaaatttttttttcttaaatacgtcatattgaatctttagacgcatacatggattattaaatatagataaaagcaaaaactaattgtacaatttacatagcaatcgcgaaacgaatcttttgagtctaattagtctatgattagccataagtgctacagtaacccacatttgataatgacagtttaattaggctcaaaagattcgtcttgcggtttccatacgagttatgaaattagtttttttattcatatccgaaaaccccttccaatatttgatcaaacatccgatatgacgttcaaaaatattcttttccccaacagggccttagctaagctgtgttctgtggcgtgtgtgatgcggccactgatcaagtattagcccttggctcgcattcgctgcgtgtgatcggttttggtcgcaggcagctggagtttggtctcgccgaaacgatgcacgtggagaccaacccaatccagatgtaacatctctccatcaccgggtcggccgagaaattcatttacttctttttttagaacgagaaattcattcacctacacagcacaagttctggccaaacaccggttaccgaaatgaactactaccacgaagctaaacgcctgaacgggacggaatcttgccagaatatgttttttaccttccctttttaccttggtaccaaaagaagttttggcatcatattaagctctgacaagatctgtatgaaatcctactgttgcacttcagaatggacggcgtacgtgtacccgtagtcctcgttgagaccagcggtaagtcgacgcaaattaaccaaccacagtagtactcgcgcgaggtccacagggataagcatgttgtacacacatgacatattgacacacggacgcagagttaatgttcatctctttggagtgagcactgatctgattctgatggcctcgtacgtcggcgttgctgctgtacttcaattccatttgcaaggacttttcacacacgctatagtactgtatcgttctttgcgatgagctgcgatgatttacaattacagttattactgtaaccttttcttttccttttttagggaactagtgctgcaacttttcccaaagaccaattccttccttttaggtggtctaggtggctgggatactatacccatctttttagaggctcaaagacgagttctttattagagcatgcataatagtaggctataaaccagctaaatattgaggtagagaagagaaaaggggagaagcggactataaacttataagcagcttgaacataagaaccaaaaaactctgtgaaaaagacaagtgggccatatattaatagtaaagagctaactattagggcacccgcaatggttatctatagactctctaccagagatccatgtcagcatatttttctacttggaaaagattaaatgaagagagagagcaaagctatctactaagctggagatagtctatagagaaaaacgagacaatgtattagagagctatagatacccatgtagacatactattgaggtgttttactattaatctagtatattgctgaggtgtacatgttttatagagagcaccttactttaccattgtgggtgttcttactccctccattccaaaatataaggcataaccacccttaacccaaaagaccaagaaatagttattatcatcttgtagtttggatcatcctaataaatataatacatgcatccaataggattagataacatgtgagtggaggatttaaaaaagtaataatttaatggagaagatgtcatagttaattgcatgtttgcatgtatgacttatattatgaaacatttaagaaaagtggttgtgccttatattatggaatggagggagtatatatataggctaagagactggtcgactgtattattagccttgatcttagtaccaacttcatacgcacgtatatgtaaaagcagcacttacatccagacgtccagtacttacgtatgtaaaaaagcaggcacttacatccagtaggaattatatagtactagtagatcggtaaaagtgcttagagaacgtatggcactaaaatcaaacaacaattataagagaaaaacaagccatccgtgcgtgcactagaaaagtgttcggagcaattaacctatggagtttagggtagaggaacagcagaaatctgatatcctaccccccacgcacttggaattgcattcttttggccgaaaggatatgaagttgtagccttgcagcctgagaagcagtgtcatttcagactttcagtgccctcttctgcagactctcttggtactcccttcgtaaaaaaaaataaaaaaaaccaatgcacgagtataatattttttaatactatagtgaatttgatagaaatatgtctaaattaaatgtattaggaaatgctatattcgtgaaaagatttgtttttttaggatgaagggagtatatattatagttgactccgtttgtttgtgcagaattatagtaaacccatcggacaccaccaaaattgtcttgagcaggctaaatggtcatgtttagttcagcgcaaagtttaaattttagttgaaattgaagatgatgtgactgaaaagttgtgtgtgtatgataggttgatgtgatggaagaggactgaagtttgaaaccaaactttggatctgcgcgttagtgtgattcggcaggcgtagcgaccgagcaacgcatgtgcagtttcctctcgtagcgggaggccgaggcgcacggggacgatcacccgtccaccaccacgtgcaaacccgtcgtcccgaaccagcaagcggccgcgcgcgcgcgcgcgcgcgacccactgtgcgtttctcgcctcgtcacgagggcttcgcgcgcgtcgttgcgtgttttagccgatcaaaaaaccggggcgcaccgcacgcgatgccgccccgggtgcggagtacgcgactacgcgagcatgcggaagcaaccggacaaatatgcggctacttctacggagtattttcctcgtagatccggctacttttaccacggattgctcggttgctccgctcctgatccgtggccgggccggggttggcttgatctcaagctgatgatcagatcagttcatgccctgacatgggtctatctgccaaaatttaaattttcacctttaaatttaggattgattttaatgtttttctatcaaagtttattttctagtctttgttttttagatcgctaaaaacatgtatataaaattttattgataaattattttttatttgtaaatatgtcgtttagaaatgatggcttgaattgggagggcagagacactcatcagagtagtacgaaggggaaagcgtaggtacgtagaaggtgcgcagaatcggtgcggagatataagcggtaagcgaggagcgcatgagattaccaggtgtggaaaattctctggatttttagcataaaggttgcccttcgctttgggcaaattggacctagtttttcctctctctgtgtgtagaatgaggagagatcgagaggtgtctcggctttcatcaagcggtatattcatcatcatttcgtccatcttctagctgacttatactccatccgttttgaaatatttgacaccattgacttgttagcacatgtttgtccgttcgtcttattcaaaaacttttgtgaaatatgaaaaattatatgcctacatagaaatatatttaacaataaatcaaatgataggaaaagaattaataattacttaaattttttaataagacgaacggtcaaatatgtgctaaaaaatcaacggtgtcaaatatttcgaaacggagggagtatacgctaatagaagcactagagtgtataagtggaggcattagtagctcaagtggtatcgtcttaataatagaaaaacagagtagtcgtttgtttttaagttgtttttttttcttaaattcctcctgatctcgttcggaacttggaaatatcacttcacaagtgacagtttgatttcctcttgtgtttatgcattattttgtgaccgactaagggcgttttcaatattctcattttctaacttatactttctaatttttcaacttatactttctctttttttcacgtgtatattttctaaaccactaaacagattttctttaaagtttatgcagaaaagtttcttaaaaaattatattaatctaatttttggctaataactaaataatcttcgctaattaatcactttgttttacgagtgataaaatggttttcaaccctcgacaccaaacacagcctaacatgtgctactagtacgtgaaaaaaatatgaattttcagaattcccagaacacacgtttgttgtctcgagaaatgaataattaataaatacatgggacaaaaatataatcatgctagcaactaaataaaaaagaggaaataaaaacaaattcaaccccagagagagagagggagaggaaaaatggggtgcccatgcggccctgcccaatagcgttgctgtacctttcagctttataatctcgcccctcgcgagagagactccccccatcctgcagactcgccccactctcttgctcagctcctcttcatccagtcctcaaaactctctctgatctctctctcttgctgaaaattctccgcacactccggtgggcttaagcggtggcggcgtctcgcctgggtgggcgagatccctctcttgctcgtccgcaaggtcgctccccctgcgagtccaatctactgacgagctgggaggagcaaaggagggggcaattggagctccgctcggttccaattcagccccaattttgagccccccggctgcggggttcggccaggttagctcctgttcttgcggaattctggctctttttttttttggggtggagaggggatgatctgggtggggtggggagtggtggaattctggtttttttttttttgttctttctttggctggttttgttccgtggggattgaattctcggttctcgtcacctcaggagtggtgttcgcgctgcttgttttggttgatctgtgaattatgggggaagacaccaccttttctctcgtttcttgcacttaaaaatcgtctttggtgagctgttgtgcttggggagctcttgagctgagcaggttcggtttaatctttgattgggttctatacttcactgtttcggtgttcccctctgccgaatttgggaatcaagaggttctgatccatcagtatcactcggcttctcgtcattgcatatgtacaaaacctgcttttttcaatcactcatgtagtcatgtctaattggtttgtcttttatcatcttttggtgtaacttgtctgtgtcactaaccatgccataatttttttttcatgggtactatgtgatcgatttcttcttcttcttcttcttcttcttttttaaatttttacctgtcataattcaagtagtagcagtagtaatctaatctaaagcttccaaattttccggtgtagttgagacgccatgtatcgggtgaagagcgagagcgactgcgatatgatccatcaggagcagatggactcgccggtggccgacgacggcagcagcggggggtcgccgcaccgcggcggcgggcccccgctgaagaaggggccatggacgtcggcggaggacgccatcctggtggactacgtgaagaagcacggcgaggggaactggaacgcggtgcagaagaacaccgggctgttccggtgcggcaagagctgccgcctccggtgggcgaaccacctgaggcccaacctcaagaagggggccttcaccgccgaggaggagaggctcatcatccagctccactccaagatggggaacaagtgggctcggatggccgctcatgtaagtcccgtcccccccccccggtgtttgatcccatttgctgtacgtatttgttcatactaagcagttgagagattgctgttcttactcctaaagatttcccctgagtcatggtcagttaaaagcttattataggtttacttgatcttttgcctaatctgatgatatgcgcagttcttcatccaccacctaacttgatgtttccagggagaattggtgtgctattagatcattttaattttagttccaagttgtagaattcgtttgtagtgattggttgattgcctttcttgaaggatacttttatgggtttttatcaagtgaagtattttgtttcacggattagaattgtattaaacattattttccttggtgttacttgtatgctctaaaacattaacttatatttttctagtgcaaggcagaaagttatcaagcttttggtttagaaattaggtttggtgatttttaaaaggactctcatgtagtacagtagcaacctgcatgaagccctactgctttcaatttccaaaattgatttacaattcttaaggttctaagcttagatctaagcataccgttcacttttacatgattcttctgtagctttatcttctcaagttcatctttgtcggttttactcctgcatggatgcggtcatgatcatatgggaagatgggcttaggtattcttcatgtgagtagcaaagaatacaaatagtgttcatcaccagctttgttgttactgagagcaagttgtgctacgtcgaaggttgaaaattgtttggtgcagttgtttgccttaaatctgttcattttggattgttcactgtgttagaaggggttgggaacaagcctagctaaattgtccgttgtctaggactctaaacagcatagttacaattcacaaggtaacataattgatatctatttcagtctgaccaagtagtgctattattcttcgcaagcttagagtaaccatctaaggcctttcaatcttgttaactttcatgattcacagaatcgaattaattttttgtcataatagtgtgaacttactgagtttctatgatttcttgaactgatcaaacttgtccacgtaatgatgtgagtgaaaattaggctgttgtctgccgaattatttcatatgtatcctgtgtatctaagtctttagagtaagcttatcatttatcctgaactctttgcacatattttctgtattttttcctctttacttacattgagcacatcttctcagttgccagggcgcactgataatgaaataaagaattactggaatactcgaataaagagatgccagcgagctggcctacccatctatcctaccagcgtatgcaatcaatcctcaaatgaagatcagcagtgctccagtgattttgactgtggcgagaatttgtcaaacgatcttctgaatgcaaatggtctttacctaccagattttacctgtgacaatttcattgctaattcagaggctttaccttatgcaccacatctttcagccgtttctataagcaatctccttggccagagctttgcatcaaaaagctgtagcttcatggatcaggtaaaccagacagggatgctaaaacagtctgatggtgtgcttcctggattgagcgataccatcaacggtgtgatttcctcggtggatcaattctcaaatgactctgagaagctcaagcaggctgtgggttttgactatctccatgaagccaactctaccagcaagattattgcacctttcgggggtgcacttaatggcagccatgcctttttaaatggcaatttctctgcttctaggcccacaagtggtcctttgaagatggagctcccttcactccaagatactgaatctgatccaaacagctggctcaagtacactgtagctcctgcgttgcagcctactgagttagttgatccctacctgcagtctccagcagcaaccccttcagtgaaatcagagtgcgcgtcgccaaggaatagtggccttttggaagagttgattcatgaagctcagaccctaagatccgggaagaaccaacagacatctgtgataagttctagttcttctgtcggtacgccatgtaatactacggttcttagcccagagtttgatatgtgtcaggaatactgggaagaacaacatcctggtccattcctcaatgactgtgctcctttcagtggcaattcattcactgaatccacccctcctgttagcgctgcatcgcctgacatctttcagctctccaaagtttccccaggttggactctgaaattcctcatccctctttgatgtgattattcggttatttatgatgtactgttttgcagcacaaagcacttcaatgggatctggagagcaagtaatggggcctaaatatgaacctggggacacttcacctcatcctgaaaacttcaggccagatgcattgttttctgggaatacagctgatccatcagttttcaacaatgccatagcaatgcttctgggcaatgacttgagtatcgattgcagacctgttcttggcgacggtatcatgttcaattcttcctcgtggagcaacatgccacacgcctgtgaaatgtcagaattcaaatgaattctgtatttggtatttgccagacgctacagcagattcttggtatcgttcttgctcattgtttggatcataacttgaggaagatctcgtcggttgtaattctgcattgctgacagagtccttgatggcatgcaggcactatcagatgttctcttatgcgactagcccttttgtccaataaagtagtgcatggagataagccggttaattattgttttcttttttgtattagagaaccctttttgtcatctctattgcccgaattctgttggaaattcgtcatgtttgtttgaacaatgtaagaccaattattgcatttgtggtgtactatcttgttgagcatttaccacttgccaatcaatagcaatttgttactactacacaccctgtcacattttctttttctgcagcctgcaaacctggtactcaaagccatagctgtcttggagataaacatactttgcagtgcactgatgcattatcatatttaggattgtccatggaaagcagcaatgctgtgccctccagttttggcttttggaatctgcttgctttagctgtggtggctgaagagaaaaggggccataagcctcggagatgaatgattagagctgacatatggtttcatagttggaacccaacacaagctatcatgtatgacatgatcaagaagttgcgacgttacacaattcgcaaaacgatatacctaatttcctttggtgttcttgtgctgtttttgttctttttgtttcataataccagtttcctttctttttctctctctctgtaccgcagatgtgttgaacattcagagctgtggcattctggtacttttttttttcagagggtggcattctggtacttattgttattattatcatttcacaggaagtacttgatccttttctcaaacatcacatccaatccttttatagctactgatagttttcgacttctctccctgccaacttgcaatttgtcaaaaaatggtttcttctctcagacctcctttgaaacaatggaacggagtattttatttttattttgagaaattgcattgattcttagaataatcctataaaattattgcatttcaaaggaaccatcagcatatagttctattctatacactttcttcatcccaaagtagataaaaataatatgagatgtgatacattttaatactacgaatcttaaataaatgtgtcacattttatattagatttgtttagtttagaatgaaaggagcaagatacaagctgcttttctggctcaaagcagggagaaaaaaaaacagagagcagaagtatatgtatactagttatatcagcacacatgtatgcgtgcgacgcgtgaccaccgagaagatagcaactcacgcgatgtgcgtgcatgccatgacttcgccatggggaggccaaagccacgacgcgcacgacgtcgacgcatcacgcacgcacggttcggttcggccggcgatcgatcgagaggttttagattggattacctttatttcttctctctgcggttgcattgcatggagatggaccctcaaccagctagcacacgcagctgacacacacatacacacacacacactcacagcgtgcagaagaagatgtggtattagtggttgggtgctttacgctgctcgctggatctggaattatggatgttgggtcgtccatgaacgcttgaacagtgtcaccagcggcagcgatgacgcaaggatcggccaggtgtcaggccatacagagataggagttgtgatactgcaacaggtaaactttttatttttgataactcataaatttatcgtcaacaaagttcaaggggaactactgcagcaatttacgcatgaaactagtacagagataggtcgtccgttttttttttaaggcggagggagtactaggtggtgttcttttcttctgtatgtaaagataaaaattaattttttttacataaaataagatggtattaacatataattgaatgagttttaattattacaaacttgaaaaatactttcaagttttcacaggaaacgcgtcgtttaacagtttgaaaagcgtgccataaaaatcttaatatttattcaactcttgttagagaagagaacatgaccctagtaatgatcaacaatataactctccgtcgtggcagtaaaaaattctcacggtgagaccacgtgcagtaataatactcctcctccatcttataatataggagattttggatgaatggtgagaccacatgcaataataatactactcctccatattaatataggagattttagatgaatataatacattatagtataataaatctaaataaatactaaaatttcttatattatcggatggagagagcagtaataatcgcggtaatctggacgtgggaagcaaagacgcaggcagcaatcacggcgtgccggcgaccccctcggacaccccggaggagcagcctgacaacatgccagcccaccattctcaccgctgtcgttaccctccccggctcccgcgaagccccgggacccaccgccccaaaagcacaccgctgggcccacctgtcagccgccgcccaccaccaccacggtcagacgcgggaggaggacaactgttgccatatgccagcgaaaggctgaaaaagccggcagcttcttccgctttccgccgccgccgctttcctctcctctcctctccgcgatcgccatcgccatcgccgcccaccgcccccagccaggcaccgcagcaaaccaaaccaagccgcatcctcctcctttccaccgccgccgaaagtggcggcagcccaaacctgtactactactactactactactactactactactaccattccactgcatacgacactgatttgaccccgtgggggacgaggcgaggcgaggccttcttgctctgcctttctttttctcctcctcctcgcctgatcagccaagattttcggcggttttgtttcttctgctccttggagctttccccgatctcgcttgctggtgctggtgctgctgcctgacggcgaaggtatgttgttttgcgatgccgtcgtagtgaaccgagaggctctgtagctgtagcggatgggatcgagttgccacttctgggatgcgttgaattttgttgcttttcccgatcaattggtcgaactgggggaagatctgcctgccccttgcttgatcggcagtaaaggtggtggtagtggtggtgttgtgggtgttcttgctagatggttttgctgggatcagattttgcccctactctgatattggagtagtttatcagcttatgggggttcgaatcggaggctttagggatggattttggtgtgggcgagggctggattcttttgtgccttgagaagttctcagctaattgaattgatgaacaaagaattggttattgacttgccttgcatagtattcttatgctaagacactcctaacctaatgcaattatagttctctaatggatctgtttgtgcggttagtatgtcgtgaagtcgcgcaattggatttgcctgatccgttgtagttgtactagaactatctgcattagttcagatgcctaaaaatttgtgtaattaggatggttagatttacttaacaaaggttctcaaaattctttatatgtataaattaatcaaattctgtcacctttcttactgtaactaatcttgcttgtgattttcttattctaggtttgtgctggaggctgaaagagtgcatgccatggcccttgatacaaaacaagttgcgcgatgtttgaagaaagttttgaagtcctccattaaagatggctatagatgtgtttctgaacatccaatccttttgacattgggtgttttgctctatttattgtatagatcttcaccagggttatttgctttcctactttcttcttctcctgtaattatgtgtactactcttcttcttggaatcctactgagttatggggaaacaaacctgcctgaggctgatgaagataacaagatcactccagagatttcatccttaaaggttggaaatccttccagtgattttcactttgaagcgagccagagattaccagtgcctgaattgagggaaaatacaactggcttcaaagagagggaaactaaacagacggtttttattagagagagggctagtgagcatattgagctggaagataatgtcccccttctgagaagggttgagcatgaatacgatagatttgatcggcatgaaatacctgcagcgttaacgccatttccctctatggtcaattttcatcaaggttctagagttggaaacgacttgagctctaatcaggacatcaactccaaaggtttgttgtccattaaggataaggctgatgggcacactagcttctttgaaggtgttcggagtggtctggatgagaaagaggcaccctttggcattttttcgaccagtaagaatgttaatggacgtggtgaattggaggaaaatttgaatcaagaaacagtatttacagattcaacagctagcagagtgagagatatttctgaagagaaaccaacggaaggggaagctggaactagcaaatcagcttgtgccatttccacgcatcagagtaaaacacttgatgaacttaggattaatactagcaagggttttgaggacaatctactcgattcctctcttggttcaccatgggcaagagttggtagtgaggacggagttggagtgatgatggttcatctggttttgactctgatcaggctgagagttcttctcctgatgcttccatgactgacattgcacctattcttgatgagattgacccgctcttgggtgcaagctctactcatcctgatacaattccaaaggatgattcggacactgattcacatgtttcctcacaggatcatcaaactgatgatgatagtaatgatgaaactgacaataatgatgctaaagagaatggtgaggaaaagaataaagaacaaggaaaggaagctgcatttatttggacagcagatgatgaaaaaaatctgatggatcttggatattctgagatggaaagaaaccgcaggttggagcttttgatggccagacgaagatccaggaagaacataaggtttgaaatcgacaatgacttgataggtattgataataatgatggtgggaggggtgttgacgacttgtctcgcttccatgtacaagtaccacatatttcagttccaaggaggaatccgtttgatcttccttatgattcagaagaagcggcaattctggctcagcaccctcagttctgcatacaaggaaaaacccattcgatcttcctcttgatcagtccaatgatggtgatgtttctgcagataataatgtaaatcctggagaattagtgaaagcttctcatcgtgacatgttcttccgaaggcacgatagcttcaacattggaaggacagatgctaccctggagagattttctagattcaagccatattttgtccccgagacagtggaagggagcttaagtaatttccaaagacagtttagtgataaaagtgagtctaaattgagttctgttactgaatctgatttggcctcttcagttgccgatcaggaggaccacaaggacctcgatgaaaaagatttgcccaatgagcatgggtctccagctctgcagagacaggatagcgaccttgcggatgttggaagtgaatgctcggatggcatcaactccgtggatgttgaattagacaacagtgacattgatgatcgtgagattgctctacaacactttgtctttgaaagatcacaggaaagagaagcatatctttcctcaacaaaaggaaagggtcctgaagatgattacctgctcagttcagttgggaactccaagacacttcatccagtagctgacctgtttagctgggaagatggaaatggtaagaaaatctgacctcacagttaaacaactgaatatgtacttgacagctttatttgaatcatatttcttcagctatgtgatgttattttgtaatttcagctttatgctgaaacattttaataatggcatggctatgtccatctcatgatgtagagtcaggagttctcttcaattatctaaaaactaccttcttgtgcaggtgaaagcagccttggtgttaactcttcccataacatgtcagttgaattctcggactgggtttcatcccccaagccaattgcagagcatgattcaggaccagagaaccttcaggagtttcttaatactgaagttgcatcaagttcaaagacaattgttctaggcgcaagaaatccagctgaaaataatggaaatgttgattccatatcctattcaaacaatgaaatgccttcagataacttgggtcatgggtccatggagttcccatctgaattttgtaatgaatcactgccagtaatatctagggacttgcaccctatccctgaagagagggttgtcgagaacttcaatgtgcaagaaaagcatgaagcagtaatatttaccgattcagatgctgccttgactgggtttcatgtaattgaggagcactttgaagttggatgtgatgtaagcccgagttctgaagttgttccgtcatgccttcaagcaagtgattccatccaatctcgattagttgagaataaagaggtatcaaatccattcatttccatcgcttctgaaaccaacaaggtggatatgattgatttgaaggaagaaacagctgcaggatatccacttgattctgatgatgatgctgataaaatctatcctgagcccatggaggacaatgtaattgatgaaagtttcctatcagaactggatgcggtaggagatttccgggtagaagcaacaagatcggaccagcagatgcctgatgttgactcccatattgataa

SEQ ID NO: 17976 - DNA, 744 bp, Oryza sativa
aaactaacacagagatgaagccactatttgatgagacagaagcatcttttgtcaatgcaccaatagaagcaaacttggtagttggaccaagtaaagtggatgttgctaatgagtctgagttaactaaaactgatacaaacatgatcgttcttgatgccaattctctggaggatatagagacggcctttaaacaagcaagcaatggcgttgttgagtccaccgtggacaatgaaaccccacaggtttctggtgttgatattgacccagaatccatagagagttctgaacattggatgtcattgatgcaaaatccgtcgacgacatatatgctgctttaaggagcacacaactgctgctatgaacagttccttcgaagaaaacgaagacaagcatggatgcggtgatactgtaaaattcaccatgcatgatgagcttccagaaggaacacatattgaaggtaacacagttggagatggtaaagagcctgaaccaatggggattacaagcagcatggatgtcattgatgcaaaatccatcgatgacatatatgctgctttgaagaagcagtcaagtgctgctgcgaatagttccttcgaacaaaacgaaggcaagaacggatgtggtgatactgtaacattcaccacgcacgatgagcttccggaaggaacacacattgaagatagggataatacagttgaagatggtaaagagcctgaaccgattgggactacaagcagcatggac

SEQ ID NO: 17977 - DNA, 14869 bp, Oryza sativa
gcccatatcttagtgttttgtaagtctttaatcagttattgcccgcatcagggtcatggtagccccttccaccacaagaacatggcacctaaaatatcaattaatagggtggctaaatgcgcgcaaagaagcgctccaactcctgggtgttttgtaagtttagtcagttatcggccaccacaagaatatggcacctaaaatatcaatgaatagggaggctaaatgcgcgcaaagaagcgctccaactcctgcagcggccaccacaagaatatgtcacctaaaatatcaatgaatagggatgctaaatgcacgcaaagaagcgctccaactcctgcagcaggtatctcttgatagcaaagaatagcatttttgaaacagagttgtccagcagatttaccaagttatccctgagtatagtggacgaggaacccttctttcttcccaatcaataaggtaaacccagggtaagcctagcacaaagttagtagtaaagttggagaaaccaccttgacaatcaaccactttacccactttctccaagttgttgtgcacttcctttcctttgcttcgaatttacaagagagcagaaacaatgcaatataactagaaattgatgcacctatgctgaaaatcatagtcagtccagaacatgttttttttattatctggatttgtctgactctaaatgtcagaaactccttgatgaagctgattccataatttatttgaccacatcatgtggcattcccgccaatagctcttttatcagccacttcttgacaggcaatgacatcgagaaaagtgtgctctttaattcattgaaaagttccagttgattagtcacatctcgagcttcctgttgcccagttggcttcttaagttcctattgcataacatcaaatgacaaaatgtttagccaaaacatcaactgagtttgaaacctttaggaccacactgtgagcagtgtcaagatgtttagccgaaacaaccctaagatgcatgccctgtgacttaaaccagccatcattgtcttttagagcttggtgtgcattggtccaatcttgtaataccacgactgcattaggcccctcaatagcaactaatggtagctctccataaggaagaaatgctaacttgaggtgaatataatcaaactcaggatccagagagtgcacgaggagggttcgtagtgtggtgtcggcacctaggaggttgaggaaagataggtcgacgtcgctggtaggatgcactgttagcttggcaaggagggcatggagatcattgatttctttcatctttttcacttagaacctattggatggaaacctgaataagatccatattttgttggcatttaaggtagaaatttgaacaagggtatcctgagaaagggaataacattatactcattttaatttcttattcaatttcaatgtttaagtttgaactagaagaaatcagattcgaatgttttcctagttgaatgaattctataataaataaaatgcatctcagaccaataccatcatagttgagtctgtcaacagtacagattacatgtaatgatgaataaaattcaagctgttgttaatagactacctaaaagctctcactcaagaaggggataacaagatgaacaagtcaacaagagtagaatagaaataataaaaagaaactctacctacacagattataccggctacagcggctgaaatgccgaattgggaagaggcggagaagaggttggagttgtacctgcagctggtatggaaggtggcgaatgcagggtgcacacccaagacaaaatctatcttctatctattatatactaaaagtccattaactttcctacaaacgctctcaatccgccacgtgtcagccctacaaacactcctagaccgccacatggcactgtataatctcaccgtcgattttcacttaaattggtggatccgatattttagaccattggattagatctattatttaagaaaataatcccttcctctgctgtgggccagaaaaagaaaaaaaaactacgtacgtacgtgtgacttcgtataaccgtgggccagaaaaagaaaaaaaacataagaacgtagtacgctctccctgtctcttcctattcctattcttttatatctccatctctctcctcctaattcttttatgttatcaaattaaaaacgagttaagttgaccataatttaaatgtacatagctaatttatattctattaaaacgttgctctatttataattaaattgacaattttacatccaatgttttgctatatataagcaatttgttattgtggtatagactgtgcattttgcaagtttgcatgccatctaaataaattaaatacttattaacaacatatattatatatctatctatatatctatctattatatactaaaatatactaaaagtccattaaacttcctacaaacactcttaatttgccacgtgagactcctataaatattcctaagccaccacgtggtactctaataaattagaaaaaatatataacttgaactggtgagccaattggatttatctcataaaaaaatccttcctcaactactaccgtacgttctcatgtccttcccctcaatcccttctcctcatctctttccttttttctgtatggtagttaagatttttattttattacttaataattaatttcttcacttctatctcaccagaatggttgtggactcttgattgcatgtcccatgcctaaatatgtaaatgattaatgatttgatgcatgcttttataaataacaaatctatttttaactaaaaatttagaaaaaagataatagttacatagcaaaataatcataattttaaaaagttgctccctctatttcatattataagccattttaacttttttcttaattaaatttctttagatttgaccaaatgtataaaaaaattttaacaacatctatcacacaaaattgttttgttagatataacgttccatatatatccataatatgttttgaaaattttactatattttctataaacttggtcaaacttaaaattgactaaaaaagtcaaaatgacttataatataaaacggggccagtatatctgtttttatttagtttgtttgaacggttgtttcataattagacagctaaataatttaaaatcagtattaccaatatttcactataaaaaataaaatatgttatttgaactgccacctattctttacataacccaaataacatcctatttttaatttatttgaactgttgatttatgttactcatattttaccatgtaaaatttaaaatacgtaatttgaacatagaccaacaagcaaacaacactgaaacattaaaaaattgacaacatgtattatgtcatcttaatcattctacataataaaaattagaaaaatacaaagtcaccatgtatgaccttttagagacatgttaaattaccaagtgtcacattttaaaaattagtaaaatcttatatattaaaagaaaaaataaaacatctagctaacggttttcacctagatcgatgacctattaacattatatcactacacacccaatccttcccgtcactggctcaagctctacacttttcattcctcttacgttcctatttaactaaaatataaataatctataattataagtttcatgtctgatttctaatctaactattgcaatgtttataatcaaaccaacgatataagatccatatgcctatagtttaacacaatcggcctagcctattacttacgattatctcaaatacagcctacgatacatgcccacgcgaatgcgcgggctaccttcctagttgttgtaacttgcaagaccacgaagaggctgaggccaatgccgatgtcgaggcagcggggcagaggctgacagtgacgggtttctttcgcggtgcggaagaagccgacgccctggaggtggcgtggaagagcccgaggccggcggcgaggaggagcctgcccgaggccgacgtagagcgccgtcgtggaagagcccgaggctgacggcaattagcgacgctgagggcagcctacgacggagtccttgttcttatcacggcgccctggaaacggcggcgaggagcccgaggacgacggcgagcgccgcggaagagcccgaaaccgacgtagaaccgaggcggcgagggagaggtcgaaggcgctcttgtacttatcgttgtcgagcggggaagaatccaaagtcacgggagcggctaggagtagtccacggccgaatgcgagaggaggcgccggacttacgcgggtaggacgattttggtgtggtggggtttgtgaggtcacgactcacgacacatttattcaagtagtcggtggccagaacgtggaaatgaaataataggaactatagaaacattgattggaaattggtaatttggaaattcgaaactcaaatggaaatttaggatgctagtagtattgctatacaaagagcaaacaacagaaaatggggttgcattgcggtggacatttcatcattctaaacaggattgaagttgctctgcttgagagaaaaaaacaaaaatgatatatttgaagcagttgatagaaagacaatccactgcaactcaagtagactatctagaaaccgttcatctccagtagatatgttcgtctcttcatcagcgccttcacagcaaatctgaaaggttcatcgaatgcacttgaaacaaaagcttcagtttccttccgactgctgtgaccaccactgcctccatcattggagggtttgatcacaaccagggtggcaccttgcaatgtcatgccaccaggtagctcaaggtatggggcatatttcagcttcatgttgcaggctgggacctgagttctattggaacatgctgaggctgacagtttgttttctctaaactctctaagctgctccatccccatgtacaatgtcccttgcccatcggcatctgctaaaaccaagctcctcaacgtcggatggtccttgataattgaccggagaagatagtgtcttgttgatgcagcaatcaaagagctgatagtccacacgacacgaagtttaagcccgccattggtatagaaagattctggcatgcttccattatcctctaccgacgactcatgctctgcgcctataggcttgcgatcgaccagggtacctcccagaatcacacaattccgaagtgtgctaccatactcagccctccacttaagcagaacaccctcctcggtcccaacatctcccgagggaagctccacccggagattccagacatcagagaaattcctaagcacatgtaccggtgaatgctgcgcaagcgggaacaacggcctgcccgtgccattcaggttgcgcatactgtggaatggcttgacgattgtgaatagcataagcttaaagaaatgggagaagatgttctttggcttcgccgaagacaggttgagagcatcatcagcatcaccatctgtggccacgacacggtcaatcttgacatacacatcggaaaccagaggaacaagtccgctgaaccgcttcgacacggcagcgcagcggccaagcgaacgcacgtcctccagcttgttcagaatcaggaggacaactggatccggcaggcagtcgaattggtcgaactccggagccgggtctgcgtggattcgagccctgggatgcattgtccaactcaaaggtgagcacctctttattcccacgacaaatcaaggattccctcttctgctacggcttggtgtaaacacttctgctcttgaaatgaatcgtccagccaactgaacagcccgttcgaaattgaagcgatttcctgaaacaaacgcaacagtaaggtacggacacaaaattccgcagggaattaccatgatgaactgaataaatcaacatgaatcacacaaaatcgatggcagccaacgtgctgaacagacaattccccataccaaatgcttaaaattgataataataatgcttctgggcgaccagaagagctcaactgcaacagggattacagctccacagcataaaaaaaccaaagtaatccaagaaagtacctcaaggccaccacgagcctgccgtcgagcagcttcgcggcacccttcccagaaatcctctcttccgccggatccaactccggcgagcccgccgcagcttggaaaaaccacccccaagaagctccaggaacaccaccaactcccctctgggagacacggggaagcgaatccgcgcgagggggagggtttagaggggagcaaggaggcgtctcggctcgaggggaatttgtgcttcgagactcgactactcgagaggcggtttctatagcgtagcgagaagcgtgccgctaccaccactccaccagcagctcagctcgacgccgctttaatatacgcccttcccacggaggtaacggccgtctcccggactcggtaacggcgtctcggggagggataggctcgagaggtgggccccaccgagcagcgacccggtccgcgacttgcgcgtgcgttttgggcggctttgcacgccggctggtcggcaagtctcggattggttactcttctggttgttccttttttgtgtgtgtggccaattttaatttcatttttgtttggcacaacttgtggttacaataacgcttggagaaaaaaaaacgcagtaagactgtctctaacaagtgacccataaggacacctaaactcaaaataggtctccgatagtactatttcagtctccaacagagtacctatacggaagacccattttgcgtgctataagaggcataacctaaatttgagtatcctctctcctgaagagctatttgcagtaagagttcttttttaggttttattattagagaagaccaaaaatagatattgaactatttgacttgactgtagcgctatgtaaatgtgaaatgggtcttgtattttgggttttattgttagagatagcctaatgaagcctttggagtttggatcatcttacgacgacgtgcgcatcgatgtttttttagtttttatataagcttttccaccatgcgtccatttcaccaagcataccgtgcgtgcacagaaacgaataccttactcaccctcacacgtactactacttagtggttcggttcaggtccactctgtggatgattacgagtcggtggccgtgctcccatagccccgtgccacgagagccacaagatcaacggacagtggcaggggcaagtgaaccaccacccccaacacacgcgcacgtcaaggccgtagcatcacccccaccccccgtgtcgccacaccgccacggtggaagccggggattgtggcgcgtcgtgacggctttttgtcgcttcggagcctcggatggcgaagcctcgctttccgcccgtccgtcccggcccgcacgcaccgcacacatatgggaccagaatcccccccattcctccgtctccgtgcgacctttgcctgtcaattccactgtagctggggacaaccactcacccggtgcgtgcctgcctgccttggttggtgcatttttcctgcacagtgaacaccgtgacgacggagcggccagttgcccagttggatcgatcacaacccgcgtgcgccgcgcagtacccggcatatgatatgacacggtcttatagcatcccagcagctcctctatctagtcatccatctgatatttggagtatggaagagaaaaacagtgctccagtagagtctctatcacatactccattttttgaggtcctccaaacctagcccttcctaagccaaatatggaggttctctctcctcactccatcctcaactacccacttcccaagatttttttaagtggagaaaggtgggaggaataggagtaaaaatgtgtggtagttgaaaaatattagtaaaatataggatgttggtatatgtaggatgtaatatggatgatctgttagagtgaaaagttatatagggtgagaatctttttatatggctatctaaataggagtatggaggatgaaatttagatgagctactcggatgctcttagccgatacaacgacgatgacgaggccggcattacgacggcgagtacgagcgatcgagtgattgattgatcggtccgccggcgggccgcgaccctgctgcgcattattgcggaaaacgaccctgcccctaacgcgtcactcgctcgctcagccgtgtgtactctcctcgctcgccggctgcacatgctgctgccgccgccgccgatggcaggttgggtttgtgattgtactactgattaagtgattattagcctctgggaatcttaggacgacggttgtctacagcgagattaaatgattggttaagagactctctactcgtcaatctcacgccacacacgcacgcaatggatagtactggcgccactgcggacgcttatccaaccacaactactccacgtgagggcgtgaggccgacatcgtttagaatagtgaagaacataagggacatgatgatgatattaaaaagccgggattgtttcgtggagccaggcttgagctttgacgtcgttgctttcagaaacaacacacaggcggcgccgaaaagtgatgtgtttttttctcttctttttcttcggcggcccttgattttgttccattatatcccgccctgaaagtgaagctttttctgtctgtagtctgtacatttgtagtatatgagaaaaggtgagtacagttgtgttgtctgaatcttttgctcattgctgcacctctactcttttctgaatcttttcttttcttcgttttgggaagcaaatgcatatgggtcgtcgcgatcatggcgtcgatcgttatgcagtatctttgtctgttttttagcaccacatgcttctggatcgagatactccaactcccttcattttttaatagatgacgccgttgactttttctcacatgtttgaccattcgtattattcaaaattttatgcaaatgtaaaagatataaatcacacttaaaatactatgagtgataaaacaaattataacaaaataaattataattacgtaaattttttgaataagacgaatggtcaaatatgtgaaaaaaagttaacggcgtcatttattaaaaaacagaggtagtacttaattagtatggaagactctactgttacatgtatctagttgactgagtatgaatcgaatcatagtgcgaaaatcaatttgtcattgtttaggttgcagtgtctgcacagttcagggtttcaggctatcaatgattcagaaacagatttctgtgacatgccagtgcgttggctagatcggagacctcagacactatctgattagaactagtagtagtagtattctactgtgagccagtgagttaggctaaccgcaacatccaatccaaaaaaaaacaattcatcctggaaagcatgtgtctgctatgctatactatctcatggaagaaaggaacgaaacaccaacccttttctttaaaaatacacaacttgcagagctgctcctttcaatctttttagacgtcatgtatactaccgagtatttcaggtgtctctgtaccattcagaatttcagatactgtggatatgctggcaaaagttttaaaaatacaatgagcttacatgggcactactgaaccacagctgcttaactcagtctagtagtctcgcacgcacaccacgtcacctgcatttcccgtccaagctcttgcctgctaatctatacactaaaattcaaacgtgcagaaacagaatcaatcatagataaaaccttatctgaattgatacattcgatcattggttgatttgcagcaataatgcaatttccatgacatgtagtagtagtactgcagtgtggcatgcatgtcgagatgttgtcgtctcataggtgtcatgactcatgacaatgaagtggtcgtcttctcagtaactaatggagagtattctagtaattattagtattgcaggcaggaaaatttccatacacgaagtgtacacatcagggatcattgtcttctgctgagaatgatttttgtttttcctttttcttcttcccccgagagagatctccagacctctattatggcagttcttgtagaggaatcaaagtttccctgttgtgagactctgacgtgacaatttcactcttacagttcggataaaaattcaacctgtttcacagaattgatgacacgaattttaattaggacaagtacgaaggtcctgccatcttgacaagtcaactgatttgtgatttgcatcctaactagcagatttctcggcaaatattcccaggaccacatctcaatatcacagagatttttcttcgggccattgcacaaaatgataaggctggacaattcttcatggagccgcactaatgtcttgagaacaaatctgacaaaaaaaaaagagataatataagaggtacagattaaggaagagatgccgacattttctctggtatggtcgggatgatcagccggccaggacgtggaagacactaccactagctgtgcggagattacaacaactaattaaccagtaggcgaaaaaagacactagaaaaccgtggtctcaatgattacctcttctgatagtctgacatcacagacggaaatggttctgaatattcgatcattcagtgttgcaagagttaacctgcagcagcacacatctgagtttttcagcaattcacggcatgttgcagtgctcaggtctatacttgtgagatcattcagtagtgtttgtgttccattgccaatctgatcctattcagtttcaaccataaatcttgagtttatgtacgctggaaggagcatacgcgttgttacagttctgattgctgaatgttcagtttttttttttttgtcaagaatctgtgtgagccttcatggttataaagggcatcagcaatcaatgggattgtgtacagtactgctaatgtagtagcagtgtttattgccaaagcaggtaataagcgtgagcctcttatcagttaaagtaactagcagaaagaccacgtaatgtgactatgtgagtatgcaagagatgggaaaataaggtgggatccatcttcaaccaacctatcaaaagtcttggtgtgattaaaaaagtgagatgaaacccgtcataacatattttattttcttgctaccaacaataagattataagactgtaaactgttagtaaatatttgctgctctcataatatttgttacctggtaacaagtagtatatatttagtgcttactacttactttaacactatattgtgaatgtcctaaatgggaagcaatgccagagaaaaatattggatcatccaagttcacgcgacattcctgattgtgttcaggcaaaggcattaggcatacacaaccaactcacgcatttcatatgtgagaaatgcacaggaaaactacacattagcacacatacaaatccactcacattcaaccggtgagttatctttgaacaacatgcgcaaaaagagaaggcacgtatcctcgaggtacaaaaaaaccaccttcgaagttgaaatataaactctatacaatctgctttaggtagcactgttcatgtactagaagaacacaacaagtgccaaaaacttttttcttctcatttgtaaagaacacataggtgcaactcatgaacatcacaactacaacacgattttggcattaggatgatcaacattactctatcaaacccacgaacagatgatgattacagtaaaacatcattgaaaaagcacagcaagaatccattggtgccaaaaaactgcatgttcttcttctcctaatttaatcaaccgattactccactgttcttgcttcctcatcagtccttccagaagaggaaccgcgccttcacgcggcacgacttggacaccaccttggcgtcggcggcgagcctgtccacgaccaccgcgcaccgcaccctcaccggcacggcccacgtcctcacgccgccgacctgcaggcgcacgggcaccttgacgtccacgtcgaacggcaccgaccggagccgccccgccgccgcgatgtcgccgagcaggcgctccgagaaccgtatccccaaccccttcgccgtcgccaccagcaccgtcacgttgcgggggccctggtagaacgccggccacgcgccgtcggcgagcctcacgccgccgtacgacacggcgacgtggctcccgccgccctcgtagtgcacgccgatcttgccgttcgggttgtccgcgcgcacggtggcgtcgaactccggcgagaacgagacgggggcaggggcagcggtggaggaggcgttgccgaggatgccgccgaggccggacacggcgagggacaggagcgtgtagtccggctgcctgggcttgaacacgaggtagacgacggcggcggaggccgcgagcgcggcggcgaggaggacgagcgcgaggaggagccacgagcagacgcgggcgcaggagcagcgggcgcggcgcctggcgcggcgggtgtagtgctggaagaggcgcgcgttctccggcggcgggacgcggaacaccttgtccttgggcatctgcaccacgtacgtgccgggctgcggcgccggcagcagctgctggtaccgccgcgcgtcggcgggcggcggcgccgccgccgtcggcgggaggggcttctcgaagtggaagctgtagggcgggctggaggaggggtcggaggaggcggcggactggttcatctcgccggagaagtcggagctgctcgccgccgccgccgggtggacgcggccgtgcggcaccatcggctgctcctcgaggcgggcgtccgaatcaatctgcgcgttttatgcatgcatgcataagctcaattagtcataaattaaattttgttaaaaaaatactaaagtgatcgattcatatcgaacggtgtcgatgcgatgggtgtcagtgcaaatcaaatttaggccgtcgatgtaatactgtaccagtaccatttaggaatatcaacgaagagttttcacctaaaaaatctaaaccagaactattgatttaatttaaagctctccttttttttaaaaaaaaaaagcaaactgtctatgttctttccaccaataaaacgcagcaatataagagtattgaattttgcgaaggccgaatctgtgaattatgtgcatttctgtatagttgtacttccagattgaccatttcagttcctgcagtttttttgctcaaaatgactgttgatgcaagccatcgatcgactgcaatttaaggccatgcatatatacagtgtgcaagcaaaacactctctatgctctagctctggacaaaaacctttacccaacattccaaaaacacgagctttgatcaagagaaaccaatatatacatatgcagtacataaccacattcccaaagttcaaaaaacggcgccaaatcagatcagaaaaatcagaagcgggtagagaccaaaaaaaacgaaaaaaaattaaagccaaaccttgcacagcttgctggacgagaccgctcgtcgttctctcctcgatcgatctcgatgtgttccggaatttcttcaggattgtgattgcgaagagaggaaggaggagacggcggacgtgcgaggtggtcaggacagacgccggagagagagagaggcggtagagtttggaggcggaggggattatataggagacgcggaggtggggccctgcacgcggatctcgcggggtcgctgacaggtggggcccgcctcgggcgtgcgggtgcgtcgcttcccggggaaggaaacgggggttggaagttggaaccgtgtgcgggagacggggtttatggaaaaaaaaccctgtcgtctggttgtcactgtgggaaaggagtaaaacgaaatcgatctgcaaacgcgggcgaagcgtgttcagatcacagcagtagagagttgagtagaatacacggtggcaaaacgagaaaaccattaaaataattaattaagttttatttattactataacttaacaaatttgatttatttgatatcgtagaataacttttatatagaaaggtttggcataatacatactccatctgttccaaaataagtgcagttttgcattattcattttcaacgtttaaccgttcatctaatttaaatttttttatgattagtatttttattgttattatggatgataaaacatgaatagtactttgtgtgactaattttttttagttttctcataaaaatttttaaatatgacggaccgtccaacgttggacgcggatatctacggctgcacttattttgggacggaggtagtatattttaggcaaattttgctacaggacactccttatatgtggttttagccctaagacactgcccaaactcacttttggggggaaaacactccataaacgtggtaatttgccagtggacaccgcgccgattaaaataataatttccgattgaagaggagagagaaatcgtgtgaaatgtcaaaaatgcccttgggtccacatgtcagctctatctcccatctatcttctcctcttcctgcccacatgtcgctccccgccggtcgccgaccgtgcacgcgtagacagcgacagaggcaacagcgagcagcagaagcaccccggccctccggtggcccaccaaccgcagcgcgcggtggagcagctgcagccgctccttttccctgccgcctcgcaaccctcaccccctgcccccacccttcctcccgccgccggccgacgcgagcaagtcgtagctcccgcaccgcatccccagcgccgacgccgagccactcatcgccaccgccaccgcctttctctcatcccaatcgccgaatcacgacacc

SEQ ID NO: 17978 - DNA, 20020 bp, Oryza sativa
tcccattgagacggtgaggcctttcttattaagatagttggactgactttttctgtgttatgtaggtcagtctgtatatcacctccatattcatcttctagggggacgtcagatgaactggcctcctggataagttgtatattcccaaagaggtgctctgttatgaaaatgtaaccggtaacattctctttatctccatctgatgtgatgagcagtttcctttatggtatgtgctctgtaactgctatatactggtcttaaggttttccgtttcctgtttgcgacaacatagccatgtcaacagattgatctctgaagcagtggctaatttctattgacagccgcaagagcatccttcttctccctgaatgaatgttatccctgaaagaatgcagaaatgttttcgcgtgtgttctgacaattcctgctagataactgactttcgcatgttatgccagagtgcttgacaactctacctaaacttgacaaaaaaaaaacgcgacagcctgaaacagtgaaactgtgaaacattctaattatgctgtgttcctttttgcaagttctcaacttcttttcgcacgcacggttcccaaattgctaaacagagtgtcttttttagaaattttctatatgaattttgctttaagaaaatcatactaatccatttttcatttttttagataatacataattaattatttgctaaactattacttcctccgtttcacaatgcaaatcattctagcatttactatattcatattgatgcaacagaggaattacgtcgttttcccaacccatacctccgaaacacagccataactagcaatctggctttgagccatagttggaatcagagacaatctcagaagaaatcaccgtacttcaattttgaaacggcaaaattccaattttgcattcaagcagttcgagaatcatatgcgtcgattttttccaatcagaaggagtaggtctcgtcgctctcgcgtcgcgtccaggtgcagccgtcgttctgttgcaagcgcatcgcatgttgtacagtacaaaatggccacccacccccaccaaacacctttcactaccactcctgcacagcacagcctgcactacaccaaccaaccaccaaaacccttcttcccccatcgaaagcccatctcactctcctccccgccgccgccgccaagcctgcgcggcgccctcccctcccgatcgccatggcctccatggcgttcaccgccgccaagttcctccctgccacggcgcccacgcacctcgactcctccccgcgcctctccccgccccgcgccggtagcctctccttctccccgctctcctcgtcgtcgtccgccctcctcctccgcctccgatccccgtccccgtctggtccgtctgggccaggtggcaggctgcccccgccgccgcgctcctacggcggcggcggcggatctggcgacgccgcggattccgggggcagcagcggcggcatcctcggcatcttcctcgccgggtgggcggcacgcgtcgccgcggatccgcagttcccgttcaaggtgctcatggaggagctcgtcggcgtcagcgcctgcgtgctcggcgacatggcgtcccgcccgaacttcgggctcaacgagctcgacttcgtcttctccaccctcgtcgtcggatccatcctcaacttcgtcctcatgtacctcctcgcgcccaccgccggcgcctcggccgccgcgtccgccgccgcgtcggggctccccagccacatgttcgaggccggcgcctactccttgggctcccgcgtcgcgacgctgctatccaagggcgccacgttcgccgccgtggggttcgccgcggggctcgccggcaccgcgatctccaacggcctcatctcgctgcggaaacgcatggacccggcgttcgagaccccgaacaaggcgccgcccacgctgctcaacgccgctacctgggcgatccacatgggggtcagcagcaacctgcggtaccagacgctgaacggcgtcgagtacctgctcgccaacgccgcgccgccgtcggtgttcaaggtgtccgtcgttgctctccggtgcataaacaacgtgctgggtggcatgtccttcgtgctactcgcgaggttaaccgggtcgcagaagtctgatgcgccggccgcctcggcgactgcggaggaggagaaggagaggttgatagccgtgggcaatgacattgccgcagacgccgtcggcgcgggaagggatggagagggtaagtgagtggatgcataatgcatatgcttgcttgcttgcatcgctcaagcttcgtttgcggcttcttggacatgggccaagaaagctctgtagatgataagccggttggcttggcaataaggagtgaggcttgaaacaatttgttcagtccatctttggtgttcttggtttaatctgtcgacatgcttagttgatcttagaataaagctttaccttttttctgttgctcgttttggtcactggcctaaccggggggattactttgcgcgcggtaacttcaattgctttgtttgcatgcaattctgtgatccgatcagaccaacattgtagatgtaaggactgaacaaatgaaaatctaagcgttggggggttagtgatgtacaactcagataaaattctctagtgtttgcataagtgaattgctgtttgtgtgtttaagtgcagataattatgtctgcacagccagaaccagacttacctcaggtcttccactgtggcaattcgagttttaccttttccttcataaaccatatctgaaattggctgtttgactgtgtatcctgttttgggcaaggtagcttgtgccgaaatgctttggttatatcgatattcttcaccgtaataagctgtgcaaatttgaggcataaagattgccagtatccctcttatttgcacaattgcgcctaagctagcctttggctgtcaacgtgaatagtggtactccacattaatatttgttaaatggatagaatcacaactttgaaattaaacaagtgcacgaatcgtatcaaatattgtaatgcacgcgatatgaatcgaatactaacatagttcttggtcctagcatagataagttacgaaggaaaattgttccagatcttaactgattatggtacctattgcttgcacaataactcagtgatgatcatcatctactgtctatcagtgtttggctcctgtcttctgaatacggagggcatcgatagatgaatagtatattgatgtgcttttctgattgaattgtttgcaattccatatcgagccgttcaagttgatattatcaaagtttggtgagaggttccaaatgcgttccacctttccccttgtttggtgaaggaaaagacgattcctcagtgtcctcccgaaacagcaagcgcaaacacttgtaatcgcgactggtagcatttgccatttttgtttgctctgtaatcctcctaacacaagcctgaaaagtacaaatatgaagcccaattttaacacgcgatgagttgccaggtggactccggcgtcgaccatcctgcacgtaccgtgcatcaacgtactacctaaaccaggacgtgcgtacatcgcacgaggcatgtagtagtaaactcgtcacttgtcaccaaccaaacaatcgccttcgtccccttcgagttttaccactgtctgtcttctactcttccagcctatcgttttgcctatgcttatgtttatcattgaaaatttaatttttcaaccttgattttaaagtttattttagggttttttcattgaagtttatttttagcatttacttttatatcgctaagaacacacatataaaaatcttattcacaaattactttttgtttgcaaatataccgtttagcttattccacgaataggtcaaacgatgagaccattcatctggcaggttgaaaaagcaatgtactccctctatttttttaaaaaaaaacttaacctgggaaggcggatgtgagctattagtataacgaatatgaacaactctttatctagatttgttgtactagcctactaggagaaatcacatattcgttgaatttttgttaggggatatttagatctaggagtgtaaaattttggcgtgacatatcgggtattatatcgggtattcgggcactaattaaaaaactaattacagaatacttcagtaaacatcgagatgaatttattaagcctaattgatccgtcattagcaaatgtttatcgtagcaccacattgtctaacaattcgtctcgcaaattagttgcaatatgtataattagttatttttagtatatatttaatattttatataaatgttcaaatgttcgatacgataaggtgtaaaatttttgcgtgggaactaaactgcgccttggacgaacggagtgtgttacacagtgacagtttcccggtttgctacggcgagcaggttccgtgcgtaagcaactaatggagagagagagtcagtcagaaaaccgcacggctcgccaaatccgcaggtgcgacactgcgaggtcgaccgcgcgatgtccggtccctgacgccggtttgggtcgctgcgccgtggcaagaccggagacccctccggctgcggctcgtttccaggtggagagagagagagagagcccagcccagcagcccgtgatcgatccgcacggcgattgaagcggctgcccttgcctgccaccttgatcgatcgagcatgtacatgcccactgtgtccgtgtcacggtcacgcccaaaattggccgtagcgcgatggcagcatctgaattttctgtgctcccagctgaaggcagtccacgttagagcaagtttaataggatagtccactactagctttaatttatttatagctaatttaatagccaattcatataatactaggtctcatctgtcatacacacactgtattttggagtccgtgctgcagctagttataaatctatagctcgctgctcttctctcttatcttttatttcattaaaatatgtttatagctggttaataatctgctattgtaattgctattacgtcgagctaccagccgtgccagatgcgcgcgccggtgtgacggtggtgtcgttggccggcggcgtggtttagtcaaaccaaccggtgaaggggagagaccaaaaaggctctggattttcagatcttgcaatgacacttttgccatgtgggtgtctatcctgcggacacggatcctctaactttacatggtaaagtcacggtgtgactttcagaccatctccaccgtccaactcatccaacggaggacgtccctgcggatgctgcttcctggccattaatgccatttgattcctgatggcctaattctacctaaagattaatctaaataatactacatgagattagttcagtaactaaaaattacctgccactttgtgtgctaagttattttgtattttggtgattaaaatttataaaggttgtaatttgttattatatgaaatactaagttggtattcacacaaagaaataggacattgaaattactatggaacaactgaaatttaagcaaataattgtgtgaaacaaaagaaatttaataattgtgtaccaatcagcttctttcattaaccgagtcaactaaaaaatcatatcaaattttggtgttaaaacaaactaatcacatgcactgattgtacaattgtttgttgataatgctaattacagtagttagtcttcacatggaatcggcaacttaattagcacataaagtgacaagtaattatttttttttcagttactagactaatctcatgtactagtattggagtattgtttagattcattaatcgttgagtagaatcagcaaacaaatactagcattaatggccaggaagcagcatccgcagggacgtcctccgttggatgagttgaacggtggagatggtctgaaagtcacaccgtgactttaccatgtaaagtcagaggatccgcatccctatcctgcggccctgtcgtttcaccagattttatgccagttcctttcttctacgaggaccatggtcatgtgcagtttcaccacacatgtttcgtattggcacatgcaccggttgcccccctggatcgccttgataatctgcacaagttccaactctaaataagaaaagaaaaaggtgtaacacaagtggctagatcattgcttgtgtacctagaaaaaaaagcaggaaggatcaaaatacatactacaaaaccaaaagggagagatttctgatcaaaatagagctcgactgtccaagcttctgcaacttgcctcaatcatacatcagtgctgatgtaacataccctgccaattggcacgaaacaaagggcaggaccacgttgtttaactgaaccaacaattttcagtttgctcgagttacctaatgtaattttttcttactttattcaatgaattgaatgctgtcaggtgctaatcgttaaaattggagtttaggatgtgttcacgtcaaaattaaaagtttggttgaaattgaaacgatatgacggaaaagttgaaagtttgtgtgtgtagaaaagtttttgatgtgatagaaaagtcgaaagtttaaagaaaaaaattgaactaaacttgcctaatctgaaggccgaaacggtgcgagcagcagcagcaggaggctgacaggtgacagccacagcgccggatacgtggctaggtgaggagagcgtgaggctggctagcgatcataacaatggaaatcttccactaaactatgactaaaatacatattctccaccaagaaggaatcgatgaaatggaagcaggccggccggtgcgatctttggctacatgtgctgcccacaaatacatcggcatggtcgcaacgacagatccaatttggtgcctcatagactaacatatctcgcaactcacatgctttcatacactactgtcttcaactctcgagtacagatctctttgtatcgattgcctatttgcctgattgtctcacatggacgctgtgtatatatataacaatggacttgatcgaataacatcctcactaatcacttctcagttctcatcattgttcagacagttcagtagcttctctcctcagctaaacacacagcaatgagatctgtcagcatttctgtctacttcctgatcatctctgccttgctacttctgcattgcttcctaagcctgcagacagcaagattgcctcgtgatgattgggcatcggaagagaggtttcagtcaaggaagctcctgcagaatgtgctgatcacaagttcagagaatccacaggtgttccttgaagcagcattactagtagataacaagagcaagaagcagcctgacgtcgaggcgaccgagagcctgaagaaggagacgccaagcaaggccaacccgattcagaattagtcaattagcaagtgcagattatgactccggttggagactgatgtgaagtctttgtagactgaaggctgtatagagggatttttgtatgccgttcttttaactgaaaccattcgattcatcattgttttatactagtatataaagctagacagaaaaagagattttgtttccctatttccatttgtttgcatctttttcagtcacactcaactttatcagcccgtcaggtccattgaaagaggttggtttggaaatgcatattgagccctgtactgtttcttttgttcagatacagatatgcaaacaaagtgaacatggaccatgaatcctacgggagaagatgcgccatccttatgcctgcaaacttggctgcaaatatcctgttccattatgctacagtgatctttattcccacacaaccataaaaagataaaaatgacctatttgatgagcctacttgccaattatcgtagcttttgtaaaaaggcaggcacttgtatgataaggcacatatgttaaggcgttaggaatcaatgaatcattgcactgaacttttttttgagaactattgcactgaccgaatatacatttgtccgtatccggtcctctccaacctaaagcatagtctgtagtactagttctctaccgtcacgatctactcctatttgttaatgaatttggggcatatgaattccacgtgtattccaaaatttctcctcaacaaaaaagaagcactccttgcgttcactgttcagtgatttttaaacagtccaaaaatccgggaagtttggactgcgggatttgcagaagaaattaccaactgggctggcttgatacgcaaagttggcccagtaagaatctgggcttgaggccgtcgatacgcaataatgtagcccaataacgcaaggcccatctctcacgttatatactcccccctctgttcgaacccttgttgacgctgtaggtttcccattcccgccgccgccgccaccgacgccgtcgccgacgatcccatggctcccgttaagaagacggtggaaaacctaagcttttatttggttttgaaagttcttgctgtgtggctttgtctcttggtgtgggcgtttgatcgatgggtggggtgttcgcggtgttttgcagaagaagaacgcggaggggatcaacaacaagctgcagctggtgatgaagagcggcaagtacaccctcggctacaagaccgtcctcaagaccctccgcaactccaaaggtagctctttgattcgtttcctagtcaccgctctagcttcattcgttcatcagtcaagcctggtacatatagtgtgataaatctaaatcatttggaattgggggtggggtggggggctgtaaattttcggggaacacatcttattatgttatattccagagtatagcatggatcttgggcagttttgccatgacagaaagttgccctctgtcgtttggatgttgtcatttttactcatgtggatgtcagaatgggactggagtttggctcttcggcttgccctttttgtgtcttagagatgaatgcagcgcccaacaacaattcatctttccttgctggtgttctccttgatcaagtctaggggactaagtgagattgaaacatttactgcgtcactgactcaccgttgcttgtatgcgcatcactagttgtttctactataacttacaataatgtaaatgtcctcagttgagagaacttttgtcagccgtatagtaatttttagcatggtaattcatgaaataaaactgcaggctttttcattttataacaagtttatccaatcagacatgttcaggtgattaggatgctattgccatgtttgtatgattgtccacggtgaagttgctagttggcacaagggactgaagtttggccctttggctttcctttctcagccttagggatgaatgcagtacccaacagcaatatagtttcttttccttacataaatttccagacactcccttgttatctgggaaagtaaggagctgaaacattttgtcttacctttttacatagatatttgatgtggtcagttcatgcgttttcttatgttatttctatgagttaaaatcgtcctatttccagtttatgattaccttgctgttttttttgtagtgggcagtaggtgtttaattttcacaactatatctttatctggggaattcatgcatcttgaaagactgttacttctgtgaatgatatacagtcttgcttctggtcaccatgattgtgttgcaaggaattaatcattaaagtgttcatcattatggtgctatacgaatctacctttttcaccatggaatttctcttccaatgcttagtagaaatttctatatcagcttattcatcaatgtgctaccttcttgataccctgtttatccattgggtcctgatactttcacgatctgttttgaatcttcagggaagctagttatcgttgcaaacaactgccctccacttaggaagtctgaaattgagtactatgctatgctgggaaaagttagtgtgtatcacttcaatggaagtaagattactcttcattcactgaaccacacatgatagctgcaaggctttcttttttgcattaatttatgcctgtgcatgcattagcctgtttataatttgattcgtcaatttcaacctctcaaataggctaaccgttatgtgttggttaattcagacaatgttgatcttggcactgcctgcggcaagtactaccgagtgtgctgtctcagtgtcgtcgatcctggttagtttcagtgacttcaatctttgaacctttccttccgcatccatatgaactctccatttccgttctttttttcatttgaaaacaccaataatgcttctcttgtaatccaggtgactcggatattaccaagcaattacctgagagtcattgatgtgcatgcattggccttgtgaccgatcttatcttcactttttgctcacatgaaaaagatatatatcttcatacggtgttcttgtgaagttgcgatacattgatgaaccaaacctggcacacttcaatagcatcgcctagttttgctctgctaagcatctgtcaacggtaaaggtaggagtgaaatgtatgtaggatttggaggtaatgggaaataaatggtgcaatctgttttactttccgagtattctcaggctgtcatgcatcaagtaaatttaattagatgacaagcagtttcaaaatccaacattgtcttgatgcgcggtgttggctgcagctatagatggccaaaaggcccgaggcccgacggcctggcccatggcacggtgtttaggtccggcccaagcacggcacggcccgtcaagggtcgggcccgtgccggcccggcccgaccaccgggccgtgcctgggcctctccgccggcacgttgggccggcacggcacggccgggccggcacggcacgatgggccgcatgccaggcccgacacataaacaatagggagtaaaaatagacattatatgccacggtcgaaagaatagggacgtaaagtagacttaatttacatatatatatatatgtcagcccaaagaggagggacaaaaaatagacttattttcactatatatatgtcaccagcccaaagtggagggacggaaaatagacttattttcgctagattatgtcacagcccaaagaggagggacagaaatagacttattttaaaaaaaggcacgatgggccacccgcgccttcgggccggcccggcacggcccgacagctggtgggccgtgcctaggccaggccgtgccgggcgggccttttggccatctatagctgcagcagatgatcaaagccatgaagaaatgaacttgtcccgcccgcgatcgaaaacgcccgtagttgcgcgcctgcaaatccaacttcgcgtgcggtgtgccgtgcgtgtatgtgaccaccgtctcggagactcggagtacgtaccctacgccactggtacggggtaaataatcgcaaaacccacgcgctcgcgggtgtcgccgaaccggaagcagcgcgcgcatcgtcgttgggtcgcggtcgtggctaagccgtttcctcagcttccacgcactctctcgatcgggtcgctgccgctgatttgcccaagtagatttggactctcgaatcctagtcggatccagccgcgcgcgcaacacggacgcccgggtgttatattttccggtcgacttacgccaatcaccaagtcgcgcgtacgcacggtcgcgggggcagcctgcatggggaccgtgtcatccagcagccgccgccgtgcggccgggagccaaccaagcagcagcagctgggtgaaggcgctcgacgtggagaacgatgaggaggcggcggcacgcgcggacgcggacgcggacgcgcacgcgctcgaggcgaagggcgacaagctgatgtcgcaggcgaggcgggagctgcacggcgtctggtcttacgtctcgcggcccttcattgtcgctgccagagcgcgcttctacttccacaaggccgccgaaaccttcgtgctcgccaacagctgtgagtctctctctctctctctctctctctctctctctctctctctctctctctctctccgtactcctctctacgtacgccaaccaatcgcgtcctccgtgttttgcacatttagatcaggttgttttacttatttcagccgtgttttagtaagatttcgttccaaaagaattaaattggtaatgtatacctcaagtttatttgctcaaattgaacgcattgcctcatttggaggacgtttttttttttctgttctctataagatggttgtagaattactgcactgtgaatgcgcttcaacgatgcgaatcaaattacttttccatagtaggttgctaaacattgtgtgactctttttcagggaggaaagcggcggctgcacaccacgaacatgccgtttgttgcatgaaggtcagtgtgtaatatggcttacgcgacttttaatttctttcattgctaaaaccgctctagacacatcttttgatgatacattcttaatttatgttcttccaatatttcagattgggcgatcaggtaggctcagagcggcatttgcgctcttcgaggctggaaaatgctacatgaaagttcttgaacctggtaaacacgacacgtgaaaccctcacgcacgctctctacttcttaacatctactgtactaactttcaccacgtagtaagtatatattcgctaaccatcgtcatatgaaaaatctcttgactttctatagatgatgaggagatgacgagcagaacggtgagcgacctggaaaaatcccttcgcatgtttgtcttggagaacgaattggtaatggccgcagaagtctgcgtggagctagccaacttgtatgccatgctgaaacagtgggaaaaggttagggagtacagacaaaaagcggcagaattccacgcaaagacgagtgatgcgttgttcgacacttccactgtttagtactacctcttttaatgtatgacaccgttaactttttattcaacgtttgaccatacatctcatttaaaaaattcatgcaattatcatttattttattatgatttaattcgtcattaaatgttctttaaacacgacataaatatttttatatttacacaaaatttttgaataaaacgaatggtcaaacgttggtcgaaaagtcaacggcgtcatacattaaaatacggagggagtatatctgtatatgtaggatgttgactgtcaaattgtgagatgccaagatgatcaatatatatatatttttgaaatctaagccagccgagctggtttatattcagaaggaaaacactgtacagaggtcacatatatcccatacatcggattccagagttgcactgttccagagatggcgttgttcgatcatatatcccatacatcgtaatcacacggggtttgctcgagctgctgcgccctcaagaagacggatgcggcagctgacaaggcttcctatggcacggcagtagcgaacaccttgctcgttggggttggggccactcccataataatccttggcttgtaagaagcaatgcactgcagcgtgcaactctctctgttcctcgtggaactcagctagctccttgcaacatgtggcagccgattgcatatcattgttcttggtgaacaacgagaccgccttctgcagagcaagcttgatggccgccacctccccctcgtctgcattaattaatcaccagatgagtaaatagtagattagctaacttgactattaacacatattaaagctaacctatataatatcactactaaaaaaatacatcgaagttgacgctatagataccggaacagttaaaaccgatacatatagtgtttttcctatttctgtgggtgcgaaaatacagaaccaaaacctttcaaaaactatatatgtcggttctaaataaaaaccaatacctataccataaatacatatatatatagtaaatttgtttggtgctccatggtgcccgagcaccattgttgaaatttactatatacccaattcaaatgagtatgaaactttttcaaatatttaggtattaacgttaactactttactaactagttcaaagcaagtttgaactgaattcaaacttgcttttgttagattttgattctagttatatagcatccaaacatataattagttaggtatgtaataatggattgtgaaataaagttaaatttgagttgttttgttgctaggtataggtatgaatcgaatacttataactaggtatatactcacaatttaaaaattttgaaaaatttgggcgaatttgtgtatttcataccatggtgcccgggcaccatggtgccccatatgagtgtcctgtatatatatatatattataggtggtagtttttatattataaatattggtttaaaaaaactgagcggagcctagcgactgatcaacatgcatatatccactattaaacttgttctaataacgaaactaatcagataattaacattgctaattctaagtggagactaattcacgacacgattcactgacctgcattgtcctggatcttcctgtagcatctcgctgaagcgaggagcgctacagctgcgaccaattctgcaggtggcgatcttctcttgagcctctggatggcttcgttgccgaatgctgccgctgcttttctccctgcatatataaatcaaatcagatcaacggaagatcggcaagtaatcatcgatgatgttacaaatcaattaatgttcgatccaatcgatcgacgttgaagcagtaacatacagttcttggcgaggacgtaggagagactggccatcctgaagtcctcggcgatggcgaaggccgtgtcgtgcttgaacgacgtgaaccaccagcttgaggctcgccggtggcccctcgccatgaggcggtcgccgcgcgcctcgagctcgtccggctctagcccctcctcctcgaacatcgccggctcgtacgccggcgccgcctcctcctcctcctcgccgccgcgccgcgtgatcggttcgtagccgcggcggcgaatgcggaactgcagcagggacgccatgttaattccggcaacgtcgacggcgaccacggtgtacgtacgtcggaggcgaggggttcgacggcccgctaatcagttgcacccggactcgtgtgctaacgttcgatcgatgatggtcgcgtacttgtataaaggcggttcataaacgaccaaacgacaatctgcttcggaatcggagtgcataaataaaatcgggggtttgccatcgccgcgcgtactcgcaaacaaaacatctgtggtctattgtatataaacttcggtcccatagtatataaactttaggtggtatttagatccagagatgttggagaatgaacttctccaccagagaaccgtgaggcccccctttgtgagttcggccgggggcagcgggtgagattcaagggcttggtgagtggagctgtgtgatcttgaggggttaggcccctccaagacgatgaaacaaaagaggtttatacaggttcgggccgctgagaagcgtaataccctactcctgtgcatgattgattgaatgtagaacgcaagtgcttggggttgtgagacccaagcaccagttcgctcggaagtccccccctccaccactaggactggacctccttttatacctcatggggttaccacattggcccaacaacctaacctaactccggtggagaagcattataatctttgcattaaatgcatgtcttgtctcttgacttgggaagccaagcacacgtcgtttgaatgatggggcctgtcaaatcttgccgcctgacacgggggtgcccctgttagtcaccatttaatgggtgaagacttctgggctcctattacaccgggaaacgggagtcttgctttgaccagagcgggaggaccgattccggttgggataagaggatgagaacctctcaccatcattatttgatgggatatgtcaggctgcacgtcgcctgatacacgtgatggtgcgcctgacatcttgggtcccatcagtcattcgaccggtcacagaccggttgagtgcattgcacaccgcattaaatgcggcgtggcgtgaccgctcgggtcgccataaatgcgggtaggtgggcacctggaggcggacacctaatccaccgtacgtggtgacctagagagggggtcggaggagcccaacccctagtcacgggagggggcggccgccgcccgacctcgggcccgatcccccctcgggggggagctcacgtggcgcctagggcggccttctccctctagtctcggccagggagtggccgccgccctacctcaggcccgacccccctcgggggagggccacgtggcattggagggcagcctcctccatccagtctctgggaagaagtggccgccgtcctacctcgggcctgactcccctcgggggagggccacgtggcatcgggggggcagcctcctccgactagtctttggggatggagtggccaccaccccacctcgggcctgactcccctcgggggagggccacgtggcatcggggggcagcctcctccctctaaacctgatacccccgggcccatatcaccgacaagagacttaactttagtctatgtatttagacactaatttagagtattaaatatagagcctgtttggggagctttagatactgagaagcagctgtttgatagccagtttctgagaatctggaaaagctctgaaacccagcttctctagcttctgccttcttagttcacttttcagaacagaagctgtggattatttggggcagcttctagcagaagccgcttttgggaaaagctgcagctgggacaagctccccaaactgggccatagactacttacaaaactaattacataaataaaagctaatttgcgtgacaaattttttaagcctaattaattcataattagagattgtttactgtagcatcacataggctaatcatagattaattaggctcaatagattcgtcttgcgaattagtccaagattatggatgtgttttattaatagtctacgtttaatatttataattagtgtccaaacatccgatgtgataggaatttaaaagttttagtcccatctaaacagggtctaagacttcacttgtaatacaatgatgcactggttgcgtattccaaaaaacatctatgatctatctgtttcagagcacgcagttgtgtaaacgagaaaggtccggaggtcttctggctagctccataaaatggtgtgctagataacctggtttggagcctcacccttctaattactcctttcgtttcacaatgtaagtcattctagtatttcccacgttcattttgatattaatgagtctagacatatatatctatctagatttattaacatcaatataaatgtgggaaatgctagaatgacttacattataaaacagaggaagtatttaatattaggtcattacctaacattcatgtcgtgtaaacgatcaccgcgtcgcagtgtcgcatcatttaggcgatccaaaagagaggccgaggggacgagccaagagcgactggttgctggcgcgcgcgggggcggtttagccgtttcattgggtgggctcgggcttggcaactgacaacgtcagggtcggcgctttaccgcaactcgcaaagtaatgtacataaatgtagcgtgtcaagcattgttacatgtactacaataatcttcaccatttaatttagctagatataagttataaaaaatctagatacactcatgatatgacatatcctagtaagaaagaatttagtaataaaaaatgagtacgtatagcttttttctagattgtccatctgcctacttgcctacatcgttttgatatcacatttaactccgtagtttcgtttatatttatgcttataaacgaaaattgtaaaaaaaaaattgtgtgcagctgtgtagattttcattaggattgatgtagcagagcattccctttttatggactggattcgaagtgtggtttgcatgttcaagtccagatatggaatgtgctgagactttgtatgcacggacttgaattttcgtactcgcacaattttgaacatctgcaattgacatctcgttatggtatactgtagcctaatagcagagtactgttgtttgaacgaacccttgctgccggagtgccggtcttaagatttttgctcttaggatttagtgaagaatcatgcagaattcagtattttattattatttttttcattttactgtgatgacatgctggtcacactcacacatggtttgcatgccaggactcgctgaaacacagtttaaccataaagtgggtattcactataggggtgggcgttaagtttactccgttaattcggctcggtttcaacggtttaatagaaattcggttttctagttatggcaactgaagaatctataaaaaaaaaaagaacaccgagccgattaaaccgagtaacttcggttcggttgttcagtgttaccgaacaaaccgttggaacacgttgccataagactgaacagaagcagaagggtgatgcccgaaaaaaccgacacttcggttttgttcggcttgcggtcttcggggatttttttgctcacccctattcattgagatcaacatgttgtactaattgttgtagcatggggaaaacaccatcccctgattcggtcgaagacgcataacaaggaaagtgagttcgagtttggcaggctgcttaagtgaattttccacataacaacctgcaactgggaattttcatttgcctaaaagggcccgttccaaggataatttattcgagcaaagatcacttgctcgaatcagcatcactaacaatatcaagtcatcaaacaaatataataaaacatccgacgcctcgagagaagaatattggagacattgttgggcctttagcttgccagtcaacttcagcctgagatgtgcccgtcaaaccactcgaaggcggcgaccagatgtgttacatattcatgagacttgacaaaaatggctaaagatctacaatatctaaaatattcttaactcatactcatgtgaatctagttcccagaatgtacactagattcacactttcatcttaagcatgaaaatacatagcaaaatacacattcaaatcagatttgctttcaaataaattcagcaagctagtacttagcatatggccatcaaagtaggcattaatcatgtgtaaatatgcacctcattgccattcatggcagcaaggagatcattctcaaatctcatcataatttgaaggtaaattttagcatttaggagaataaacacaagtctatactcaacacatatccacataccgctcataaccgcgagcacggctaatccattagtttttagactccgcaaagtttgtacagctttacccacatgatgtgaatcgctctagtttgtccggtacccgtcggtaccaccatactctacacattgagtgggtctagaggtcacaacgaggcttttacattaagtcttgtttaatccttgcatgagcacgatgagtgttgttccacactaagtctagaatcttaatgtcattatattggggggtctttaccaatataacgtcataggcaagccggtacagtcgcttcctgtgtggcactcaacgttgtaagtgaggcggaacattacagtcgtcccctcacgcggaacagtacagtcattccctaccaaaccataaataaaagtgaggcggaatgttacagccgtcccctcataaacatcatacacataaaaggcggattggtacagtcgtcccctttgcaatttacataaacacaaatagccctacagttcactcgtaggcactatcactactacaacggccttctaaatgtaaggttagacaaacacttaacataataggccaaggtcgccccataataacacatgtggatgtacggtaaacataatgaacagacattgagtgacgttcttagatcggtttgggcgcactctcccccatcggtac

SEQ ID NO: 17979 - DNA, 4657 bp, Oryza sativa
aaactcaaatgtaaacaagaagataattataccattaggaatgactttttttcatctttctttcattgtcttgagggacgccaatgccgataccgtttcaccatatattcttcaaatgattgatgcggttacttgtagcttcaaatggtctcgcacggttcatcatgacaaagccgtcactcgcccttcaccaccggatttggttcttcggcgccgagccccttgcttgcccttcaccgccgcatggtccatcgtgaccaagcatcgcttgcccttcaccgtcttgccataatagccatttcgtatcacacatcttcaatatcttcactttgtcattcttggtattgttaggtgtaatgatatcacttgagcatcaacacctttgtaatccttgggacctatttctttcattaaactcaataaaattattagtcccaataatccggttgtcaacctccacatgttgaccaaccgatcgcatgtataaaaggatatgaataaatgatgagtattaatcaacaccacaggtgtcatatactcaaatatatgttcaaatgtaaagatctcaattaaatgaaggtgaataacttggatcgattacatgcataactaaagtataggatttgctccccctaactgtatgcatacaaaatatttgtgtgaagcaagagtatgcataacaagatattaaacattgagagcttatcctatacaagaatagagggcatttatcaaatatagacaataaaataaaaacataccttcatcatctccatgttctaaatgtaaagagactaaacaagatatggctcaaacaaaacattagtctcatatgcttatgtaatcacatggaaatattatatatgaatatatcaatatgtgcacggatagaaagagtgatacatatagcttgatctccatgcatttcatccttgtgatttaggtataccatcaatgaacgtttttctctcaactcatataaagtccagaaatcacctctcacatattccactttcatatccatatgagactagtagataaagaaatgcttataacaatgttagtctcatgtaattggattcgtcattaatcgtcaaaaccaaattaatggcacttgaactttcaaaaggaaccgtccatggtggcatcgggtgcatttagggatgctaaagtgcccaacattttagcctacaaaatattgatgggtataaaatggggtgggctaaatttctatttattttgaactaaaaatatatgagggatagatagggttgtgaaagaacccatgggcattgacccattatcacccccgtgcatcaaggggtgaagttgagctgcgccatcaacatcacggcgaggtgactccacaaactcctagtctccgacggctgcattgacacttgtggcatgttcaatagtggcacctactactataggagacaagcttgatccaatcggatctaggggagcttctcccagcggcgggaaaggtgggatggcgggggggagctagcaccaatggggcactgactagagtataccagcaatgtggccgcccacaatgaactaagggtcaacttggaggcataggctaaggcctaaggggcctaaggggactcagggtcaaagaactcagcgtcacaatagcatccgaggatggcaacaacccaacccacaagatgccatttgcttcacttgtgtatccccttgcactgttgtaaaaccaacaatcaattgccgatgaaaccacaaggcatggtaaccgccaagtaggacgatagcgagcctgttggaaagaagaagagagaggatagagtagtatagttgaaggaagaaataaaggtggtcaattccacatgggtccttgtcaatttccacatgggtcattgtggatgccacatagtatagtagtatggtataaaatcaggttgcaaaattgttgagatccaatttacaatggttttagggcctatttggtagacctctggctctagctccacctcttctgaagctggagcccatccaaacagtttcagctccatccaaaatagaagtggagctagctgaagtgttatcacaaaataaactagggaggtggagctgcgttttggctgcttcacaacacctaacttttgaaattaagagttctactccctctgtcccattttaagtgcaaccataattttccatgcccaactttaatcatccgtcttatttaaaaaaaattaaaaacataagtcacgcataaagtattattcatgttaattagaaaaaaatttaaataagatgaacgattaaaattggatatagaaacttatggttacacttaaaatgggacggatggagtaccaaataaccaaacagccaaacaggctcttactgtcgagggaataaatcagacccggccatagttgagggaatcaaaatatactctctcttttttttctctacaacagattgtaaagacatccaaagagggcagaagtcttcctccggcccaaacccactgactttctgagatgaagcccactcggcccaaataaagccccaaccagacaatccttcttcgagacggcgttgcgtcccaagcccaagagcggaagaaagaaaaagtcagccgcttttgactcgtttcctccgggtccgccgctactcctccgctccgctgcctgcctagcctagccttcgccgtcgccgccgccgccgccgccctcgccgttgattccgccgcccgccgcgtgatggacggggaggaggcgccgccgggagcgctcaacctggccgactacgcccccgccggggcccgcaccgtcgactgcttcaggcgcatccgcaagatcggcgagggcacctacgggtaagcgaaacttcccctcgatctccgccgctcgcgctatgaaatgtttcgtgcgaaatcgctgtctcccttgcggcgtggttgagccgcggtggagtgtagcggtgtagcctttgagatcgtagtggggggcgggatgttcgtctcacccccctagttagggctgtggttccacggaattgtgagaggtcgaattctcgtcaagtcaatgcacgctttgtgtcaattgttgctggctagtttgctcgcttcagaatgcgaggcgacatttttggtctagttgttttccctatatttagttactccttttcgtttgagctctagaaatatgtagtggttcgttggtttcggttaggtttcgttggttaatgttgcacgtggggcatttcatttacagctgattgctgaattcgctagttatttggcagatacgctgactaacctgcaacaatgagaagtaatttatccacggcggctagctagttgagattttcaccatgatgaaagaaagaggacacatgtttatgctcgctacaacactaaccaatataaatgattcgttcgaaacatcccgtctcttcacacggagtagcatatctttcttaacataggcctttgtcctgtacaaagcaggtttattaaaaattcacatctcatttgccgaagtacattaggaaaagataaagaatgttagagacatgtaattgatgggtgaattcgaatattgtcttgttaggtccaacgactttgcaatttcatccatattccataaggaaaaagaatccaagactgctctttcctgtgtgcagaagaaatgaggtttcgcttgattggcaacagtccagattatgccacactagtatggtttgcagtttgcagctcactgagtccaaaaataaatgacgcagttgcaatatttgtttcctttttattttccttaggaccaatatataataacaatacatattaaatatttaaatgtggtaccagtttttttatgaatttaccttcttcaccattggccaagctggcagtgcgctagttttacctctacatttatttatttttcctaacaatctcagtgaagtattcgaggctatggatattataactggagaaagagcagcacttaagaaaatcaaactggatgatggcaaagaaggggtaagctttatgatatccacaaagctatggctactctttctaatgagcaaccgtgttcattgaagaacattgcacttctctgatctgatccatacttttgtagtttccacgccaaatcttgcgtgagattaaactattaaaaaagctggatcacgagaacatcatcagattgaaagaaattgtagtatctcctggtaacaaatttcttctagcaatttcaagatgtctaagagtacagaaaactgcatattcccaccatgtgtaaatatttttcaggtacagcacatggagcaggaggatcaggtcagttactttattctttgtttcttgcattctccattgatgtgctaatgctgatatattttatttgttttgtttaataatttttcattctgctcaattttttcttcatattgatcaatgcacagaaatcattcataacctatgctaaaattctgcagatgattacatgtataggggagatatctatatggtttttgaatacatggatcatgatttgaagaaagttcttgcaccacagtaccccatcccaagtcaaggtactctggtatatgtagttcttctatcccatgtgttttaagcaggggcggagctagaacgaaatggagggggggt

SEQ ID NO: 17980 - DNA, 5232 bp, Oryza sativa
gaagtccgaacccttctattcagacttctcttcaaaatcctcacccgcatatctcgtcaagtagtcaaactcaaactcccaagttacactctctttctctaaattatccatctccctttgactcgtctccgaatattgttctcttccttgactcctttctattctcccaagaccgagtatcgacttcgaaattcaagtccagactccaaccctaaaaccttccaattaaatctctctgtaaaagtctagttaacctcccccataggttggattccttcttcctttttccggtccacctcttccttctcttccatcccgtctctctctgggtctcgacctatcaacctatctacctatcaatctatctatacatcgatctacctaacgatctatctatctatcgatccatctatctatctactatacctatctatctgtttatctatccatctgtctatccgttcctctacctatcaacctatctctctgtctatctatctatccttgaactccttcccaaatatttgtcccatggtacaagatttctttaaaccccccctctcaataatccttgagccaccaaatacaaatatatccctagaatatcaattctcgctttgaactccaacttcccatcgacatcgagaatcatgcctcatcgaaattccttcccatttccgaaagtatcaaattcgctctttgaatcccctccttggcttctccaaactttgttgagctcaaatatccaatttgaattcaatccagaaagtcgatcccttcctttgaatccttgccgaatattcgctccgactacaaaaatattcaattcccgttttgaatccttcttcgactcttccttattgttcctagagtccaagtatcaaggttaaattccctccaattcaaattgtctccacattcaatccatctaaaaaagtctattttgcctccctctgctttgtgggccgaattcctctccctcggcccatcactctctctcagtccgtttcctcctctctctccacgtgcgccgcgcgtgaccaccaagagagagcgccgtctctctcccctctctcggacgttctctctctcgttctctctcactctccctcgccgcgcccaaaccgctccccaccagcgccccgccgattcaaaccgccaccattcgattttcgccgccgcccgtcggtttcccgcgcgcgcgcgcgtggctaaccacgctcggtcggtcgccgcgctcagttgtcgccgcgtccgtccagacgccgcccgtgccctgttgccgcatgcccggccgctccaagccatgtgcgtccaactcccggaggcagagctctctctccctcctcctttctcccagaatggcatgggcagagccccctttcctccctcccctttttgcttttttccccgaccggcaccatcgacccccccctctgccgcccgtgactgccaagttcgccacccccaccttgaccacacgcgacattcgagctcccttgaccatctaagtcggttccccctcctaaaccgcctcttctccgcctataaaagccaagctgctccccgctcttcctctgttcttgccgccttgccgccaccaccttcctcgccgttgcgcatgccggaaagtcggcaagcgcgcggagccgaaggggacctccgggcgccgtcttcttcccctttcccggcccgaggccgaggagatcccaacgcggtagccccgttctccctccccgcctttcctcttcccctctagcttgcgtagtggctcggtagccctcccgaacgcgcgtggatgccgccccaagccccgccgccgcccggcatagccccgctgccattgccgtccgatcccggaggccgccgctcgtcaccggccctcctcggtactcctctgccccatccgatgccgggaatgcaccccttgaacaccggagatgctcccaccccgccgaatcgaactcccattgcaccggtggattttcccccttttctcgccgccggcgtgcgccgccgcgattcatcgtcgccgacctccctccggcgaatccgagccgttgggtcgctccctcttgactccatcgtcactccggtgtgctccccgaagaccaaatccgtcgcgcaaggcttcggtgaactcggccgccgtccgccatccatctcggcttcccctttcttcctcctcccgccggcccgcgtggctgccacgtaggcgccatgttggtgccaactcggctagaccgagtcaaaccggccagccccgctttccccctccgtgcgcgcggacgatggtgcgccatgcggctgcgtatgggcccgccgccgtttgtccacccggtgcaccgttcctaagccacgcgcacccgaaaccctagcgccgcaccccgcgtgcgccctccccaccgtgaacccaaccaccgccatgtgggtcccacgcggtggaccgcgtccacccgcgtcggcctctttctccccgcgccccctctctttggccgcccctcccgcgcccgcgccggcccattaggtctggccaagctgcataaacccctcgggccgcgcctaagccgcccgaggaagtctatatggcatccctccttcctttctttttcaagggatttaataaaccctttttcccctattccataaatcatttctctattccaaaatcccatgaatcattttccttggtctcgcacaccagtgacactcaataatattcttgagaatattatttctataaatttcaattaaacttccaaaatccatatctcccgatccgtaactccaattgaccccgttccacttccaataattccgtaaaattgagatctatttaatggcactattatttagtctaaataggatccttttcttggtcttttgtttaggtttttgattgtttgcgtatagattcgcgaagctctgtgaagaccctgagcaaggcaagccacctttgaacatcttgagcctatatttgaatttaattatattgcttgaaaaatattatgcattgataggattgcactcaatctgcttgccccgtctgcaaggcagattggcgggcctacctaacttgttgcatttgatccttccattgtgattgttatatcatgttcccttgtaaccatctagttgcgcctcgatattcgtgcactctgtgcgagtatcgacggtcgccttcaaacttaaaatttgagtaacttcttgggtaaatcttagtttacaaaaggattggaaaacccgacgcctgagtcggtgccttgtgaaagaaaatgagttttaaaaataaaactcgcgacacaaggccattcctgggcggaatgcatgtgtggtcgcatttaaggaccgattccttcggaattacatccgagcatacaatagtgcgaccacacgggtggaatgggacacccctggctgagtaaattgctaatcgggggagccttgatgccgagagacatgtggattcaacggggtggtgtcggggagaacccccgggcttcctggcatagtatggtctgggacctaacctgttgttggtctgggacccctctcgtcggcatatggcaaccctgtgtatgctctcgaaatgccttgtcatgaaagcccttaggtcaccagacgtggccattctgcacgggctgggtgattcgggttagtaatgtcgtgtgggtaaagtgtaacctctctgcagaggttaacaaactattcgaacagccgtgcccacggtcatgggcggatgtgaggtgattccttagcgtagtttttgttttaccctgttttatgaaaaggtgttaaggttagggaaacctaatgcttgggaagcaattagctgtccggaagacagcgggaccgggagtccctggaagtgattggtcgtttggggaccactattatcgggaagtttggaaaagttggtttggtttggaaaaaataaaccagatttgaaagatcttgataaataaatttgttacttctcaccccgaccgagctgagacttgtctcgctctagttgtggaaagcacacacttaaattgttgaaaatcttgaaaacaaaattgattgctaaattaaccagccttcccttgaagcttgcattaaccacctaagttcccatggcttgctgagtacgtaagtactcacccttgctctatataaatatagttctgccagctctgaagatgaagttgaagtgaagtaaagattagggtttgtcctagttccctgctgctgcctgtggtgttgggtgttagaccgttggttccgctgctgccgctgttgttggtgtttgcctcgtccgtgtcgtcggttgcattctcgggctgtctgagctgcaacctaagttaaggtaaataagtccactatttattttaaggattgcaatgattcatatttgtcaccgtgggtaccagcgctacatcctgggactggtactgagatcgcggtttcgtaggaagcggctcgcgctgtttttcctacgacacgctcctatcaggtgccgttgtacggcggtgctggattggggtgtgacacaggataagtaagccgaaccacacatacacgctagacgaaaagaagctaccagaacacatcaaggcgatgactcccgatgagaggaaatcttacatagcacaaaggcatcaggaaaaggtgctagatgtcgctatgtacatagctatggcgcttgaatctacgcaggacaaggagtgtgtttatgccccatatgcctttgagtaagttgtaatatgcactaagagtatatacatataatcatggctcgactaacaatttcgtttgcagtgaccatttgatagtctttcttctctatccaaagtacaatgaagtcaacgtcttggattctctcgataaagatagcaagacctatcaggaatttctaagaattatcgatctgtaagttatatattagcatgacgtgttttaatatatgacgaatgtaaattaattatatctacaaacagtgcatttaaaagaggtattatcagcgaggcggacaacgcaaaaactcaagagaacgcatattcgtcctcaataagtggccggtgggtacatatggatgccaaacagtgctacttaattttcataaatgcttgtgtgtttccatttaataacctaatataccttataattatttgatgttgaaagtgtcacaagcaaccggtgggaacaatactatgcggatattactgttgtgagttcctaagggttaatggg

SEQ ID NO: 17981 - DNA, 1324 bp, Oryza sativa
tcctgcagccctaggttaattggatccgtgctattgcaaaattgcctattgtgaaaaatgccattacaatttgtctattcgtagccgtgccattacaaaattagaactgtgccaccaccgtcacgttttccatgcatcttcttccttctccgtcttcttccttctttctcctcttgtatcgtgggcggcggggctgtggcgcgctgccgcgctggggatgtgggcacggccatggagcagccccggtgggatggtgccggtggggatgttgccgctgaggttgacgtagcggaggttggggtgcttcacgagtgacggtggtatggggcagagggcgagcgcggcagtggtgggctttgctggctcggcaacctcgggcggccctgccgccaccgacgaggaggtggccgggagtgggcgggcgggaggcgcgatggctccacctcctcttccaccgctttcctcctgcgcagatctagctgccactccgccctacatgtgcggatccggcggcggtgctgcggatctggcacgggcgatggtgggaggcgcggcgggtgagagggaggtgcggcggctccacctcctcctccactgcctttcttctgcgcggatctagccgccgctccgccccacgcgggcagatccgacaatgtcgcatcagatctagcgcgggtgacggtggaaggcgcggtggcgggcaacggttgtctcggtgctgccgccatcgaggcggtggccaggagcgggctggcgggaggcgtggctccgtcagctcgctgagcaccgacggcacgcgtgcggcgtcgtcggggaggtagaaaagggctagctcagtgatgctgccagactccttggagcagaagacggcgggctcccaggtgctgcaattggtcgatggctgcttgacagggtcgcccagctacgcggggcggcgaggacggaaagaaggaagaagaagcgagaagggcttggccggcatcggaggaggaaagaagacgggagaaagaaggaataagatggaaaagggaggagttggatggaaaatgtaacggtagtggcacggttctaattttgtaaaattttaatggcactgctacgaatagacgaattgtagtggtatttttctgaataggcaaatttgcaacatcatatatccaattaaccctttaaaaataggggaaagccataaagtgtatgtgtaaccaccacctaaactggaattcctgagtgatagtccatagtagcaccagtgaaattttttgtttccatccttggcttgacttttagaagatgtcatattcggctattcaagatattttca

SEQ ID NO: 17982 - DNA, 2619 bp, Oryza sativa
cattagacaattatactataagtttactttactgccattgggcctaaaatacatgaccagcccacacaggacttaacccacacaaaaaaaaaaaacagtagcatcacgattcacgagcaatggatcaaaaacaagatgaaatattgaagaaagatagagcggagcttctgcaagctcaggcagagctctggtgccacacttttggctatctcaaatccatagcactcaggtgcgccgtagagcttggcatccccaacgccatccaccgcaatggaggctctgcttcactgcccgagctgcttggcactctccctctcgcggcaaacaaacgatcatgcttgcctcgcctcatgagattcctagtctctttcggaatcttcaaagaagacatctcaagggagggaacaacaacaacaacaagcgtgtatcagctcacaccggtatctcgcctccttgttgatggtattggcatgaacagcaacactgagcacacatgccaatcaacctatgtgctcgtgtgcgtctcacagcttcaagtaggggcatctttgtgcttgggaattggctcacgagcagcgatgagaacaccccatttggaatggcgcatggcatggatttctgggatttcaccggccatgatgccgagtatagcatgctgttcaacaaagggatggcgtccgacagccacttcgtggtgaacatagtcatccatgagtgcgccgaggtgtttgtgggggtaaggtcgctagttgatgtcggtggtaggaatggcgcgatggcgaaggcaattgctgatgcctttccacacataaagtgctatgttttggacctccctcatgttatccatggcaccccaactgatggtattgttgagtttgttgcaggggacatgatgcactttgttccgtcagcagatgttgtgttactcaaggtactataatttttgaagtgatttttttaggtttgcactacacatttttcctgtttctctaaacaaaaatgcacaagagtacaaaagaaaatgattgttgaaactgagcttggtcaatgcggcctatagtggagtccaagctcatggcggtaggaccgtgcggccatgggtggaagccatagtcgctgaacagaaccagacgccatcgctcctaaagtccaaaggttgcaggagggagaggggatgaaaaagggagaggccgacaagtgggtctgatgccacattggatgccaacataggcttaaaaccactcgtggttagcaaaggttagggaatgttaaatatccggttttatctagttgaagggggtaaatcgtacctttgtaatagttggggtaacttaataggcatgataaaggtcaaaagctatatacggttgtgtcatgtcttttgttagaaaaaatgaaataatggacttgtcttaaaaacaccttgcaactacgtaaccgtatattttacacccatcaactaacagaagttcaaagcttccaaaatagtacatcgtaagagcagtacaacccggtttaatggtgctttcttagttttgaaattcaaatatgctttttacttgtatgacacctaattaaaaagatatgtaaaagtagttaaatgtaagtgaaacaaacatatttttggatgtcaaaattgtgaaaaccactataaaaaaggctgggttgtactgcacttatttggaccggttttggtaataagagggtgcaaaatgttcggttcccaagatgcttccttttctttatcacctacaacacatgcgcacttgcacatctaaagtttgtgtcagatgacttgtatcttcacttaaaaagatgtaataattcataggttgtttttcctctattcccctaaccatgcctccagaacaaaaaaaaaatgatgaattgacctaattttgtactttggttgtggatggcagtttgtactacatgattggagcgatgaggattgcgtaagaatcttgacacgatgcaaacaagctataactaacaaggaagaaggaggcaaagtgataattatagatacagtgattggatcaccatctcaacagatacttgaagctcaactttcaatggatatatgcatgatgacgttgacaacaggcaaagaacgagaagagagagattggcataagatattcttggaggcgggctttacacgatacaagattatgcccatcttaggggttagagcacttattgaggtttatccataacatattagatgaatatgtcataaaaacaactttgtatctcgaacaactacatgatcctctttgtattatgaatatgttctacgttgattactcttaaatgtgtgtgaactccttgtattgttctatgtatgccagttagttattactaatctcatgtctacactacaccggaccaggtcatttgtgacgggtccaaatccttatcttcgacgggtttgtccctttgtcatagattagtgatcactgatgacttaacctcacctgtgacggttgaaggtccgtcaatggtgagagacacctatgacgggttacaattagcaaccattagtggtgagagatatttctgatgagttataattagaacctgtcacagactatgtcacctcaagggctgcaggaa

SEQ ID NO: 17983 - DNA, 1117 bp, Oryza sativa
ttgagaactagaatgttcaaattccaattttctagcaacatcaccaaagacaatgaaactctaaacacttccagtgcaccaccttcacgaaaaacaagacacatcatgcggctccaactaacaaattagtggcaacacatcagtcatccacccctgcgattaatctccagtggcaacacatcatgcggcttcaagaagaacacaccccaattaaaaacttggcaccgataacttgcaagatctaaaatcaaatcacaagaatacaaacacatacatcagtacccatctgatgcatgacggtggaggcatcgacacgtagtgcccacaggaggaggtggacactgtggcagccgccgcttggggatggaggaggcggctagcccttggaggtggctgctcggtgatggaggaggagccggatccggtttcccctgacctggatctggcatcccctaacttgcccttggaggaggcggctagcccttggaggagccggatccggtgttggagaggccggatctggcatcccctatctcgccgacgttcccgccgggcctcggcaccttgctcagcttgacgatggacttgacgaattgcgtgaagaaagcggccttgtcctgtgtgaaccgcctgacgaggtggctgcagcggccgctggatctcgcccttcctcgtctgtcggatctcgccacgccgacgctcggggatgagacgctgacgcccggccacatctagccacatctggccggcgcccggcggcatctagccgcatcggcgcccagtggcttggatcccggcgcacggaagaagggagaaagagggaggggcggaagaagggagagcgcgggtggaggcggaagaaaaaagaagaagaccgatgggcgtgggttcggagctgggaggagaggggagggttatgagagcgattttttttatcatctttgacgggcacacaaatatttggcccatcacaggtgactttacctcacatctgacgggttcctttttggcccgtgtcacaggtgaccttttttttttcggggaaatgggaataaattactcaggaataatattgtttcttacaagatatgaaatagaaacacgactagagaggtcc

SEQ ID NO: 17984 - DNA, 12075 bp, Oryza sativa
  unsure (1)..(12075): unsure at all n locations
gatcgaactcttctacatcgtcaagggcaacatcctgaccctcggaatggctacggtttgttttgtatcgactactcttgcatgttgggcatctgtccaaatcctcgtactctttatggaacaggatacagtggttaacacacgcgtgtatctttcgcacacccaatgacaacgggcatataagcttcttcgcttcataggtgcttgttggcagggagttgggttgcggaaaaagtttcttcaatagaaccaacatgtcgttaaaactactgtcggaccaaccgtttctggccttcaatctcataagctcaagcaccgttcgcaacaatgtgaaatccttctcgcagccctttgcctcattgtacaaaagatcctttgctgcctttttcaatgcatcaaagttatccaacccatgagcggacccagcaacaacctcaggttcagcatgacacaacatctcttccaaatctgcaaaattaccatcatctacgctgacattaccatcatcggcatcatcaactgtaccatgctgaccattgtcaccaaaaacatcatcatcatcaacgggttctattgcatgcacttcttcttcttcttcttcttcagctactacaatgacatcctcgtcccagctcaacacttcatcgcgtactgtaacctggttcggaacttgcttgcttgggatctctccatgatgtgaccaatttatgtagcgttcaataaatccatgcgtcattgttggtatttcttaacgacattactagaaatataattcccagcaatggcgtagaaatacttttggtatattatggttaagagttcatccgcaagcgcacatatataccattgtagcatttcacattctagttaaccgatatactagctaataccctctattcgatgccctcctggtacttcgagaagccactcctgactgccgagttccttacgacaacccgtcatgaatacggaggaataccctccttagggaattaacttaggattatatactggcgcggaggaatacccgtactgagctgtcaccatcagcggcccacctcttatccgcaatatataaccccaaataatgatatcccataatctagacaccacgcctaaactaccagatactgctctaatatcatcgtcatgacatagagtaattgcatatgcaaacattatacccgcaccaaagcatctcctagataagctagccgtacagtataacatgaacataatgtaaagtaggcattcatatactcggaaagtataccataaatgtataaagaagagtattccaataaaagtacaacgcttacaaaagaggaaaggaaagctactagagccatacccgaactcttccaaaggcttccggactcctgatttctactattcctattccaccagctagatactactaaactaaacttgagagaaatgagagagctcttgcttgaggtgtgtgaatgaagtgagaagaggagctccttaaataggctgccaatgacggttgtggcagttggaatggtcggaattgccctccaaccatcattggggagtgatccacgccgtccagccaaaacctagatccaacggtgccaggggaggttcgaccaaaccaggggccggcccatcctagcccatattcgacaggtggactcctttgttgttctcctccgtagacttgtgaattttggcccagtgtgtcgtgtcaattctgagttcttggcccattcatgcataagtctaactctcgacatcatccgattgatttatcgtctgtgttgatgtcgattctcctccactttattgtcattctctgcaaaaggttagtagacctaatactagtggaatattattattctaacagatatatgcgttgcaagcatggctagttctcctctattttggtaatattgacggccgaaactgatcaataacgaccgtcaacagtcaccaagtgttgctcgattacagatggatccttccaaattttctgatttttgcagtgcgcgcatggacatccatgccctgtccgccatctatgcattaattaattaattacggaaaaaataatacaactttagttagtttaaatattttgaacacgataattaaagctagccaaaaatctgcatatataaagcatacaacttgaagaattaccaaactacccttctttctcttcttctcttcctagctagctcattcttttgcagttaactaatatataaatctgctaaacataaacctatcaaaaactagatatgtatatggaacatcgatcatgcacaatatttcttgcaaagtttgcccattttgagctccaaataacaaataaaaaatgtttttcttcctccatgtcaagtactttttgcgatgaaaaatctcaacatacaaccaataaaaatgaaaaaaaaacttgacaaaaagagtaggagaaagtataactaacctctggtacaataaatctttcaaaagattcaagatcaaaaccttcccccctatgtatgtgttcttaagagagagaaaatcgtgctcctaatggtgctcgaagttactgtagctgggtgatatagttcagcgcattttccctggcggtcgtcatatgtcggttcgtttgaatcgccattgaaaatgattagaggtggcggacggtttagatggccgccagcgaagataccataccttcgttggcgtcagcttaagagggccgacagagaagatatcctatcttcgctggcggccttcttaaatagatcgctagcgaagatatgtttctgctggaggcccttgacccccccaccccacaattttctgcactggcggtttttccacatagccaccatgaaaaatattttccaaacgccatgaaaaatcgattttctagtagtgtacatgcctcttttccgtttggtgaacaggtaatgcaccatgtccaaacagtgtcagcaaatggatggccgctaaatccaccaatcagttggcggcacagacggcagcttgtgataattagataagatagagttaatattgatgtgacatacatcattgagagaatgattcatcagagcttgttcataacgggtacttcctccgtcctaaaatatagtaacctatgacttattctaggattatgaatctggatatgaacctatgactcattcggactatgaatctggacatagtgcatgcatgttcagattcgtagtgctacgatgggacggaagcagtagctagctattagtattggtgcactgtacaatcagcagtaatagggagaaagatatatcgttgtctttccaaaattaattatgcgctagttagatatagagaaaaggttaatgcaacatggggaatggtgactttcgcataagagggtggagccactgtagtggactagtggccccttcttcacatttttgttaaaaataaaaggatttactttctgttattctattaatatccccatctattcgtcactactacacatgagattttccttgacgctggccccggtaacttccaagcgggccgtaagtggctccgcctggaacaagccgaaggccggcgccgggcttagggccgcacaggataatgcattatcccgtgcagcccacgtaaaccgaccgcttgcgatggtcgggaggctacagaagcccccagcccgaccattgtcatgataatccgacggttttctctctcctaaacatacacaaattaggggagaaaggttttagatctgaaatctttgattgggttacatataaaaggtgtagagcttgttctcctccttcatttgcttcttttttgtcagttttcatcagtgcaatgcaaagaaacttgcacttttataaatggaatagtgtaggcagttgacggagcgtggggctcctcaccgggagaccgcgcaggcccccctttgccggttcggccgggggcgctaagtgaggttcttcgccctcgatctgaggaacgtcagcgagaaaggaaatgcgcaagacacgggcgacgtagacaggttcgggccgctgagaagcgtaacaccctactcctgtgttctggtggatctgtgtgtgaaggaatccagagggcggagagcgagagagagttcaggctctaggaaccattcgccagagtcccaactccccctcctttctttcccccccccttctcttttcttaggcctgggcctcctttttatctggtcaggcgtcaccacatgggcctctagctgcctaagaagggaaacatgctttttacaatcagggctaatctacagccggaaatgacttctgacaagcagagcgcacgtctcctgccccgctcgcccgcttttcccggtggacgcccatttcaaccttcatttaatggccagcgacttccttgccatacttgcgctgaagcctggaacgaatctgaccgggactgacataccaactcctggagttggcacgccggctctggctagggacgagagccaggaagctctcatcattccgacgggacggggcgaggcgtgtgacaggccgcctgttgccacctaacccgcgatctgaccggtctgtgaccggtcactcaccgcgaccggtcacggaccggataagcgtgcgctgcgccgcattaaatgtggcgtggcgcgctcgtccaacctgccataaatgcggttaggtgagcccngtgggctcacctaacccacacacgtggcgccaaaaccacagggggtcggggcgccccagccctcggggcaggaacgggagcggcccgacccctcgggcagacagagggaggggtggccacgtcaccttcgggcccgacccccccgaggggtcaggcaacgtgggtgaccgcggctacccaagcctctagtcacgatacccccggccccatgtcaccgacagtagcccccggcgttacgccagggcgatcgcccccctcgagggaagcgctcgggcatgatgccactccttaggcccggtgacaggtggggccggtccctacaggcgggcagaaacccagcggtcgcaaatcgcgagcatcggcaagggaaaaccgaccgacaataatgagcggcctctttaagaccgctacattactcgagcagcgcgcgaatcgggacgagccggtttgtttcgcctggagacatgatgacggcgcatttcacggttggcgggcgtagttaatgcgcgcacgatctgccccatctcgactgccacggccgcacatctgccgcgtgcgccgcaaacgggcgagcggggttagtggaggcgtgggcgcgagaaacgagggggcgaggtagtgggcgcgggaatcgaggagccgggcatagcgttggcaagggtgtaaagacgccgagggagggattcgtttctttcctctcgccactcttttccttgccttcgccacttgtgctctaactcttcgtttccggtgccctacccttgccgcactcgctcgctctcaagctcctcctccgccggcgtcatggcacggggctccgcaccgctcgacggtagcgtgctgccgccttcccgcatcgtgagcgagaggcaggccgggctgccgcgccgattcatgccggaatctgccaccggccgggaggtggtcgcgctgggcgagggacgcccggcgccacactacccggggcggtccgtcttcttcctctctttcgcaatggcggggctggtcccgccattctctatttttttcatggatattctggagttttatgatctccagatggcgcacctcacccccaacgcgataatgacgttggccatcttcgcacacctgtgcgagatgtttatcggggtgcgtccatctctccggctgttccggtggttcttcaccgtacagccggtgtcgccgccgacggtagtcggtggctgctacttccagccgcgggggcaggtgctgaaccgctacattccctgcgtcctccgtaaaaagtgggacgactggaagagcgattggttctacacccccctcgccgacgaagcgtgcctccgacttccgagccagcccccggcgcaggcctccagctagcgggcgacggtagatctgggagacggctacgacgccgttcttgaccgcctggcgggtctgcgatcccatgggctcacgggggccatggtgttcggcgactaccttcatcgccggatcgcgccgctccagcggcgcgcccggggcgcctgggagtacaccgggcccgaggactacatgaggacccaccaggggcgcaaatgggactgggaccctgaggacttcaggatggtggtccaacgggtgctgaatctcagctccgtggaggcatccctcatcccccaaggggtcctccccctctgctgcgatccagagcgcgccaagatcctgaccatcatacaggtggtcggggtgtcgggggagcgggccccccgaggccacgatggcgcgggcgggagccgcaggggggaacaatctaccccgggagggggtcgtgcttctgggccccgcgacgggggcccggggggcaaccgccctaccgacacccgggggaagaggaagcaggagggtactcctcccccatctcctccccgagggggcggggcgatgcgtgccagcagcaggcgcccggagggtgccgtgccgacgccgcagcccgagggggagcgaaagaagaaacggctccgcaagatgggggggatcgtaccatgccgggggaacctcatctcgcccccaaggtggtcgtttagccgacctccccgcaggttcgtccccgcgcccaccgcggccgtattcattctcccatctcccaaggcgagttttcactcacccgtttctttttgtcttctggtttttcttctgcctcagcgagatcccgtcgcgcccccccccctcccccccgccattccaagtccggccggtctgaggccgaggagacggcgactgcggaggcccggaggcgggaagctgaccggcgagaagccgcggaccgcctccgggaagccgaggaggctgcccaggaggccgtccgggttcgccaggctgaggaggtcgctcgggagcaggccagactccgccgggccggggagtccgtccgggtggcagaggcggcgcgcgcacgccaggcggcctgccaaacccccgactcgactccgcccgaggcgacgacgacttcagaggccacccatgacgaggccgcgggcgcgccgctcgggcccgacccctcgggcgacgcttgggacgagccaggttcggggggcgcccccgagtccggcacgtcgatcggcgggtcgagccgcgcggcacccacaccatgggggctctcccctcggccttccgctgccccactgagcgcggagcccttcctgcaggccttggccgccgcgaacagcacggtgctggacgagttaagtgcccagatggaggccctgcaggcggagcgggcggagctcgacgcggcgtgggcgcgcgtcgaggaggggcggcgctcggtggaggccatggtggaggcgggtcgcaaggcacaccgccggcatgcctcacagctcgaggcccgtcgtagggacctggcggagatcgccagggaggtggaggaggagcgggagactgccctcatcgccaccgccgtgctcgacgaggcgcggagcgacctccgcctccaatacgggagccgggcggcggagctggaggagaagctcgacgccgcccggggagtccttgacgccgccgctgcccgggaacggcgggcggcggagaacgaggcggcgtcccggcggcgtgaagaggcccttgaggctcgctccacggcgttgaaggagcgcgcccgcgccctggacgcgaaggagagagacctggcggaccgcgaggccgccgtcgccacccgggaggcaacactggcggcgcacgaggccgcctgtgccgaagaggagtccgcactccgcttccgcgaggacgcgctcaccgagcgggggcgagctctcgaggaggccgaggctgcggcgcagcggctggcggacagcctgttcctccgcgaggcagcgcgggaggagcaggcgcgccgcaatctggaaggcgcccgcgccgagagggccgcactggatcagcgggccgctgagctcgaggcgcgggcgaaggaactggacgggagagcgcgcagcggcggggcggccgcgggccacggcgacctagtcgcccgcctcgcagccgccgaacacaccatcgccgagctgcagggcgcgctggactcgtccgccggggaggtcgaggccctccgcttggcgagcgaagtagggcccggcatgcttcgggacgccgtctcccgtctagaccgcaccgggcggcaggcgggcctctggggcgggcggcacgcaaagtacgccgccaaccaggggggcctcgcccagcgcctctcagagatcaccggggccctcgagcggctccccgaggagctcgaggagacgatcaagtcatcctcgagggacctcgcccggggggcggtggagcttgtactggcaagctaccaggccagggaccctgacttctccccgtgggcagtgctggaagagttccctccaggaaccgaggacagcgcacgcgcgcaggtccgggacgccgccgaccacatcgtccacagcttcgagggtatggcccctcggctcgcgttcgcgctcgactccgatgaggagggcggtgacgacggtgcggacgacagcgacgatgaggccgacgccccgggcgcgtcggagtgagccctcaggcccccgccaatcttaataacttttgcttcttcttccgaggccttcgggcccccttcttgtataaactgatttaatctgtaatcaagtaaagaggaaatttctgcatcagctctgtttggtgtgtgtatgagacgaggatggtctgtgccacggtccttctgtgtcttggcttgaacaagggctcgtgcccaggtcccagcctcaaacggcgcgggtcggggctagtgcctggggagatccacgtgtcgagactggccaggccgggagcgcggtgaccgagggttatggatgacccgattgtgagcctttgccgattcccccccggagttcaccgcgccccggggcacggctcggttctgggccccgtttggcgattttagccggcccgggccaccaagggcagggtcgagcacgggcgtgctaattcaagccaagattcttcaaaaggaaacgatggcacagacacagtcctcaggaaatcgaaaatgcttttattgagatacggaagagaaaaaaggtaagtatatgcatgtggtagcccccggccaaccctgcacgcccgggggggtgcggggttggcccaagcccgaggcatgacacccgaccccgactaggggtagaagcgacgaaggtgttcgatgttccacgggttaggcagctctgtgccgtcgcccgtggccagccgaacggagcccggccgggggacgccgatcactcgatacggaccctcccacattggtgagagcttgctcagtccagcacgcgtttagacgcggcgtaggacgaggtcgtcgacgcagagtgatcgggcccggacgtggcgctgatggtagcgccgcaggctctgctggtagcgcgcggctcggagggccgcgcgccgccttcgctcttccaaatagtcgaggtcgtctcggcgaagctgatcttgatcagcctcgcaatacatggtgacccgaggggacctcagggtgagctcagatgggaggaccgcctccgcgccgtagacgaggaagaaaggcgtttccccggttgctcggcttggcgtggttcggttcgcccagagcaccgcaggcagctcctcgatccacgagtcgccgtccttcttgaggatgttgaaggtcttggttttgaggcccttgaggatttccgcgttggcgggctccacttggccattgcttctggggtgggcgggggaggcgaagcagagcttgatgcccatgtcttcgcagtagtcaccgaagagctcactagtgaactgggtgccgttatccgtaatgatacggttaggcaccccaaaccgagcagtgatgcccctgatgaatttaagcgcggagtgcttatcgatcttgatgaccggataagcctcgggccacttagtgaacttgtcgacagcgacatacagatactcgaacccacccggggcccgcctgaatggacccaggatatcgagcccccagagagcaaatggccacgaaagaggtatggtctgcagggcctgggccggctgatgggtttgcctggcgtggaactggcacgccctgcaccgccggaccaggtcgaccgcatcgttgagagccgtcggccaatagaaaccctagcgaaaggccttgccaaccaaggtgcgtgaggcggagtgggctccgcactcgccttcatggacatcggcgagaagctcgacgccttgttcccgaggaatgcacttcaggacgactccgttagccgcacgccgatagagggtcccttccaccagcacgtagcgcttggagatgcgccggacgcgttcactcccttcgcggtcctcgggtagagtcttatctgcgaggtacgcctggatctcagtgatccaagcaatcaatctaggggagctgggagcgctcccctcgggtcccgaggcctggactccgacgggcctcgggggccgttcaggcgcgtccgtctcccctagggggtcgggtcgcgccgacggctgggcgagcctttcttcaaaggcgcccggtggggtctgggctcgcgaggaagcgagccttgagagttcgtcggcgaccgcgttatcccgtctgggcacgtgccgaagttctatcccgtcgaagtggcgctccatacgccgcacctggcgcacgtaagcgttcatctgcgggtcagagcaccggtactccttacagacctggttaacgaccaactaggagtcgcctaacaccaggagacggcggatccctagtccagctgccactctgagtcccgcaaggagtcccttgtactccgccatattgttggtcgcccgaaagtcgaggcagaccaggtatctgaggacgtctccgctcggcgaggtcaacgtgacccccgcaccagcgccctgaagagacagggagccgtcgaactgcatcacccagtaggcggtgtgaggcagctgcgaggggcccgagctggcctcgagggcggagacgggctcgggagctggggtccactccgccacaaagtcggcgagggcctggctcttgatcgcgtggcgtggttcaaagcgcaaatcgaattcagagagttcgattgcccatttcaccacccgtccagtaccctctcggttatgcaagatttggccgagggggtaagatgtaaccaccgtgacccgatgcgcctggaaataatggcgcaacttcctcgaagccatcagaatagcgtaaagcatcttctgggcctgagggtatcgggtcctggcgtcccggagggcctcactaacgaagtagacgggccgctgcacctttcggcggggccgatcctcttcgccaggggccgtatctccagggcgctcttcgtccgagaggccacgcggggcgcactcggcttctgtgccgacgacctcggggtcagagggcgacaggcgcggccttcgcgcagtggccccggggccatcctgggggtcgggggcgcctggcaccgtcggacaagcaggcggagggccagctccggccgtcgggggccttgggccaccgttcggctcgggggcctctcctccctgctctctcccgggtcgagtcgatgcagggtggggatgcgcggagtgagggttgtcctcgtcgcgctccacgaccaacgccgcgctaaccacctgcggggttgccaccgggtagagtagcaacggctcatctggctccggggcgaccaggactgggggagaactgaggtacgccttcaactgagtgaaggcccgctcagcctcctccgtccaggtaaaaggcccggagcgtttgaggagcttaaacaggggcagtgccttctctcccagcctcgatatgaaccgacttagggcggccatgcagccggtgacgcactgcacatccct

SEQ ID NO: 17985 - DNA, 1050 bp, Oryza sativa
agagggatccatgatagagggataaacaaccgaggaggtcgttgtgtgttgcattgattacctaaaagatgggaaagcaattggtttaccggtacctcgacatgaaggtagattatctgggaaaggaacaagaggaaaaaaagaatccacgacaatgactacaaaaaagtgaaagatgctcatttcactgtgctgcagcaactcgcaatagtggagccgtacatggagcaacacctgcaggaattacaagcaacaaatgtggggcgatctaatgcatggatcatgaagaaacacaagcatcactttactaaatggttcaagaacctctatctaccagatggccataccatggaagaaagaacaattaaaatgctggccgacgggccatcaagtgtgtataccttgtggcaagcatatgatctgaatggatacacgttttacacaaaagcgaaagacaaaaggagtgcatgccaaaacaatggcgttcgagtagaagcaatcgacacaactgggcaaaagagcacatactatggattcgaagatgaaatctgcgaactagactacgggccaaatatgcagattccactgtttcggtgccgatgggtgaaacacccagccggcgtgtttgtggacaactttgggctgacaattgttgacttcgacaacgtaggccacaaggatgacccatgggtgcttgccgatcgggtcgctcaagttttctatgtgacagacccatctcatttgaagaaagacatagttatttcgagaaaacaaaggattttgcaagttgatgatgtcgaagatgtcgaggcatacaatcaatatgagaacatgacattattcacagattttcgaaacaagatattacgcgtcgaagaatcaattggggaatcgctgaagccatacttgagaaatgaaggtgtagggaaaaatgttagatgctaatttattatgtatatcatattggacgtatcgatgaatttatttgtattataatgcgtgacaatgatagatgatgaatttttgtatatggatatatatggtgacatg

SEQ ID NO: 17986 - DNA, 2869 bp, Oryza sativa
ccatcggcaccgccagatccagctcccaccgtcattctctccgccaccgccgggtcctcgtcgtcgacgctgcctccacctcggccagccgtctccacctcaggagtcatcaccgccgccgggtcctcgtcgtccatgccgcctctaccttggccggccgcctcaacctcgggagtcgccgccgccgggtcctcgttgtccacgccgtctccacctcggccggccgcctcgacctcgggagtcgctgccgccgggtcctcgtcgtccacgccgtccccccgccaccgccaggatgccgccgccgcgcagggacacgtcgtcgccgcctcctttcaccaaggtgagcccacgccctccgcctcccctcttctatcttctctctgattaaccccatcttctcctcctcagccgcgccgggactcgttgttgtgccaggaccgtcttcaccgccgccgggacctcctccccgccgactcttcctcctctcggctgccgcgccaagaccatcgttgccaccgccgggacctcctctctgcctcttcctcctctcaactgccgcatcaggaatcgccgccgctgcctacgctactcgccgggcagccgaagccatcgtcacacgcctccaggtacatccccctcctctgcgcatcctacctatgctggaaatgctgatgaatgctgagaattgatgaatggtgatgaaaattgatgaatgatgaatgactgaattgagatgaattttgggtgaatgcaaattggttggggggtttgcaggggatttgcaatgtggcagatggcactgcaattgaatggttgcaaatgtgatttaaaaacatgaatgtatagatgatttaaaacttgaatgttgcaaatggttgagatcaattttggatgaatgcaaattggttggtaaaatttgggggaatgcagaaatatttggggggtttgcaatatgtggcagaaggcattttggatgaactttataatttatagttacagcagtagttaatggaattttggacgaacttttggatgaaattttggatggaattcttaaatgaaaccgcatatatatataattgtaacctttttttttcaaataagttcagaatgttgcaaatgtgatttaaaacttgctattttgacatgcatactgctttatatgttgttatgttcccttttgaatcagaagtgattggttgatggatggatgaattgatgaaatgatatatttttttcaccccatttcgtaatctgtaattgatatatattgatgaaatgatatatatgtgagatgtagttgggacttagggattattgagatgtcatatctatagctagcccaattcaaaattttggatgaacttttggatggaattatgaactgaaactgcatatgaaattttgctattttttgtcatataagttcagattgtagctagtttgaaacttgtggattgttgctatttttttttcatataagttcagattgtgcaatatgaattggttgatggatggatgaatttggatagattttatttgctgttttgtttgactgatgcactgaaactgcatatatatcatcgtgctcttttttccatataaattcagattgttgcaagtgtgatttaaattctgaaatccagtgatgtatggctatatatatggttttgcaatgaaatgttgtagtatctgagagaatgagtgtttgaaatatgagagaatgcaattttgggtgaaattctgaatgcaggaattgggggtgaaattttcatatactctgaaattctgaaatctgatatgttctaaatgaaatctgatttacattgccatgaactttgtccataagtagttcatatgtgagatgtagttcatatttcatatgtgcactttgagatatgtaaactttgggacttaggggttattgagatgtgagatgttatatgtgatatcaaaccatcacagaatacgaagtgcatggggaattttgttggattggtcagggtagtccatggacggaaccgacctagacaccgaaattttccatgcacttcgaaatctgtcattctttgataattaaggaacttaattaggtttagggtttgaaatttagctgaaatggatgaattgatagattggccgtacttttaatgtagttcctatgttatcaagccatcacagaatacgaactgcatgggaaattttgttggattggtcagggtagtccatggacggaaccgacctagacgccaaaattttccatgcacttcgaaatctgtcattctttgataattaaggaacttaattaggtagtttgaaatggtcagggttggtggattgtaatattgttgtcgttaccaatctcattgattgctttaagcgatcaaggagtttgttggcgataacaatattatagttgtagtacaaaattagtatctaaattttgccttcttttcggacttacaataagaaaatgattgcatttcgcaactaacataaattcaccttcaaaggatatcaatcgacaaacccacccaagagcaacccacaggtgacaagggcaaggaaactcaggccgtcatcgaggaagatatttgcatgcaagtagtcacggaggaatcttcgtcatctagttgctgttttagagcctgagccgagctatcctttcgatgatgtaacggaggatactccgtgcaagcacttgattctggtcggtagggtgggaaagaaaatactcattgcaactgggaggttcatactaggccgcaggtttcattgccaagacattccggatgactacgccaaggtagaggtccggacggtcattgaggcttactggatgcacgagctcgactttccaactactgag

SEQ ID NO: 17987 - DNA, 786 bp, Oryza sativa
acaagcaaagcctacaaagctagcggcgggtgaaattgaagcggtgcctgaacagccaatgcccgatcaaccagagccatcacaaccagagccatcgcaaccagaggaatctaagggtgccgatgtgccagtgatggtaaggacgcacaagcacaaagcaaaaagtgcgtccaagaaacagtatatggtaacggcattccgaggaagggagaaagatatcataaatgccgaatttgataaaagaaaattaaaagggttcaagcaaaccatggatgactatctcaactatatcaattccccagacgtgccacacgaatttgagaatggcaaaccattcatttacgactggcaactaagagaaggaccgtggcaactaagaaggtggcacaattggtacattagggcaagcaccatgaaaggcatttcatcattcacagttgccgtgggggagaacatcttctggagcggtccttgtctactccaagtccatttctccgatatgcatcccctctaccgtaggaagaggctggacgccaatttaattgccatctggtgtctgtaagttctagacttgaacatgttaataaatcactacacctatatgcgtagctcatttgatcatccattgttggcaggatgaattacgtggaagctgaagagatgaaaaaacctgtcgcctacctaaacccgtgcaggatgtaacgctccgctttctgcgggacgttaaaagctaatttattgaaaatcctaattgcgaaaattttgttctttgaggggctgcaggaa

SEQ ID NO: 17988 - DNA, 6994 bp, Oryza sativa
  unsure (1)..(6994): unsure at all n locations
cctgcagccccgcacacacgttttcaggtttcagtacgagctagctagccaacacccgtttgcagcagtggcgttttgccagaaaccaaaatggaaggtgattttgttatttgtgtaataacggtggagtttaatttccttagatatatattcagagactggctaatgactgggtaattataactgcaaaacacttgggctgattattatctcccacttggccctagtcgatttcagtgtttgttagcttgcaggctaccatgactgaatgattgattattccgtaatctgtagctaatcagatcggatacgctaatacggcgcagtaggtatagggaggacaaagtccacaggcccagtagcactctttctgtcactcactcactcactcactcactcactagagttatagagcagacgactctctcactgtcagtcctcatgaaactgaaagctatgaaaatcccatcaaaagaacttgaccgtgaaaaataccccaattaaattacataaccatctaattttatgatgatagtttggttcgttaaaaacctaaaccaattaggccccgttctttcacgattaagatataagtagattttagcacggtttttaaactgttgaacgatatgttttatctgaaaactttctatatttatatatttccttcgtttcatactataaattgtttgatttttttcccagtcaaactctattaaatttgactaagttttttgcaacatataaaatattaaattggttttactaaatctaatattgaatataatttgataatatgtatgttttgtgttgaaaataatactatatattttttatatatttggtcaaacttaaaaatatttgattgaaaaataggtaaacaatttataatatgaaacggacggagcatcagcatattttaagtttgcaataatcaaggctcaattatgcactaatgttttttttcttgttttgtgtaagtaatctgagccgttcgatcacgcctcttctctccggatcacacgacacccaccgtttgcctactttttatctccgtcctcttggattggatgcgtccgacactcgagccacaccgaatcccaaccaccattgccgcgccgagctcttcttcttcaccatcagcgaagcagagcagagcagaagcagagcgcggagatatgctcggaggtcgacggcgaggtcagcagcaagaagcgaggtagcgggcggcggccgcagagagacatgtggacgccgtcgcgggggtcggcgagcgggcggcgggcgacgggtcaccgccgcatcgcggactacctcgccgacgaccggacggaggcgtcgacggagaacgggtcgttcaacacggcctacagcgacgagctgttcgcgccgacgtcgtcgtccgccggcggcgatggcgtcggtggaatgctgccggcgttcctcgccgaccagagcgacctcgtggaggtcatgctggagctcgacgaggagtccatggtggtgcggagcgtgacgcccaccacgggcgcgctgtacgggcccacgtcgttggccgggggcggcgccgcgcacacgccgccggggagcgggcggagcctgagccggtgctcgtcgacgtcgtcgcggatacgcaagaagttcgcgtggctacggtcgccgtcgcccgcgccggcgcctcgcgcccccacgccgtcggagccgccgccgccgcgggaggcggcgatggccgcacgcgagcggcggcgcatccaggcgcggctgaaccgtgctcgctccggcgccaggcgcgccctcataggcctccgcttcatcagccgcaccaccggctccgccgaggccgccgagctctggacccgcgtcgagcaccgcttcacgcctctccccacggctccttttgnncccccccggcganccaacttcggcgtctgcatcggtaagcaagcaaagccatcctccatgtccatggcgcgccgcgcgcgggcgcgatcacgcgatgacacggcgtacggcgccggcattggtgcagggatggaggactcgaaggagttcgccgtgggcatcttcgacgcgctggcgcggcggcggcggcaggagctcgagcggatcagcaaggaggagctctacgacttctgggtccaaatctccgaccagagcttcgacgcgcgcctccaaatcttcttcgacatgtacctaagccagccataaatccaaccaaatttccttcgaattttgagttcgtgcgtgtttcgatgaatttgtaaaaaaataaacgagtttctttcagggtggataccaacgtggacgggaggatcactagggaggaagtgcaggaggcaagtagacttaattacacttacttattactccatgattaacttgtaaaatcactggacagtaacattttagaagcttccgttgttgcatggctaacgacattactactaccgtaactgtcactctcactctcacagcatttccagtgtcaaactaggctacacgaatgattaacttcactgttagttaaggtaattaaataatttttactgcatgtggttatttttttttttacagctgatcgtgctgagcgcgtcggcgaacaagctgtcgaagctgaaggagcaggcggaggagtacgcgtcgctgatcatggaggagctcgacccggaggacctcggctacatcgaggtgaggatttcgctttcgccatttctgtgctctgtgtccgttgctgcttgagcttgactcgtcttctccggcgacggcgtggtgcagctgtggcagctggaggcgctgctgctccagcgagacgcgtacatgaactacagccggccgctcagcagcggcagcacggcgcagtggagccagaacctcggcggcggcggcggagggcagcaaggagggcaagggcaggggcaggggcagtcggaggggaggaggaacgactggaggcggcggtggagcccgcggcgagcggcggcgagggcgcaggtggcggcggaggagaactggcggcgcgcgtgggtgctggcgctgtggttcgccgccatggcgggactgttcgcgtggaagttcgtgcagtaccgccgcacgccggcgttccgggtgatggggtactgcctcccgacggcgaagggcgccgccgagacgctcaagctcaacatggcgctcgtcctcctccccgtctgccgcaacacgctgacgtggctccgctcctcctgggcccgcttcttcgtccccttcgacgacagcatcaccttccacaaggtaggtactcctcctcctctcgagctcaccgccggtggttgggaggtcgccgtcgccggagttcggggagacgactcgtcgcccaatgattggcggccggtgcgtctctgccttgtgggcccgggtgggccggctcgggatcttctgcggctcggcccatgtggggcggtgcgacttttgggccgtgtaggtggagagtagctcgggctttaagtgggccccaccggggcggtccaatcagtgtagcgtggccggggaacccgcgggtacagaagatccccggcccggtcggctcagggtcaaagcgccggtcattcaaaagtctccccgaccgacagggctcccactgtcatgtggggccactgtaagctactccaaccggcagggcccgtgttcattaagctaagctccaggcataaaacgtttgtaaatgtacttataggatcaaggtggtcaagatcgcaataatcgtttcttctgacattagcaattataaatttaccaccctcttaactcgttatcataaaactagaatatgaatagtgtaaagcattttattgtaacatataaaaaccattgataaatttacaaatacccctgcttatacctatgtaggatcagtcgtcatacgtcaaatttaaattttaaaagttaatttttatttttttaatattttgtttttaacattttctttggaatttaaaacacgtatataaaaattttacttacgctccgttcgttttttctcttaaatggcaagaaaaccggagcaaagaaattaacaaataattaattaattattactccattacaaacttaaaaaatagattcatttgaatttttaaataaaattttatataaaaacattttataaaaaatacaccgtttaatagtttgggaaacgtataaaaaacaacaaagttgaagtttagactttttttaggtaacttttttttagggaacgaagtttagagttggagtttagaacgggcctttataaattaattttgattgtttcatctactttttcacaactaattagttgtagagcaaagagagcgaggctaaaattagcacattgttgaggttgctagtaattgcaaaagctaaaaaactttggctacacctgcagatcatcgcgacggcaatcgcgctgggcatctgcacgcacgcggggacgcacctggcgtgcgacttcccgcggctgatcgggtcgagccgggaggagtacgagctgctgctgtccggcttcttcggcgcgtcgcggccgacgtaccggggcctcctcgccggcgtcgagggggtcaccgggatcgtcatggtggtgctcatggtggtctccttcacgctggcgacgcggccgctgcggaagcgggaggcgccgcgcctcccgttcccgctcggccacctcgccggcttcaacgccttctggtactcgcaccacctcctcatcgtcgtctacctccttctgctcgttcatggctggttcatgttcctcgtcaccaagtggcaccagaggacggtaagtaaagcttatattagctaccttgtcacgtcatctttacctttcactatcagagcttagttctttttaatatattcatcagattattggaaggaaatatttttttcacgcttaaaaatatatttaagctatatgtttatctatttatcaaaatatctaatttgttcctataatgaagtactatataattcttatcaacaatctgttttaaactgagcctcggagtacttgattataataagatcctattaaactctcaaaatctagaataatagctgtaaaagttaagaactattataattttatatacttatttcgatatccttaaaaaaacttactactacattgatatgaaataatggtaaaaaaagtactacattttcaatattgtttttttaaaaaaagtcaaatgctaattactctgtacttcttaccgtacaatagattctttttgctaggatgctcatcacagatgccagtaatttgcctcgtggggtagctttcgtgagggcgacatttttccggttaattttgatccttccaaaaggttgcaattgcacgtttttttgggttctagcatcgatcgttttggatgtgtgctctcgctcgctctcgccctctctttctcctttggtggcttttgcttttgttatccatttgttagggtcatcctcctcctcctggtcctgcctgttacggtgatgggcacagggcaccattggaaaaaaaaaggagagaaattttagttgcaaattaagggacaattgacctcttggggggccggccaaaatcattgcaaaacagaaaaaggaaaagataattaggacattacaccagaaattatttagtgagtatcaagaattcaaagttaaattttaaggtcattagtagtacgtagttacacaggcacatcaatttatttttgggtaggtccatgctttggacattggacatggaaggaagatatgtagaccaccattgcactgcttcaaattgctttccttggaggaaaaatgacgtgtgcataaatgtgagtggagcccacgtacatgtggggtccaggatgactagatgcatctctatccgtgtccaacactccaacctgttttagatagtcttgaaaccactgttcaatatcatcatgttgttttcaagttattcactcgattatgaaaatagattatttgctccacgctcttctttttaagcttattcactaaattattgaaacgggttatttgtttcacacccaaaaaatacgtttctctctacggcgcgtcgcttcgacaacctgatttttctttttgttaagtctatttcttaaaatatttaatttattcataaaattaaatcgatgatccattgtaataatctgtttaatgatgtataaatcacatggcttctatccagtttcaccgcaaagagtttagatccaatcattccataaacatagcagtcttggataaaatctgttgggttctacggaccgtactgttgcaaagctagctcttgcacggaacgtacagtgatggtaacgggatgttgacgccggcgcacgcacaatttattgtccggttggtgtcgcgttcgagtcagaccggaactcgatcgaccgaagcaaatatgaacctgtccagtattgagggggtttgatacgccaatttgtcattttcagatgcctacgcatcaattggggaatgcggggtccaaccgaatgccaagcccaatctgttgtgagttgtgaccatgaaataataaagtatcctgcaaatcagtctgggagatgaaatcactgtcacatatatatatgtagtatattttttggatacacagagagttttataggagaaaaatactagccaattggatatttttggatccacagagatttttatagggggaaatgctagcccattggattactcaattaggttacaattatagtgacaggggatttcgttaatggcatccatttgtagattatgattgggtgtgatctgctagtggttttcctttaaagcatgtctggcattggttggttttaaggcatacaaacttccaaaactacagaaaattaatttaattatttttgcaccatttctaatttgagcacatggaaaacacctataagaaattagctttatcttccacaattacaatggtcagtgccattcacaaatctgcattcatagccttatgggt

SEQ ID NO: 17989 - DNA, 1817 bp, Oryza sativa
tttatgtcggcgaaaggacgctacgggccttcagatccaaggcttatgcagtaaaaatcctgaaggtaactgaacatctgaatgatcatacattttctgaatttcaagcattaatcatcactccttgaacgataaattgttcttaaaattattagttggttggatccaaaccaaaaaaggttgtataatttgcattgaggaacatacactgattaagtttggtgatccatttatatcataagaatcttgaaggcaacaataatatagtatagggaatggaaagattcaggatgcatgaaagataatggcatgtggacggtcagataaggttctggggttaggtcatattggcactacgatattgatgatattataggcctaactaagcttctatctccttttaggaattttccatcacatcctatccaattcaaaagtgacaccatctaatgttgaaaccaaatgagacaaaaagaaggatatagcgtataaactatatgagtagcatctgttatcattttctttactactacctccattcgtctcagaatatagctacttctggctataccatccaagtgcatagtcaggagtaactatattttgggatggttgtagtagtaaaaatatgaaaatgaaaataggctaaattaggttcatgttcttaactgaatttgatccactcaggtgtgtcttctaccgggtaatgtgttgaccatcacaatgtcaaagccttatggattcagatacaggagtgggcagtacattttccttcagtgtccaacgatctctccatttgaatggttcgtctgcccttcaatctactgcttcagtcagccttgctctgactatctactactactactttcagacacaagtaactgatggtgttctttcttgccccattgcttcaggcaccctttctccatcacttcagcacctggagaaagggtgcctgaagcaggcaccctttctccatcacttcagcacctggagatgactacatcagtgtccatatccagaccaggggggactggacgcaggagctcaagcgcattttcgtcgagaactatttcgtgccaagcgttccgagaagagcttcatttggagctctaggcatggcagaacagaagaggtcaatgcactctccctgtcaattgtcatttctgatcctaagagttagctatggaactgagcactccctcatctcttctgcagtccaccaaggttgcttgtagatggcccttatggcgcgccggcgcaggatttcaggaactacgatgttcttctccttgtcggcctcgggatcggtgcgacgcctttcataagcattcttagagatctgctgaacaacatcaagctggctgatgagctgatggtaaggtttctttaacatcagtaggctagctgggttcccttctcagccttctgaaagatgcatcattgcattgatgcctcctcccttgtctgaattcttcaggatctggcaatggagactagcaggtctgacgacagcgccaacagcttcagtgtgtcgacggcgagcagcaacaagaggagagcgtacaggacgagcagggcacacttctactgggttacaagagagccagggtcattcgaatggttcaagggggtgatgaatgaagttgctgaaatggacaagaaggtgatgccttctgctccctgaactagtgctgctctccttgcaatttttgtgtactgatgaaggtgatcatgctttttgctgttgcaatcagggtgtcatagagctgcacaactatctcacaagtgtgtatgaagagcgtgatgccaggtcg

SEQ ID NO: 17990 - DNA, 787 bp, Oryza sativa
acatgtatagcctatagctactcatcagatgctaagcttacaagaccctgaggtcaccaaagtacacgtctaccagtctagtactggcagtggcattgcgcagtgatactatatatggatattcagttgggccttggcattaacacagaaaagcagactcataaaatatgatcacgtgatccttactgcaagcatattgcagtactctatatttgttgaaacaaataacatgctgtataattagaataccagtaaagagctgcttaggctttattttgtactttgaaggcactttgtatagccttcacttcagtaagtgctgttctccataccacaatagcacaagaagaattgcttactattaaaaaaactaatggaatggattgtcacaagtaataatgtacaacatatccacatatctattgaagctattaaagacaaaaaaaaaacatttttactacgcagtagccctatagttcctaaaccaaggtcagaaggagaaacaacagtcttcagatagtacttacacctatttaacgccaaggaacttaatcctttgcaaagaacagtgagtctagattcttttccacagaaaggacctacattttagtgatgaagtatgctgcgcaaagagcatcatgtgcggaaatcctctgcagaataaataaaagcagaaaggtattagattgtttccacgttcaagaccccagtaaaaaaaccttaagaatattcttctatagagagtacaattgattctctaaatcatagtataaaagggctgcaggaa

SEQ ID NO: 17991 - DNA, 6936 bp, Oryza sativa
ctatgtattttttttagataatagaatttatttcgtctttagcttcaaaaaaggtacaacaaactgtttcagatgttgtagttcgaactactgcagattataatatcatatcttcattaaaaacaagaaaactaccaacacctattgctaaacctatatctatagttgacgaaaatgtacataaccattgtttctgcgtagaggcttgcaagttgcatgtagtccttgtctttatcaaaaaccaggaacaaaatctccgaaatcagcggctaattgttatgctgatcgaatttcgtgcacatcaccaccaacaaccaacatcgaaccgaagcaaaagataaccaccgccacaaccattggagctgacccgacaaggatattgacaatggttatgaaggttgccactagacagatgacactcccatcgtctcaatcactggatcttgcagacgggacctcgaccacgacctgagctagccaatcattgtcatcgtatattagctcagccttgacatgcccgcgaagtcacggacatgagcttacaacatcggagccgatgccaatgatggtgatggggaacacgaggtgcgtgaaggaaactcaaagccaaagtaatagatgagcaagttgaaatctccatggtgccggggaatacgtactatctccattctacgtgcaatcaattctttaattttgaatcatgataatagattaaaaaattaaaatggccatagtatatggatgggatgcaggtctcgagggttggtggaatgataggacccactaagaatatatcataaaaagtaatagggtaaaagtcacattttacgtatcctatacagttctaccaaaataaaatggcaacatcaaattggggcaaaatagaagatcacactggttaacgtcagtacgtcagcatacttgtactttcggttgtatcctttgtaataatatcaaaattattaaacacagtgtggcacatgccctataccacatagctagctagctagctgctacacatccatcttgtgaaagatcgtcgcggcttcacttctccgcagcgacaaacaagggcaaaaggcacaaaattaaagcacatattgattgattgtatgtacgtacgtacgtacgtactgtgcacttgccttttctcaaacgtgcttgttaacatcatatattgggcagcagtacaatattccttctaaattttgccaccaaactgtccgtttccaaacctcttgttttgcattgcaagcagtcttgcggctctcctcccacacggagaggttgaccattaccagcatgcgtgttgttatccatcgcaaattaaagctgatttaaatcatatcaaacaacacgtcttccgtgcactataagtataatctctcactctctcctctttgatcatcatcagctcatcgatcactagcatagctagctggctgcaaatctgcaaaatgaatatgatgagtaactaatgcgtacataggagagtgtgtttcttgcctatattagtgattagttgcgagcttagctagccatggatcatattggaattagcggcggcggcgagggcggggtggtgtctccggcgcagccgtcgtcgccggagcggcggtacaagggcgtgcggctgcggaagtgggggcggtgggtgtcggagatccggatgcccaacagccgggagaggatatggctgggctcgtacgagtccgccgagaaggcggcgcgggcgttcgacgccgccgccgtctgcctccgcggctcgcgcggcgccggctcgctcaacttcccggagtccccccctcccgacgtccgccgccgcttccccggcgcggctctcacggtcgagcagatccaggccgaggcggcgaggcacgccaaccgcccgtttccggcgaacaccgccgccgccggcgggtcgtcgtcgtcgtactcgatctcgcagcggcaagaagcagcagcccctgcgcggtcgacgagcaacgacgacacggccatgtcgtcagtgccctccaccgacggcggcgctgccgactacgacggcggtgatgatgtcattgactggtcattcatggacacgttgccggcgatgtcgtcgtcagcggctagtaccaatgctgatctggtcccggccatggatgatttcatgtacgggttcttgcacacaatgccgccatcgccatgcgaagacggtggggaggatgtgatgatcgacggcaattgcaacatggatcagacatttttctcagtagatctttggagattttgatcctagaaatctactagcaactggtacccaagaacacaaatatggcggcggcctatatatttaccgcagtcacattagcattctcaccagcatagatacagcatgatacgaaattaattaattagtgcattgtgtataaggttcgatttgtatttgctgtgctatacgctgcgttgtgcttatttttaagttgatatacttataatcgccgtacattgttttacggatcaaattatagttttaaactagttagataaataaattaaaatatatatgttaccatacttccagtttttcatagttctcaactttttttatttcctattttcaaactgtgatattacaactactaatagaaaaacaatttactactacgaggctgattaactacaggctgactgtattttcagttggggcggcctggttgcaaaacaatatgattttcgtaaacacatgctaagtggcgggctgtctgcgtaaagcgatttgatcgcctgaaaaaatggttttcatagtatcgaacaccaaaagaaaataatttccaaatatgaaaatgtgtggttgtatccagtggcggatccagaacaagatttaagggggaactcatttccttcttcctttttcagtcccccctactcttaattttcttcctattcttttcctttcatctccccctttgttagtggtgatccagcggggtaggggggactcaagtccccctagcacctacgctggatccgcccctatttgtatcagactatatcatactgcactgcaatactaaatggagcctaaagttgggttgcattcatcgatttgcagattcttccgtgggatatataattaagaaagtccaaaggaattaattaatcacttgcaagttaatcacttgcaagctccatttctagcttagctagctagatgatggtcaacattgatttggccaagtaagatgatgtctatgcctgtgctgcttagatccaacaacaacctcttgcttctggtaggaatccccccatccattacagtcatggcgaaactcagtggcggataggctaggtcatggcacctgcaaattaaactgagaatcagtggaggtgctcaaaaggatcccatggaagtgaataatggcaaagaatgctactgatcattgtctaaattaatggggatggactagacctagaggaaggggccggggtggctagaagccagaacaaagcatcggggtattagagtatttcttccgaaagatggtaagttatccactacctcaaaacatcggattagtgccagttggtactatatttattttttataagatggagggagtaacatttgaacaatatatgaatgcagggcatcaccaatatatatgaaccaactaatcaataatgctattcggattcatagtactaaaaatatgttacatgttgtactctctctgccctataatataagggattttgactttttccttgtaacgtttgagcactcgtcttattcaaaaaaattatgcaaatataaaaaacaaaaagttgtgcttaaagtactatggataataaagtaagtcacaaataaaacaaataataattctaaatttttttaaataagacgaatgatcaaatagtgcaagtaaaatgtcaaaatcccttatattatggatggagggagtataagatttcttttttatgagatgaagaaagtatgtcctaacatcttaatagtacatgcatgcagggcatcaccaatgtatatggaccaactagtccatataaatgggacccacacaagtgaactcttcttgtttccatttccacaatgtatagcgatagccattggcattaagataggatatactccctccgttccaaaataaactaatctaggattcggtgggacatcacctaaattggttatgtactagatgatgttccaatcaatcctagattgttttatttttggacacatggagtacatcataaaataatcaatctaactaataagagttctctctttttcagtgaccttggtcctcgttttatatcacggtggcatgttttttataaatggaccctgcataggggtaaggtgtctttttggtcttgttgcttcttggtgactgggcccggttgtcaggccgtgcgcctgccgtcggaagaaagtgtgcgatgactgtgaactaaacgtgcgacatagtactcaacagtgccgcctatagcacacgccttttcgcataggagagataaaggcttgttgcagggttggtatgtgttgtcttgtcgcgtgttgtaccggtcctaggctaggttggtataccccagatacttgggaacaggtgacagatgtgctccgagaaccgcccacggaggccaagttctagagttcatgcccgaggggcgaatgtgccccgagcatcgcttgggggggagggggcgcccgaggtgcactgacatagcccacaaaaggatcatgcttgtgggggtcatgcctagggacgaatgtgtctcgagcactgccacagggagcatcacatgggagggaacaagtgtgcttatagctagttagagaaatgggaacatgggtcgaccttacaattaatgtgagacaaaaataatacttatagcttatctgagaaataagaacaaaatccttatcgacaagttataagagtacttttgtctcacattatggatggccaattagccagttggccttcattttattttgagactgtcacacgttgataagcataaagtgtcaggagacccatgccgttctcttgtttactgatgagaagtgtattatataagtgcaaacctatagctagtgtgcaacgcgtgcgtttttgtggtttcaaattgcaggcacatccccgtggttgtacgtgttcctgaatttatatattcacacaggcagctgaagtcctgatatacatatagtttatttgatcaacagcttggctcctcggaactgaccatgcgtcaacaggcagggcccgtgatgccagtgacgtacgcaggatttattaattgagtatacattcaacaattatataattacatactccctccgtttcattaaaaaaactaatgtagctagtaattaatgtaacacatcctaacactacgaatttggacataattttgtctagattcgttgtattaggatatgcgccactggtggagaaatcatctttcgtcggtcgggcgaattccacaatagttccggttgcaataaaaaccggaacttggcgatttgatcatctttagtcccgattaaaaagggtaacatgcatatttgatcatctttagtctcggttcaaatgctgtcagggcttgtcaggccccccgggatctttagtcccggtttgtaacaccaaccgggaataaagatcgtaactttagtcccggttggtgttaccaaccggggctaaagatcccggcgatctttagccccggttcataacaccaaccgggactaaagttccacccctttatatatgtctttttcctccttcagcccgagcaagcttcaaaatttcttcaaaaaagaggggaggtcatgccaaaatttctagtgaatttattttggtgattatatacaaatcagaggtgcctaaaaggttagcaacttcatcctccaatgttttttttgtcatattacatttggagctatgttttgctcacttttttgtctccaaaattttgttgttagttgatgagagagaaaatttgtgtgggaaagaaagaatatatagaaattttgttaatttgctaaagaaggttttataaaatagttgagaaggaaaatatagtgaaagttaatcttaaataatagaaaacaaactaaattgaaaaccaaaagaagtacaacacattaatattagtttaaaagttcaaaaataataaataagaattatttggtggaatattttataatttttgtatgaataatgatatgtcattattgtatgacctttggaagagtttgtgattattttattattattgtatgactgtcattattgtacgaataattatttgtgtacgattttttttttcatttcatgtagatggatgggcaatgaatgacgctgaccggcggtctaaagagtttattgtcggcatgcattattttttgagagtggccgaagctaacaagcataagggttttatttgttatccatgcaataagtgtaagaaccagaaggagtattctgcattcaggactattcatttccacttgtttaagtcggagttaatgccaagcgataattgttggacatctcacggagagcaaggggttgaaatgaaagaaaatgaagtggaagacgacaataatccggactttgcttagtacgctggatttgaaggaaatcaaacgggcgaggaggacagggatgctaatgataacgatgttgcggatgatcttggtcagatgttgcaggacgccaaggaggactgcgaaagtgaaaaggggccccataaattagacaagatgttaaaggaccacataacgtcgttgtacctaggttgcgagcaggggcacaaaaagttggataccactgtggagttcttgcaatgaaagaaaaaaaatggtgttagtgacaaggcatttggcgatttattgaaactcgtcaagaacattcttccggagggaaacaa

SEQ ID NO: 17992 - DNA, 8212 bp, Oryza sativa
ccaacaaggggtataaggcttgcacttattgtatggatgaaacagaaagtacgtatcttaagcaccgaggaaggttgtgtacatgggtcatcgttgatttcttgctgcaaaccacccagtatggaagaaaggcaagcactttgaacataaggtagaccaccgtacgaagcctaaacatcgcagcgggaaaacagtgtttgctatggtgaaagatcttaaagtagtatttggaaaggggcctagcagctagcctatagagagcgaagatggtcacgcggcgatgtggaaaaaaaactccatattttgggagttaccctattgggaattcttggacgtccgccacgcaatcgacgtgatgcacctcactaagaacctttgcgtaaaccttcttggcttcctaggtgtatatggaaagtcgaaagatacactggaagcacgtaacgatctgaagcatatggaacaacgcggcgaccttcactcggaaccaaaggagaaaggaaggccattacttgagtccagccagctacactcttagcaaggcagagaaggaaagtatatttgaatgcttggagagaatcaaggtaccgtccggatactccgcgaatataaagcgaataataagcacgaaggagaagaagttcacaaacttaaagtctcgtgactgtcacatgttgatgacacaactgctaccagttataataaggggtatcctcccaaacaatgtccgggcaacaataacaaagctatgtgctttcatgaacgcaatttcgcagaaggtcatcgatccggatagattagaaacccttcagaatgatgtggtgcaatgtcttgtcagctttgagttgatatttccaccttcatttttcaatataatgacgcatctgctttgtcaccttgtcaaagagatcggtattctcgggcctgtgtacctacacaacatgtttcctttcgagaggtacatgggcgttctgaagaagtatgttcataaccgtgctcgtccagaggcaagcatcgccaaggggtatggaacagaggaggtcattgaattttgcgtagaatttattgaagatcttcgcccaatcggggtacctgaatgacgccatgaagggagactacggggaaaagggactctcggaaggaaagcaataatgacggtagacaacaatttattccgtaaagtccatttcacggttctgcaacaatcttcattggtggctccttacatcgaggagcacttggctctagttcgcgccagaaacatcggtaagtccgatgcatagattacacggcatcacattgatacttttcccacgtggctgcgataacatctcatgggcaacgagacgattaaccaacaactggccttcctggcgaggggaccatctggctcgatcgtgacattccagggatatgaaatcaatgggtacacattctatacgagagcccaagacatgaagagcacaaaccagaacagtgttgttcgtatcgatgccatgggacacgatggtacaactggcacgcattacggtgccatcgaggacatatgggaacttgactatggacctctcaaggttcctctgttccggtgccaatgggttaggttgactggtggaggcgtaatgattgatgacagtgggatgacaacggttgaccttaacaaggttggatactcggacgaaccttttgtccttgccaatgatgtaacgcaagttttttacgtgacggacatgtctagcaaaggaaagaagggcaaagggcttgacgagccgaagcgctacgtggttctcctagacaaaaagaaaaatcgtcggagtagaggacaagactgacgaggattacgatcagtttgatgggcaacccccctttcacggtgacgattgaccctagcatcctcctatcaaatgaagacaccccttactcacgtagcgatcacaaggaaggaacaatagtgaggagaaagtacgtgccgtaaatcgttaccgccgatgtattgccgtaattgttgtgtacacgatgtaaactattttggatatattgaatacccatataaatcaattgttgtatggcatatgttaattatgtatgattattagaatttttaacaaatttaaatcatgcatatcttagttatatacgctaattagaatttttaaaagttttaaatcatgcatgtggtatttacatatgttaattagaatttttaacaattttaaatcatgcatatacaaattatatatgattattagaatttttattaattttaaatcatgcatgtggtatttacatatgttaattagaatttttaacaatttaatattatgcatatgctaattatatatgattattagaatttttaacaattttaaatcattcatgtgcttattatatattatccacttaatttactacagacaacaataatttttcgaaggttttgtcattaattttttgactttaaataattttaatgcattatttactattttagaaacacatatgtaatgaaattcaatattcaatgctattatctttagtcccagttcttaaccctaaccgggtttaaaaagaatttggaaatagcgggaaaatatctttagtcccggttgttcttacgaactgggagtaaagatatctttagtcccggttgttctcaccaaccgggagaaaagatctatgggtatatatattcccgatgtgccctcgtcttctccaccaacacttagaagtttttcctccgatctcggcttctccttcgccgccactgcataggccttctccttcgccgccgtcgtctctcgccgtcgtctcgccgtcgtcgccgcctccgccgccgacaccgccgccgcatctctggggtgatcagagccgccgctgcttctctctctctctctcgatctctctctctctccaaaccactgccgcctcgttgccgacgccgccaccgacatcaacgcggccgaccccgactccgcctcccgctgatgccgaccccgacttcgccgcggccgccaccgccgccgacataacatgcacgcggccgtcactgccgacgacgccgacgccaccgccacgccgccggccccgcctgaagctcggcacgccaccgtgccacgccgacgcgatgccacgccgctgccgacgccgctccgttgccaccactgccgccccgtcattgccgaacgtgaacgaaacgtgaatgaacgtgaacgaacgcgaacagaacgtgaacttacgtgaacgaacacgaacttaacgagaacgaaaacgtgaataaaacgtgaacgaacgcgaacgaacgtgaacaaaacatgaatgaccgtgattgaagcgtgaacgaacgcgaacgaaagaggacgaacgtgaacgaaacgtgaataaaacatgaacgaaatgtgaaggcacttgaactaaaagtgtgagaacgaacgcgagcgaaacgtgtacgaacgagataattaaacgattattaaacttagcatgcatatatatatatatatatatatatatatatatatatatatacttgaaaacgtgaaatacaatatatgttcctttgcgtttagactaatacatttttttgcatgttgcagaaaagacgtcgtcgtcgtcgtccctcaaacctaagtggtagctagccctcgaaggatttcgcgcatgcaagtgatttagagatgtgattgttagagattcaatataagattcgtagtcccggatttaatatgagatttaatattaaacattatttcacccgggactaaagatagttatctttagtcccggattcatagtcccggttgtgggctacaaaccgggactacaaacggtttttccaccggcatgccacatccaatcctatgtttgtttttcgtgggatggagagagtatgtattacgtctaatgtttaataatgaacttgtgttttgtgttagaggatttaagtttagttgactactagaatataaatattgtgagccaaaagtctaggagaaataaatttggtgaagaaaaaggcaaaaaataaagtattaggcgtagtagtttcttttcgaattaagatttagattttacctcggttctcattagcacgttttttaaagtaataaatgatgtttttcgtacgaaaattttatatatagaagttgctttaaaatattaattatctatttgtcaagtttgttctaattaaaatttaattaataatatgctaatgtcttttttgttttacatgtaccaacttaatcttcttcttccatcagtttcaaacacccctcccgtaacctttttttttttctgaaatttgtgggtaatcctgtacatacagtgaatacccactgtgtcggccactgcgtgatgcagtctgagaaatgctactagatccaacaaacacccggccacttgaatttatatacttctaaatgcaaaggagagctagtgaaagatgcaaagctatagcagagatcagtactaaagagaataaagagaataacgcacgcatgctagctaggtttgctaggctttcgaaagctagctctagctgcaactgctccagtcacggagctctttcgtcattagtactgtttgttaatacaggagtcacattagtaggtttcaaatgcattagatcatcaatcagcagtcctagactcccagccagtagaaaaggtacaaatatatgaccagattttgcatgtgaaaacacggatgtgctaaaacacacccaaatttgtaataactaaaacacgttacttacataataaaatgtttactgcaaattagatcgtccttaaaatatctcttcatataccctttttattatgcaatactcatagtaattaaaatctttattacaagtagaattgcttccgaccagtcattcttgatatatcttcaaattgataaagtcatcatagatgtcttattatcaatagatatatgatctaccattgaaagaagtaggtaaaaccccgcgcgttgctgcgggagtttagtataatatcaataggtaaaaacaaagtgtaaaatatatagataacataagattacgtaattatgtgggatgatgatttaacatacttgcatttcaaaagctctaaaatttaataattataaaattattgaaaatatagtatatttgcatgatgcttaaatttaatgattgttagtggatgatgatgtgacatctttgcatgttaagctttagtagttagtgggttataactttatactaagagaggataacaattaatccaagcattcatattaaacctagttcttaaacccagatgagctggttgcattataagaaacatattaattagttgagttacgccatccgcaatccgacggttaggggagagagacgaaagctgaaattgcacaacaccacgtggaaaggctatttcacgcgaatccgtatagacttcggcattataagcattactttatctcttttacattataagatgttttgatatttgaatagattcatgtatatgtttcttacatgtatccaaattcatatgaatgttagtgaatatattggacccacatttcagtgtgcctctctttttgcacacttacctctctctcctctacgaggaggagtaacatccgccgtgctagcggggtcatcgtttaggcggctccctccttgatgccaccgtgccgaacttaacaccctcgcatgtactccactgcgagatctctcccttctcaagcatcatgtggagtcgtgaacccgaagcagccaccagcagcagcggctgcgccatcgatgcactcgcacgcctccctatcaaataacctacccaacttatgaatccagcttgataagtactccctcacattacaagatgttttggcctcttcatctctcttgtagattcactaacatcatataaatttatgcacatatatgaaacatatatgtggatcaatgtatgaatctattcaaaacccaaaacgccttatagtattatcatatgaaacataggaaatagtaccagcggagagctagaaccgcatggaggccatgaggccatcaaagtcgccgcacatctgtggtactccgagtccccaattataagagtgcgtcgaggacatcctcatcaacctctacaaggtcacccagcaagatacaaccatacttcttgtaagagctactggcggatgtaaggggttcttgggtattcccgagaatattcaaaatactatgaaacaaaattagtatatataggtatatcatatatccatatacttaatttgacctgatacttgattctagattttttcttaacaaatctattcttcaagacttcaactcacaccacttctaacatggtagtcaactatctcaaatcccctaatcaccaaacataagggacaatatacttacaatgttgagtgaatatctagtcttaaaatcctgcatccgtcattggtaagagagctcacatttctcatttatcgactcatgaagcttcaactgttatcttggtcgtatcaattcaaatcaatatagttgataaaatttcttcttgtcaatgatgcacgcatcaattaatcttggtgggcgctgatacaaaagaactacatggaagcaaaggggacatactgtcgagcgttgctcatcaagccgaacaaaaacaagatgtgcaacctaggcatctattgctgctcctccgccgttgttgctgctattgtgtgacatcccaacccaattagaacatggcatgtgtggtccatgagagttgtgtgcgcatatttagtaccatcttgctagtttagcaaggatggaaccaacttataatggattatccctccaaccatatctcctgacttaaaccttttacacgaagcaagaaggaaagtgtaagtggggtggtatttataaatgggcccacccatcggatgggctaggctatgcgattctggagggtggactattacatatcaaagcacaagctcctctagtgggaaggctagatacccttggaagttcatccaaggtgcacgtacccgagctcgtgttagggtcgagggtcctgtaaaaatgtggacaagcaatgaatacatcttcgggccacttgggagtgtaataccctattcctatgttcatcgctatatgatgaagtttaccatgcgttcttagaagttgttttgagtgctaagggatgaactcaccctccctcagctatagcttgaacctaacttagttaaaccctcttcttagtggcattggtcctccttttatacgacaagggggtaccatagggcccatgcatgtgtacataggtaggggctagctcataggagttgataggattaatcttgtcattgtccctccaagagagccggtcggatgtgacgggttgaccttccatctaacacgtggagtagggtagctgaagtcgtcatccaagctaccattgggcccatctgtcagctactgaggatgatgaaagggggttccaccgggtgagtgtggagcacgcgccgcgtcgcccacctttccttcggggtgatgtgggaaagcggggggaggcatgcaccgccacgtccctacatcatctgtgatctttccacatgaatcaaatcacgccgcaattaaaatgcggaatgatggggaaaggctgcacagagggttcggtcaaatctcctttatgatgtagattcaaccggaacatacctcagggctctagcccacttccagaggacatcatggcctcgggctgatgctagctagggcccaagctgatgttgacctcgggtcaccttccttgctttgggaaagtacctaggtccctgcgtcagttctccgattactctggttactaatgtggtggatttccataaagatccatcgacaccactaggggtgggcgttcgatctagaccaaaaatctggtctagtcttttcgatataaaaataggagactggaataactagtagaaatttgtaaattggtggttcggttaaccgaaatttcagtctagtcttcggtcttactgaccagattgaaccctcctcaaatccccatggcatgcagggaagcatgccagctttgagaaaaatcaaaaagataacttagaggaagattgaagaacatcccaaatcaactcgatgatctagtgaattagaggaaaatcaaatcatgcaatagaatgtgggacggcggagaagtgaagatggatgcccgctaagtcgcagcta

SEQ ID NO: 17993 - DNA, 9239 bp, Oryza sativa
tctatgcggcggcgagaggttccagtgttggaggtgatggggatgaggaagacaaggagcagatatctatgtttctctcggtctttctgaagaccatgcatatgtgcttgttcaggtaagagcatctccaaatctccatttggccggattgccaaaaaaaagatagtcaaatttgcctttcactgcaatagactcttcattacactctccaatctaacgatagatcccatatatcattggctccatcaccttattcctcaccacctcctcctctcactcttcctctcatcttctcctctctctcctcttctacggccaaatctttgtcgttgtcatcatgccgcgcccaagtccacactgtctccatcctcctcctatggcaatgctggcactgctagacggtgcctcctgcagtcccgcgtgtcccctcaccttcgcctccacctccgtctgctccacacaaccacagtggtaggggtatctgcttccactgccaccatcaccgcactcatgtccaagcccatgctagctccatcctcctcctatatcgatgggcggtgcctcctactatcccgcccgtcctctctcctttgcctttgtctccttctcactgtactcacaaccaccacgtgcgggtgcatccgcttcccccaccgtcgtcattgtgcccatgcccaagcccacgccggctccttcctaccacgaagtcctccttgagcacctccagcaacgacacctcgagggcatgtccacggctcctccgtggctgatgcaagggaagaaggagagcggtggcagcagggattccggtggaaggtggcagcagtgacaatgtagagaagagagagatgtggtagagcaagagagagaagatgagaggagaaatagtacgtggggtgcaccattaacaagtgagtgtggctggacaaatttggcaagtgaggggaggaatttagccaaccgaatggccagctggagcaagattgttttgctggaattgcccaaatttggcctggagagccatttggatatatgcattaaggaggcaggctttgcttccggagggtgttgggttgctttggggactcagagttagatcgcgtggaaattgggcctatctcagtcacttcgggtagcaggctaggacaactaaatgggctcaaatttgttcggtctttcgagcaccgatatcttggtcttttctggtttggttttggtcgttagtttttattgtcacccctaagcacttgcaattcctatgaaactattttaccgactaagccacccaacaggtcaacatatactggcagttcccacgaaaactgaagaccccacccttcatccactaattgtagacctaaaccgcataaaacaagcagaaaatttagccacctgacgagttgtatctggctgctcactcgatggaatttccatccactgctcatcccgttgatgactgggcccgatggttgaaaaccactgtcatccacgactcgtcgcttcgcaacaaacaaagcgggcgtgcaaacacgcgtcggatgacgaacaatagaccaccgaccgatcactgggccttcattgtgtcgggcccctataagtcaaccaacatacatcttatttaccagatagagaagctaccagagaggttattgaaccacttatccataatttcattgacccatcgaaataacatgcaggccttccagtcaatcaaaagagagcagccatagtaatttcgcaactataatttctaaagtcacatagaccagcatctgccccttctttcaaccttaggttttaaactataatacaaggagttgctcgaactctggaaaattctgcagaaagatccaactattaccacgcataaatagtgatgtcatctaccaagctaaacaagttatagcagcaggcaaattcttgttgccattgtgatgctatcccaccacaatggcatacaaggcctcaaaaaatagtttaagaaagcagggaattacatcaagttgcaccaaaatctttaacaaaggcagacagagcatagagcctgattcaaatcagaacacgtattcagtctgataagtctacaactctccataccaagtcttccaagctccaaaatcttcaatacgacaatatccaattcatagcttttcagtcttcctgccatcaacttgttctagtagtttgggaacccgtcgaagtctttctttcctggcctccagtttggctatttcagaaatccatggaaagagagaaaagatcaattcaatgagattagcaggaaaactctctctaaagtgggcattattccttgctttccaaatggtccagcacacaacaacaatcccacacccactaaagattgtaaatttctacaccttcccttccacatcataagacgttttgatctctccatccctcgtctaaattcgctaacattcatatgatcttagatacatatatgaagcacatcaatggatccatgcatgaaacccgaaatgtattatatatgatgtgaaatggaggattgaatttatttaatcaagcaccaaaaggttgttgaatgttatgcacaggttcaacatcatatgcacatttattcacatttcataagaaatgagcataccatcaacactaagggaccagaaagtcaaagggacacgaggaaagaacttactaaattacttgatctttagttgccacatcctcaaaagcggagccacctagagctattaccttctataaagcactctgaggctcttgcccaggcacagaagactccgataaaaacaagccttattttggctgacaccaattgcaggtcaaatcccacctggatcaactatggaagtttctttacaaaaatactcttgagctgaaacgaccacagaagtgtagatttgatcaagcaggatgttgcatgtactttgcattgttgttgcactttgagaaacaaatttggttttactccatgggaaagacgtgatattgctgatggtgaagacaccactatatcttgcccaggtacagaggtggccccaatcaacgaaacatgccttgctttggctgacatcaattgcaggtcaaatgccacctgcataaactctaagagtggacggctgttaagtaccaaattctcgccgtcactactacataagaccataaatataaaacatccaacatagtggtagggtttatttctaacaatttccacgagtgttggtgtacattcgtatgcaggtggcaaactacctaagttgagaagaaatatacatgaaggaaaaagagaatcaaacttatatccaaacttatggaggtttggacccaaagacccaattaaacacctccaaatgggccaaacatccatagcaatagaatgaggggcccaaaatgagtgtctaagccgaaaaccggagccaacgaagccgtctcgggtttagccgaaccctgacggaggccgctggcccaagcccaagttgcgctgagtggataacgtcctcccaatgacggttgtgagcattatacctgaagaaactgtcatggacacttgtcaataggagagaagagatgctctttggatgcttaagcatctccacattcccaaggcacctctaggcctataaatacccctctcctctccctcattcacacacacacacaccccaaagcatgaactgaattataagaggctctattgtactttattgtatactagatttgggagacagtagagtagaggaagtcggaggaatttcggagttgttagtaatcctctcttatttcttatactttgttaattactatgctttaatacaaatatcattctgagtaattaagatttattctgtgagagttacctcttagttcataatcaatgtatgggatcattgttcagtatagtcgattaagatatagtgattgctttagtgagttataaacactaaagtagttattaattgcgtagacgtggtgtctgggtagttaatgtcacgccccgaactagtcccgaccggaactagcccgtgacgctccaaattaacctgttaatcgataccagtcccaggaaatagtgctggtatcacagggagacagagtatcacaacaacagaggtctctttattatagagtagaagtacagtcatattgggatgcggacagatcccgagctcacaactgcattataaaaggaaagcggaagccaagacttggaccaatcatcacaggcgcgacttgggaactaggccgaaaccctataactcatcgtagccgacttgctcctagaagaactcctcgtcagcaggatccacttcatcttcttcagcaactggggggggattatttatatagagcaagggtgagtacgggagtactcagcaagccaggggaaataagtgtttaatgcaggcttcaaggaaaggctgttgttttcgtaattgattttgtttgaactcttttctaaaaagtctaagtgagtgcttctcaaacgacacggatgagacagtgcgtctcgtccggtcggagtatgtgcaatgtatcagtctttagatcttgaaacagggttggcacccggccaacagcttttcaaacggccacccgggccaacaacatttcaaacagccacccgggcctagctgatcccgtcagctgctgatttttcaaacatcgaacccagtttcacaacagcaatttcacaagcagtagtcagacaaaactacgctaggaatcacctcacatccgcccatgaccgtgggcacggctgttcgaacagtttgttaacctctgcagagggggtacactttacccacacgacattactaacccggatcacccagcccgtggggatcagccacgtcgggagacctccaagctttcatgacaaggcatttcgaaagccgatacaggtttaccatatgccgacgagaggggtcccagaccaacaacaggttaggtcccagaccatactgtgccaggaagcccaggggtcctccccgacaccaccccggcgaatccacatgtctctcggcatcaaggctcccctgataagctagttactcagccaggggtgtcccattccacccatgtggtcatacttgtcttatgtttggatgaaattccaaggaatcggtccttaagtgcgagagcgggaaaccgtacacccggtacgttccccggtccgcggttttggaaattcatttagttcgcaagcaccgacccaggtgtcgggttttccaagtcttttgtaaaactccagttttacccaagttgtttctcagattttaagtttgaaggcgaccgtcgatactcgcacagagtgcacgaatatcgaggtgcaactgggtggttacaaggggacatggtataacaattaacaaaggaaggatcaaatgcaacaaattaggtaggtctgccaatctgccttgcagacgggacaacagattaagtgtgatcctatcaatgcataatatttcgcaagcaatataattaaatttcaaatataggctcaagatgttcaaaggtggcttgccttgctcgagatctggagcttgatcctcgaaatcctcgcactgcgggtcttcgggctctgaaactacacgcgaaacgggacaactcaacaaacggcgaaaataaagccctattaaagacctctaagcgtgccattagatagatctcaagatttggggaattttggaagttgaacggagtcaaacggattcacggttgggaagatattgaatttctaagattattgaatttttgatctaaaggaaaaggatttaattaaatcctttttggaaaagaaaaagaaaagaagggagggagggaatatagacttttctcggacggctaaggcgcggcccaagagaaatggagcggtccggccgagctaaatgggccggctggcccaaggcggcccaaactcgcgcgcgcgggggagggaggagagagagagccggtggaccgggctcaccacgcgcggtcccgggtgggacccgcttgtcagcggctcagctcaccgtgcggagggagcacgcgacgcacgcgcgcgggcggggaagggacgcggtgcatgcgcgcggtccgcggtggacgcaggtgacccatctggttgcaccggaaacactgaactgctgacggtccctgcggtgacttgaaagaggtaacactgttaggcgcagtattgccactaggggcacgctgctgtggctgaggtgccggacggtttatctgaggacgaggggcgtagcctggctggcggttagcctgagtgaccgactggtggtattgcatgggttgaccgtagcgagggcgaggtgcgcctcgggaagaatttccctgatggttagacttgcgtttcttgtattcttcggtagcctcttttctggcatcctcaagtagaagtgccttgttgatcatatgttgaaaagtggggaagtcatgagcaagcaactggagtctcattccaactgcgattcctttcaagaatttcctgatcttcttcttgtctgtgtccacttcctcaggggcgtaccgagccaacttgttgaactgacttaggtactcattgatactgctgttgccttgcttaagtctgttgaattcttctttcttcatgtcaatagtgctttcaggcacatgagctgcacggaaagccgtagcgaactcatcccaagcaatgttagtgggttcagggtgtgcattgcagtaattctcccaccaatctgcggcaggtcctctttgttggtgagaggcgtagagcgtcttctcaacaggagtacactgcactaagttgagttttctatcaacatctttcaaccaatcgtcagcctcgacgggctcgacggtctgagagaactctggcggacgagacctcagaaagtctgtcagcttggatctgttgttgcccatgtgagggtggccatttccatgcgcattatgctgaaaactggctatggctgtgtttagtccttgcaagatttgtgtctgaactgccattaagtgttgcatgttggtttccacatgaggtggggaagggaggcgttcttctccagaattgtgactggcagtgcggtgagagcggtgagactgtcccatctctgcatcacgggaaactgtgcgatgcgagcggctgctgtggcggggttgctcaacctctgcattgcgggaaacagtacgatgcgaatggttgctgtggtgagactgctcattagctgatccatgattttcttctggctcaactctaccatcctcaaaaccaaagcgggctggtgcacgagctgcacggcgggggcggctagccatctaaactcccagaagagggcggggtaagagtcagataagcacttaggagggcaaggagcaaagcaaatagcaactcagatagcacacactaggcataaactggatttttcaaatcataaaaacacctgatacaacgggtgtggacaagtcacagagctacgccgagcttgactgtgcgcacaccacctaggagaaccagactaccaaacaacacccacaacaaacacacgcacgcactacctcgccacgactccaaaagagttggcggcggaacaaaagggcctatcacacggacggctgctgaagactgcctcctctactcctcgtcggcctggctgcctcctgtagtcggctcctcagtcgaagaaacgtcgatcggctggcgcgaagggaccggcggaacctgtcgagggccggcagcagcacgggccgctggcggtaggggagctgggtagtggaaacggaacacagtggcagaaccaacaacacgcttccgcgcagtgcggataaagcgtgggccacggcgggaggaagcaactggggtgtgtcctggggtgtaggaagggctaactgggtgtgggtagggcgagtacactggtgagtacggcgcacgcgagttgggggagcgcgggccactgggagtgcgggcagagccgcgggagctgtgggaggacaggtggctggcgtggcagaggcggcctgagtcccaggagatagtgtcaactgaggtgacaccctcctcggccagacgggcctccaaggcggcgtagcggcgggcaagggagcggtaagcctcaaggagtaggtcgtgctgagtggcctgagcctccgaaagctcaaccatgcgagtcagcactggctgagactcgctgtatggacaagggtacctggcgtctgagtggccagaaggaaggcgtggaagctgccggaaggaggagcctccgagacggtggctgtagtcgtgggccaggcgacgaagcgcagtccaggagaggtcctggtacgcgatctggagagtgggcctggctacagtgaagtggtgtgggcgaaggccagctccgtgtatacctccacgggggtaaaggtacacagagagctcacagtgagggggaacacggtccacggagtaccccgtgtactcgggacacgagaagccaggaaacgggcgaggtcacgaagctgagcgacgtggtgaccctcaccaaaaccgtgggaactgaagctggcgttcactgccatctacaattttgaaagagggagaaagatcagtaaccattttagaaacaaactattgaaaataaagaagacaaaacaaaccttaccttttcgcaagtagttttgaacttggtatccttagggttgtcctaagtgtcgggtttcgccctagggccaagcctgtgctctgataccatctcttgtcacgccccgaactagttccgaccggaactagcccgtgacgctccaaattaacctgttaatcgataccagtcccaggaaatagtgctggtatcacagggagacagagtatcacagcaacagaggtctctttattatagagtagaagtacagtcatattgggctgcggacagatcccgagctcacaactgcattacaaaaggaaagcggaagccaggacttggaccaatcatcacaggcgcgacttgggaactaggccgaaaccctataactcatcgtagccgacttgctcctagaagaactcctcgtcagcaggatccacttcatcttcttcagcaactggggggggattatttatatagagcaagggtgagtacgggagtactcagcaagccaggggaaataagtgtttaatgcaggcttcaaggaaaggctgttgttttcgtaattgattttgtttgaactcttttctaaaaagtctaagtgagtgcttctcaaacgacacggatgaggggctgcaggaa

SEQ ID NO: 17994 - DNA, 5823 bp, Oryza sativa
  unsure (1)..(5823): unsure at all n locations
ctgcagcccgtctggctaagctggcgccgacgtggcgcctacgtggcggccacgtgggctggcgggaggtagacgacgacccggccgcgaatggacggcgggcggcggcggcgagcggcggagcgaaccacggcgatacgggcaaaagcgtgcacaccgggcggttgcacgtgacaaggggaggcgagccaacggctcggattcgccagaggttgctcgacggcggcggattgcggcagcgacaaccggcggcgggagaagagggaaacggcgacgaggtcacgagaggtcgattcccggcggtgagagcatctatgcggcttcgggactcgacgctagcatcggattgggcggaactacgccgagcgaggccggcgacgagcgggtgctacggagctcgggcggcgacggcggcgagcacacggcgatcgacggcaacggtcggggcggcgccggctaactacggggagtctacttaagctactaccgaaagctagggggaggagatggagcgaggaggaagaacggagagagacactaccgtgcgggacggggcgcagtgacgagaggccgacggcgcgggagtgatctctccggcctcgggccagggaagaggaggaagacgagcgcccggagtccccttccgcgtcctagtgcgcaccggctcctccggcacacacgcgacggctgcggtcggcgagagggacggcaatggcgcgggcgagaaacagggaagaatgggagaaaagggaagggagggcgcctgggtttatagggggcggcaatgtcggtttggaaaccgactttggcggtcaaggcgcgagctggcgctccggctagcggcgaaaacggcgacaggagggagggaggatgacgccggcgggaggaaaaggggaaaaaggagggagagaaaaggggcttgcccttttgccgattcgggaaaagggggagggagcggggcgactcggcagaaggagaggggctctctgcctccgccccttggaggctancgcgcggagtggcgggggccgggcgatgacgacggcgatgacggcgggcggtttggagtggcgcgacgacacgggcgacagacgcgtgcagaggctgacggcggcggcgaccgggcggtcggccactcggcacgcgcgcgcggcttgcaacgggcggcgtccgcgcgggtggcttacgcaggcacgacagagcgaggagaggggaagggggcgctcggcgcggctctgcgcgcacgcgcgcgcggcgcgcgggcgaggcggagcggagctgagcggggggggagggagagcggagcgcgccgggaaggggagagggccgggggagagggggagagagagagagagagagagagagagcccgggagagagagggccggggaagagatgggccgagcggaattcggcccatcgaactcgggggaggcaaactagacttttgcggagggattcgatttggaaggaattggattcggaattgaactcgacgatagatcggggattgagatcttgagatggcacggacactagacaacaatcaaagaaacaaatttcgcaattagggtttttaagagataattttcccgttaggcgccacgacggaacgggcgctacagttaatttccgttgtttgcttcgtatctcatagtaggtttgaggtgggtgtagaggtggtgacagtccttaagtacattgaaatcctccctgtccgggtacgttgtagagccatatctagagcagcgagctggccagcgcccgaagtaccgcgttaggattaaattgggctttccgtagacattgtctctcgctagtaaatcctctctaccttaaaataccttagcttcgtgtccttggatgaacctgaagaagagctgacacacacgttccctgtggaaatcaataccttgcaatactctcgggtgaagtgctacatcttccgtgcgtttgcgttttttatctgtgacgttaaaaaataccaacaaagagtttatttacaaaatactcttgagctgaagtgaccacaaaagtgtcgatttgatcaagcagggtgttgcatgttcttcgcaatgttgttgcactctgagaaacaaatttgggattcactccatggagaagatgtgtgtcgatttgattaagctccatggagaagaggttgcatgttcttcgcaatgttgttgcactctgagaaacaaatttgggattcactccatggagaagatgtgtgtcgatttgattaagctccatggagaagaggttgcatgttcttcgcaatgttgttgcactctgagaaacaaatttgggattcactccatggagaagaggtgtgtcgatttgattaagctccatggagaagaggtgtgtcgatttgatcaagcaggtgttgcatttacttcgcaatgttgttgcactttgataaacaaatttgcgatttactccatggggaagaggtgttgttgctaatggtgaagacaccattgtatctgctattaatggtaaggatccaacctccagtctttgttattagtatgaatattgagggaagatgagttaagagctgtaatgaatttatctgttgatggcagtgaatgtgtaatcttttgattgactgccgatgatgatgaagccttcctcttattcatcaaatgttcggtaagaatcctcttattcttcaaatggtcagcaaaagtagacatatctagcaccactttcctcttatctatagtattcaaccgatcaagcatacccctttcctcctgttgccagcgacaaaccaccggagacaaggaggaagagagatatggggagaggagactggaggagttttcacccgagcgtgttaacgagagcttgagaaagatatgtaactagctagcaagcccgtgaacctggttggatcttgtttagagtacttcattaagtacttttcacatatgacatatcaaatcaatattcatgtgagataagcttcttcggtggataagctttggcagttctgcagagttaggtcctgcggcaaacttggaatgatggtgggacaatagcaagctcgtttgctttgtgggggtgatgggtgtcatgatatatggcaatgacaacattgtagcgtccatttttgacgagataagctatggtagctcggcgagtgtggtgctctgtggcgatgatggcatggtgccgacgtacttgttcgtgttgtgatgatgtaggttgtccaggcgacacttgactagtgcttggtgaccgcaaggcagctgggcagactagttccatcctttttctccactcacagcagaatagaggagcctttttggtggctgcaatggcagtgagtaggcgtggcggtggaagggcgagctagctcagcatttccttgaagtttgctagctcagcatttccttgaagtttgaagcaatgagaaaaagcttgcaacttagacttttagtttttttctttaggttgtttgttttttttatctcggttatgagattagtagtgtatgcactcgtgtaacctttggctgcatatatccatttgtggatatagaggccagatttagcttagccgttaaaagctatttttaataaagagtaaaatacatggagggtcatctaaattgtttaggtgtgtcatataggtcactctacttctaaaatacacatctggatcaccaatgtgaattaagtgagtcatttagctatctaactattctcatgagcacatctcgtacatattgcgtgccacatatgattgaaaaaattgtttgggcatccgtagccgctgcctcttaggatttaacctgctttgctatttaagtttgtcatcgctgccgcttaggagtatgtttccgtcgctctttatattcatgacttgttgcctctgttgctaggttttatgacaagcgagagagaggattgagaactagaagaactcataaaaaaagcacaagtgaaataatttggcttctctaattttgtgtattttcaagtgctagtgctgtgagaaagggaaaaaattcacacgcgattttctgcacatgtccgggagcaattttttcaattataggtggtataccagatctacagggtttgctcatgtggatggttagatgggaaaatgactctcttaactcattagtaatctagatgtgcattttgaaattagagtgatctacctcatacacctaaataagttaagtgaccctccatgcattttactcttcaataaaaatcctaaatttcaaaattttggtattttgtgcgtacgtagggtctagtagactagtagcaagatctgaattaaaagtcattccttgtgacccaaaacctacatccaaaatgtatatctgaagtaaactctcgagattcggttcccttcctaaaaatttcaaaaccctgatgtaaaatttcctacaaagctttcctttgaccttcattcaaatcttcaccaatccatttaaatccttcaaattacccaagaatgagagcttcccttgaactctacccggagaattcaaatattaattttgagtttggaacacttctaagatcctttccttcatctatctacattttttctccagatcatctaaaattatccaaaaaatcctctcataatcccaatcaagcgttatccattgaaattcctagaaattatataaactcaaatatatcaagcataaattcaaattctcagaatatctcccaaaataatttcatgggaaattatcaaactatagtatgcaattgggccacgtgctccctccatctccgtcttctctccctagtgtagcccaacccatctcctccatcttctagcccaactcgatccagcacaactccttccatacctatcttcttcttttttcttttccagaccggcccactggcccagctcgttccttccaggccaacctcgcccatggcaaaggaaaaagtacaccgaaggtccctcaacttgtcatcgaattacaaaatcgtccttaaaccacaaaaccggatacaacgcgcccccaacttacaaaacctgtgtagattaggtccctcggtggttttgactttggttttgtccaacgtggcaactgactcagcgtgggtcccacatgtcagccccttcttcccttccctctcttcctctcttcctctcttcctctctcatccctaaatcggcgggggaggagcggcagcggcggtgattgcggcggtcgctgcagccttgggggagaagaagaagcggagtccgaaggcgacggggtcggcggacagcagcagcagccagcgctcctcctagacgtagagctccatggcggctgcgaccaggtcggccacgcgacactcggtgcgtgccatcacgtgcagcggccacatgctcggctagcaggtcaagccgtgtctgcggccgctgcttcagcagcgagtgtcactgctctgccgcgccgcgcccgtggaacgacgccgaccgctgccgcgacttagccaccgccgccgccgtcgtcgccgccgccgccacgtgccgcagggcccttccttgttgtcacgccttgaagttcccctcccttgctttaaattcataaaataaatcgccagaagaaattgtttaattaaacctagagctaatcctaattaataaatgcaatcaataattggaaatggcatggttgaccttttcttgagttccccatgctctaatgtgctaacaggatttttagtggaattttcagagcctaggaaataattttaaccaactaaaattagcaaaccgcaatattttaatccttggaaattctttttcccttttctcctttctttttcctcctggg

SEQ ID NO: 17995 - DNA, 2507 bp, Oryza sativa
acatataaaacttcagtttccaatctgagcacgacaacatcacgcacccgctgcctgtggcctcaagcagtgacctatgcctcccctatcacaaaaacgagacccgtggcggtcagttgtcttttgagctgatagaatttttgctggtgggtctcacgaatctgtcttccatagttattaggatcaaaccggatcggcggtccgaccggggaaaaccaggtcagaccgggctggcttttggtgatgggctgaggcgaggcccgctgagcaaagtccaccaaaaatcgctggaaaaggatggggattcgaccttgggcagtgacctatgcctcccctatcacaaaaacgacacccgtggcggtcagttgtcttttgagctgatagattttttgctggtgggtctcacgaaatcgctggaaaaggatggggattcgaccttgggtcgcacggttgagagctgcacgcgctacccaccacaccatcgcttcgcttctgttggtctaagacattaatcctataatactttaaatcgcggttggaccggccgaaccaccaaaccagtgaaccgagacctcgaccggctcattctccggtccggtatagaaatcttcaagtaaactatgctgtcttcaagtgtatagaaatcttgtgaccgccacagttcatagaatatactttactcccttcgtttcatattatttttttcactcaaccagttttagctattaaatatttttgtttcactgattcaccagttgcacatataatagttcattttcttaaaaaatagctaccatatgtacccacgtgtgaaaaccctgttttcgtgtgcgatttgtgctgcccatatggaaagatactaaaaattattttttatagtgataagcgcccttatagcaaaaaaaatatttagacctagtagcctgcaagaacaggttttagccaaatgcgaaaatcattttttatagtgataagtgcccttgcaacaaaaaataaaatctttataccacaccaataagtaattatatcactacgtgaaacccacatctctatcatatgttccatccacaacgtgcatgagacccacccaggttcatgaaaaaaggcccccaaatatccatcatctaactctccgccaccgtacaccaaaaaaataacatatgtaatttggatttcctatcacaacgcacgagcatgtttgctattcttaaaagaaagaaatgagagagatgaaaggaaatggttcacttgaggtgccttatcttgaagtcgagtttcgaaattgaccctgaattgaaataccagatataacagatccctaatcttgcaaaaccgggtcacattaggtcccaaggcagtattgctccccggttttggtgacgtggtggctgagtcagcgtggggcccatgtgggtcccacatgtcagtccataatcttctcccacctatctcacctttcttcccttctcaacccaaacctccagggcagccgacaacaggtagggagaagagtggcgactgacggctgcgtcatggacctgcacggcgaagagcgcgaaaaagcgaagtaggaagggctcccgacacatcgtccccttgggttacaccacaacattgttgcgtggcagctcgccgcgcatctgcgccgtgtccgcattgtggtcgcatgtcagccacaccgtcgggattggtgagagaatctccaagagttgggagatggagtacgttgcgacgcctgagtatactcgcgagcaccactgactccatgagtgcccgtgcatgcacgcgaagaggacgctagacgctgaattgcgggagaggtgtgtggtggccggtgaccagtagggagaagggaggcggtcattgggcggcggcggtaggtagaagcccgacgacggcgcctggcgattggtgggaataaggttggcagccaacaagaagcttggcggtggcgagcgttggggagaagggcgcatgcatcgaggacgatgcgaccgcaatgtggagtagatggagttgacctcgaagacgatgcgggggagccgtgcgttcgcctctgcggaggagaagcgaagctcggggacacctgaacacatcggcttttgagcagctcgacaggggcgactatgagcttggggggtaggagcttggccagcgtgacgaggcggaagccccagccctcatgcgtgctggtgaaaacgacattgcagttgtagttgggacccgcgccacaccccgcacgcacgcaagtccatgacgtgagcgctcccggccgttgggagccacgtcagccggcagcctccgccgtcaagcttttccccgccaaccgacacccttctccctacctattggcgaatgccctagaggtttgggttgagatgggagtagaggggagtgaggtggaagaagattgctggttggcttgtggggtccacgtgggccctacactgactcagccgccacgtcaacaaaaccggaaagcaatactatcttgaattaaaagtgat

SEQ ID NO: 17996 - DNA, 2918 bp, Oryza sativa
cgcctgccgatctccatcctgctagcagaggtggcgccggcgtcctcctgctcccgccgcatttgcatcctaatccatcccatctggcctcggcctcgaatttcgtctcctcgcccaccgcttgcgccgatccccatcctgcgagcagaggtggagcccggcgtcctccttcttccaccgcatcgtcgttcgccggtgagcatccctctctacccatacctcatcaggtattctgcgttatccctcaaaaagtttgggggttagatctgcctctacccagctccacctactttcaagttgttaattttgatttccgtttttagctgatgtaatttggttactgaatctcatccaaacacccttagaacgaaaaatgtaagctcacatactttgtactcatccaaactcacataaatttcttaagaagaatctagaccacaaactactcatagtcacacaatatctttttatcaaggtatactcttataagaaattttcatttctcaaaattttctaaaggacatactgtgacacttggcattaatctaatttaacttttttttctttatcaggttataaattttctaaaagacatttgtgccacttggcatgaatctaatttaacattctttctttatcaggttataaattgacaccattgaacgtactttatctttctgtccacacatggctaccaccgccgcgacgaccatggtggcggcggtgcaccacccccgcccctgcttccgcgtgcgcgccgcctgggacatgaacccgagcgcctcccccaagcccaaggccaagcccccgcctcccccgccgccgccgttgccgaccgcccccgcccccacccacgccgacctcttcgcccgccacagcaacagcgagggccaaggtaatctccatccctcctctccgctttcccaaaccgctggaagcttatgagaatattgtgtgcttaggtggtagtggcgctgaaccactatatatgacatctactgaatgtgtcttaatacaatttctatgaaatgattatgtagagttattgtcttcgattgtcaagagcaatagaatggttgtgccatctgtgtctctgtaatcggtttgttctagtgtgtgtagttgaaatggttggtctgaaaatgtctgaatttgatcgatggtttgttgctttggtttgcagtgccaaagaagaccacaagtatgggatttgaaaggtggtggttaccacctccgccagaggtgaagaagccccgttcgctctacaacgctgcatcattggcgtacttgggggactgcatatatgaagtgagaaacagtttgactcaattgtggttatgcactgaaaattgttattatgtaattttattacatatagctcagcctatttgtcacttctatttgtattggattagtaagagataagatggtgcatataacgtgcacaaaactttcaacttcaggtctgtatactgtaggatgatctgataagaatggttctgctctttgattatgcagctttatgctcggagacatttcttctttccaccactgagcatcaatgactacaacaagcgtgtaatggatgtcgtgaaatgtgaatcacaggtttggatttggctcttcatctttctaatcaaatggatttgatagccagattcttcttattatctatctttttgggtctgtgctttgcataccttgatggacattgtctgctataagcaaaaatttactcaatgctttccatttttatggctgttgttttcaattctaaagggcagttctcttgtttgttatttttctgttctgtttgctacatgataatcacacaataagtatatcaaatattatttacattatttttggttattttcctttattcaggaccttctgctgaacaaacttcttggagaagattttctaactcaagaagaaaggtaaaccaataattctagccttctgccagatgtaaaatatatgctaatgataaaattcttatcaggaaattttatgctctagtgcccgtgtacatgactgaacttttatgggatgttagccctttagtgtccactgtccaggacttgtaaattcatctatctaggacttgtcttttgttgtaggccatctgttcttttatttttggatttttatagtgtttgatactatcttctgtgtccgatgctgatatcaatgtgcgcatgcttcagaagtactgaatttccttattctgcagggacatacttcgttggggaagaaatattgttagcagcaagacacgtaccagaaaacgtgctggaattgcagtttataatcgagcatcttcacttgagacactggtgtgttccactatagactaattaatgattgctatattggggaaaaatcaactctaagctgcaacttctgttgtactaccctcacactacttttgttgagaagactacatccttgcgttgttggttggtatttctattattagattggatatctttacctcacaaatttcaagcgcttggagcaattgatgttccagttaggatttacaagtggtgcttcctcacatcatattgcagatgagctagtctcaggctttaagtaatgcatcgttggtttcttgtcatgtaattaaggtatttcatcttgactttctgttactaacggataaccattggcaggaaaaagaactccacttctgtacaatctcagcaacaagcagcgcagtgaatagtttctgtattgcagcaaacatggtatgatctaaacaatagttatctggtgaccacaaccagcacaaaaattcatttagttttggtgtatgacatccaaaagtggttgctcaatgaatgaatagcaattaccgtttgtctgtcaaacaagtatcgagtgaattgagcaatgtacatgtatgcaaatat

SEQ ID NO: 17997 - DNA, 710 bp, Oryza sativa
atggctcgtttgggggtgcaaccaaaatacaaaatgaagatcatgttattgcgattccattcctctacttttctcggtcagtggacatcggagtaacgccggcggcgagtccgaaaggaggatgttttcgggtggtgatgcatgtgcttctacaatcatgtattggttaattgggtgcatgcatgtatgttctataggctgaagggtgctcaccgagatgctagacatggctggggtagctaggttgatgacggcggctcgtgtaacggctcggcggcggcaagaacctccgggtgaacggcgatggctcaatcagctccaagaactatcatgcatgtgtgtccatgaggttagagaggccccagggatgctactgatgcatggaattgggttggtactcaccggagggggtggattcggcaacggcgacggtgaccggaggtggagaagacggtggacgatctccacactcgtagcaccatccttcgagattcttgaggggaaatggagaggaggtcgaggcgaagacgctggcgcgacagcttggcccggcttggtccagataagcgggaacggcgatgatgtcactgcggcggtgcacagagcgcgctccagagctccggtgtgcacggcagcgttcccgtcgattggctgcaccagagaggatgaaatcaaaaggagaaatattcgccatggtgggctgcaggaat

SEQ ID NO: 17998 - DNA, 9722 bp, Oryza sativa
  unsure (1)..(9722): unsure at all n locations
cgtgactgggcgctatcttgccagaagaaaggcatgcttggcaaaattattgatccacatctccatggagaaatcagtcctccctgccttaggatgtttgctgattgtgcaaaacaatgtgttgctgatcgcagcatcgacaggccgctgatgagtgatgttctttggagtctggaagctgcactgaagctgcaagagaatgcagagaataacaaaaaattcagtgaagcaacaacatcgtcaaagagaacaccagacttgataactatcatgggtactgacaaaccatcgacctactcaacaatgagcatcaccggacaaaagatcatcttctctgatatgatgcacccacagggccgatgaaggacaacagttgaggatttcaattaatttctgatccagagttcatgtattgatgatcttttgatcgcaattactagaatattgcattattgatcaattgtgtcagtttctgtctaactagaaccaaatgttagtgattctaaattccgaataaaaacccaatgctacaggtttgactagttttttcttgtttctgaatggtaatttaacttatctagctctatgcaaaggcactatatttccgttctgtggttcagctgtcaactgtactgattcctgatgtttccacatatccacattacattaggaacaaatatccagggtatctggagacggaacaaggctttgctgattctttaacattcatcacaatggttctttcatatcaatgtgaatttctgcaatgctatgaattggagcacactcgacacacacagtgttgcttgcactggctgagtgttgcatgggtcatgtgcatggtcaagaacaatgacctactacaggcgcaaatttctcatttagtctttctcgactattataaaaatagaagatctttttgccggtatattttggtacttcatccgtatttgagttggtttttaagttcgttcacttttggaaatacggattcatgtttgagttggatttttaagttcgtttgcttttggaaatacaaaagaagtcgtataagaaatttctttttaaaaaaacttgcatgctaacttgagattaaagtcagacttctaattgcagctcatgattttctaaaataaaatatccaagcaaattttcacagtgaatttcatcctagctaaaccgtataacaataataagattaaaatagcattcatccgttgcaatgcacgggcatattttctagttattaaaaaaaagaaaggtgaaggtatgagaaattgcctaaaattgattgatcgagcttgggagaacaaagctgtataagaatattaaaagccagaaacaataaagattagtttctcgacatcaaaggttctcatacttttgccaggtgcttgagcttcctccttaatcttctacatgaaagtgccatgaattgtgctgtgttgtaagcattcctctcgtgagcctcccaggcaaccaagaagcgcaatgctggtcacggattgtctcagaaaatgccgatcacggacataatgtgacaaaaggggtaaatttctaggtactgatcacatttctttcaggtgcgatgtctattgacaaacaaaaatcatatggtatgtgatgttcttcaccccctttgctaatcttccttacctcagaaaatacgaatctatgttcttaggtgttttgtttctgaggtgcaaggtgtaacctaataataacatatcgataagcttaaactgaatgataactattgaatgcttctttaaaaaaggaaaaaaaacaaggaccatggtgttaggaccacagagtcttgctcattggacaagaacactgcctcaaaggatgcctcttattgtcgcgcccgaaaatcaccctaaaattttatcgtctaaattatttctagaaattgtaaaagccaaaaatagccttcaacaattaaaattcaccaagtttcaactcaaattggcgtgtcggaatttttgtttgttcctcatgttttaaaacacttaaccaatttttactggaattttcagagcattctaaataattttaatgcaacactaacctttctcagttttatctaaaaacaaaaactaaaataaatctctctccctctccttgggccattttcggcccatctcttcccccccccccctctctctttctctacacatgttttctttagaaaaataaatcacaaattcacaaaatgacattcaaagaacacctaaaattcaaatagccatatcttgactatttgaactcggaattgacccgttcaaattgctaatttttccttaaacagtaaaagaaccccattntaatggctttgctccctgcacccttatatgggnttttaatttatgttttggcccttctttctttgcgtatgtcgtgtagacactgcatatccggaagagccgctctacctagaagttgatcaggagattttggtagcgagcaaggcaagtcatgtcattttgatcatattgctgtcctaatttataaaattatgtttatttaaattattgcatttcgttttattaaaaattcccgcgtttatcactgttttatttagccttaccgattctccttgttatagccttattatttgtattattatgatccttgataactctaggaaaaatgaaactagtgagaactttatatatgtggtgcttactagtaaaattaggaatatgcttagccctggttaaatagaaacaaatagatgttttccaataattagactttgggaataacttttaaataatggttaatatggtttagtggctgtttagccatgacatgatatttccccttcaaaattccccaaacatgttttcagctgggttcggagtgcttgcttttgctagtcgcacctcggccatcataaggaccggtcttcgggccgaccgggcctctgttgcaaagcgtactccatacaaccacctgtctattgggtaagtcttaacgcatcgtctagtacagtcataaacaaggaagacacgaatagggatggatgaagcccttgatggggtcgacgtctttggctgtatgcccgggtcataaactgtctgctcgacccagggcacctggcaggggaagtctatgtcggacctctttgtttagggcagtactaaacaataggttatgtcatggcttctgtccatatgccgtggtggcatgtggcacatggaaacatgtgaggaagacatgtctggtgggtaacgatgtacacctctgatcagagtataatctattcgaatagccgcgccctcgattatgggcaagccgagcaatatacccaagttagagtttaattctattaaaattttaataactagagttatcacctgttggcttgggttaaggtaagatagcgttggagcgcggcttggtaataattttactagagaaaggtttatgttttatttaaatgcctttaaatatttaaatgctttgaaatgctagttttctgcaaaatagccttataaattaattctttgtactcccttgcattatatttacattttcccggcatggcttgcttagtacggtggttgtactcagccttgctcctttttcccacttgcatggcttgcttagtacggtggttgtactcagccttgctcctttttcccacttccagcagaggagtatttcagagatgatggctttgatgtttagctcgtgcctgccgtcaagcgtatgtggtggcccaacgtagcttccggtttttatcgtttatctttcagtgttgggcatttggtcgcccatgtaataaagtactctatttacgcttccgcttatatactttgttatttatcaactttgtaatgtgtaccttgccttctgagataaggaattatgcactcacaaacggaatatagtgttctattttccgggcgtgacagtcatccacatcatgtttccttcactagtcatattcagaaggctgagaataaatgcccaagtgctgccactgttcagaaggcttacttgcttagtactccctccgtttcacaatgtaagtcattctatcatttcccacattcatattgatattaatgaatctagacatatatatctatctagattcattaactaatatatgaatgtgagaaatgctagaatgacttacattgtgaaacggaggaagtatgtttttttttctctttcaaaaaccatttagaccaaggtcacccaacgacagattcaagcagataaccttgtatgggctaaaaggctaactaaaactcacctgtgaacacacgatctcacagtgatctgttgcaacggccttgtactgcaacctccgtctctctcctagacattatatcgaacacctgtcgaacacactgttgcatgccatgtaaacaagcacacgatctcaccacaccattaagaagtgaaaagataaaggcaaaatacacatctgtttgactaatcccaccaaaggatgggggtagtaattttggtattactgcacaattaatctcaccttgttggacctcgccatatccgagccaccggtgtccaactcccagtgtctgcggtgcctttgcctgtcctcgcccggcgtccgctttgccgacgccgcttgccgactgttggccggagccgcggagcgtcgttgcggcgacgtcgtccagcaaccgctcgcaactgggcgtcgccacggttgatcgatccattcaaccttgtgatctttgttggtttggttaatagccaccgagttagaaatttcaggaaacgaattaaccatcactatgctggtcatatatgtctactgaaacccaacaattaatcaaaaacaaaaacccaacaattaagctctcggaattctctttccaacggatccagtttgatctccaaattccatctcagacaatcgtaataacagaaacaaggtgttgattatttaatatgagagagagtatatataccttgcacctatacctttgagatatacaacatagttgcaactcctgatcaaagtttttgtttccttttgtccttcactcgggacgagcaaaggtttaagtttggggggttttgttgacggtcgttatcgatcagcttcgaccgtcaatattaccaaaatagagaagaactagtaatgtttgcaatgcatatatatgttagaataataatattccattagtattaggtttactaaccttttgcagagaataaccatgaaacggaggagaatcgatatcaacacagacgataaatcaatcggacgatgtcgagaatcagacttatgcatgaatgggccaataactcagaattgacacgacaaattgggctaaaattcacaagtctgcggagaagaacaacggaggaggccacctgccgaattagggccaggttgggccggcccctggttcggccgaaccagggggttcgcccgaacccccctggcgccgttggatgcagggttgcggctggacggtgtggattagctcccaatgatggttggagggtatttccgaccattccaaccgtcacaaccgttattgggaggctatataaacccctcaccttctcacttcacttacacacctcaagcaaggctctctcatattaagtttagtagtatcaagctagtagaataggaatagagtagaaatcaggagtccggaagtcttcagaagagttcgggtatggctctagtagctttccttttctcttttgtaagctttgtacttttattagaatactcttctatatacatttatggtattgaaatactttccgagtatataaatgcctactttacattatgttcatgttatactgaatatgctgctagcttatctgggaaatgctttggtgcgggtataatgtttgcttatgcaattgctctatgtcatgacgatgatattagaatagtattgtagtttagacatggtatttagattacgggatatcattatttggggttatatgctgtggatgaaaggtgggccgcagatggtgacagctcagtacgggtattcctccgcgcgtgtatataatcctaagttaaatccttggggagggtactcctccgtatttagccccggttgtatggtcatacaggctgtcgtaaggaactcggcagtcaggggtggcttctcaaagtacgaggagggcatcggatagaggggattagctagtatattggataactataatgtatgtatactatgtatactagaagtataggagtagattatctttctcttttctttccacttagcttatataatatattatgagaatgagtagctactgcttgtgtgtcactcccttggattatcttaacccctgcttaggatttgattattacaagtaatatataaattattagttctctctacatgatcttcccacgggataaaataaatacgatacccttggaatactctcgggtgaaatgctacaatggtatatccgtgcgcttgcggatgaactctgtaaccataatatactagaagtatttctgcgtcattgatgggaattatatttctagtaatgtcgttaagaaataccaacaagcattttcggcgccgttgccggggaagattcataatagagattacctgaactaatactttatatttacctctgtataatcactgccctttgcaggctaaccttggttgttttcactttttactgtgaaaacagggtagtgcatgattggtttcaacttgccagaaaacttcaaagaaaatccagaagctttcttccaaagcgtcaggccgtgagtcgttgctccgcagaaaactctaccggcagagaaaccagccgtactagcgccaccgaccttcaagactatggctgacaagaccctccgcgagctcgctgctccctctgctgacaatgtggccattgggccgcagatcaacatgggagatgtggatttcaacttaaagtccagcctcatcactatggtgcaggctagcccgttctgcggcaagcctaacgaggatgccaacgctcatctgcagcagttcctggagatctatggcacgtacactataaagggtgtcagtccagacaccgtcaggctgaggttgtttccgttttccctcctcgggagagcgaaacactggttttacgccaacagtgctgctgtcaacacctgggacaaatgctctatggtattcctcttgaaattctttccgatgggcaaaaccaatgccctacgtggaaagggacgagtccattcctgaagcatgggaacgacttcaggagtatgtggccgcctgtcctcatcatgggatggacgactggttgatcctacataacttttataatggactcactccaatgtcccgtgactacctggacgcggcagctggaggaacattcttctctaagacggttcgaggagccgttgatctaatagagaagatggtctccaatatgggttgagcgaggtatgcacaccgtcaaggagacggaattacttactgccaagctggacctcctcatgaaacgattggacgaccacgacaaacggccacaaggcaccgtccaggccttggattcacacgttacgtgtgaggtctgcgaccacacgggtcattctgggaatgactgcccagaaacccgtgaggaggcgatgtacatgggcaacaacaacaacggatatcatcgacaaggaggtcaagggtggaaccaaccacgcccgtatcatcaaggaggtaacaacaacggtaacttctctaaccaaccctccttgaaggatctcgtctttgcgcaagctaaaaccactgatacgctaagcaaaaagctcactgccaatgacaagatccttgaaaatattaatgttaagctagatggcttcgcttccgcttttcaaaaccagctgagctttaataatgatagaaacccagctagctcaattggcttcattagtccctgcaaatgaaactgggaggattccagggcaacccgacacctccgttgaaaatgtcaaggcaatcacgacgagggaaggtaagtccactcgtgatcctccatatcctaaccctgcaggaactaacgggattgcaagagaagcatcatccagtgagtcggctgacaaagaggttcagccagaaaagactgtgccacaggagtactgcaacacacgattgctgccgtttcctcaacggagtaggaaaccgtcagtggacgagcagtttgctcgttttgttgaagtaatccagaagatccacatcaacgtgctattgttggatgctatgcaagtgccaacatatgcccgttatctcaaggatatcctcaacaacaagagaccactcccaacaacggaggtggttaagctgacagagcagtgcagcaacgtcatacttcacaggctcccggaaaagaagaagaatccggggtgtcctacgatcacctgctcgatcggtgtacatcagttcgaccaagccctatgtgatcttggagccagtgttagcgtcatgccaaaggacgtctttgacaagctcaacttcacggtgttggcaccaacaccgatgcgcctacaactggctgactcgtcagtctgttacccggcggggatagtggaggaaaatatatttttataataaatttatcttgggttgaaaatattattttttctataaacttggtcaaacttaaagcaatttgactttgaccaaagtcgaaaaatcttataacctaaacagagggagtacattccgatgacttctagaacacaagaatcaaaatcagtggattggtcaccgcgatcggcctgcagcaacctcatcgcgaggagcgaactgccagccatgacggacacccttgtcggtcatcttcgactgttcgtacggatcatcttcatgatggtcaggttcgaggcttagagctcctggccagcacgccaacgcagaagcaatgttttaggatcttttttagtgtacctttggttcgatgtggaccattgaacggatgagataactccttgctactacatctagtattagagtgtagtagtgtagtagaagggtaattgtgaaaaaattattatagcattattgtaaattcaccattaggattaggtgtaatatgtaattgctaatgggatcagatcgacgctaggtttaggggcatcagccaggaaaatgcttctcttcggatgtcctatcagatacaaaacatcggacgcctaggaccagctcactcctttacttactagtttctcctttctctatgttgacgtcaggaaaatgttgcaaatcggtagcatgtgaattggacgaacccctgtcagtgtaaacatacatgcctagccgtttcttttcattctttcctcatctctttaaatatttttctcctaaattacttatccgatctacgaaccgatcacactgttgtattcgttgcaattaaatatttacaacaagatatcacatgattatattatgtcaaaagaaaaacatgtgtttcaaaccgttaaaacaaaatgtttcatacgtgatagtgatatgtttcaatatgtgccttcggtgtgtttcacaaaattcctgaaactacctgctactactctctccccacctcatgcatgcatgcatgtattttagcaagcttcaaaataatttttctcttaagttacttattcaatctatgatccgatcataccgttgtattcgttgtaattaaatctttacatcaagatatcgcatgattatattttgataaaagaaaaa

SEQ ID NO: 17999 - DNA, 8939 bp, Oryza sativa
cctatagcatgctctaacattaattcacagctcatcggtgaaaaatgtccgagaaaaccatgcgcctgcaatggagaagtgaatacaaaatccaacatatttccttgtgatgcaacatgcaagcagcaacaacggacacctaaaaagaggcaattgaatttaggtattttatcaaataactttgcaaacaatacaaagtgcatataaaacggatgcagggcattttatcaaacacatagtgcacatatgattggttactatgcatacctgtgccaaaccggatgaggctcctgacagacttcctctggatccaaatgatttgggaataggagtctgtccaacaacgcgtacttgatctaacggggactggggaggcaactgatccagagcttttgaggtgactgatggttggtataggatgatttgaaagaggttatgaagaggattagttgggttaattacggcacctcatcttcgcgtaggtggttgcagtttcttgtcactgatttacttcaaagagaaaacagaacatggcgcagttaatagaaggcgatgagtcgtggctgtggcatcgttatgggctgggccaacggaaaaacgtttcacgtaacagaggctgagtaggatgggctggtctggcctggcccaatattgttgaatgtcgatctaacgtccatccggagacctgcaaataatccaatggctcaagagaaaaggatgacgtggcgcaatgtggtgcaagctttatagtctagtgggtaccaactatataggaagaaagaattagctctataggaagaggccttagtttgaagcagattgggcctgttcagtagccccttgactacagttgtacagctactacctccgtcccaaaataagtgcagccgtggatattcgttcccaacgtttgaccgtccgtcttatttgaaaaatttatgaaaaatttgaaaatatttagtcacacataaagtactattcatgttttatcatttaatagtaatgaaaatactaattataaaaaattttcaaataagacgaacggtcaaacgttgaacgtgaatagtgcaaaactgcacttattttgggacggagggagtatatctcttgtaatagactagttgccgtgtttcttatacaatagctgtactgtaggtgtaactgcaaccgctgcaccaataatctaagctgaacatgctcattattgtgtggattgtacacaacatttgcctgattatagcgataaattaaatattttgataataaacttaataaatactagaagaatgtattttaaggaaatatattctttagtcgtgaagcaaataatccggcaaataaactaacaagaattgagaaattttgatttattttttttcccgctgacttgactcatgtattggtatcactggaccagccgcttttcctgcaggagaatgggatccggatcaaacccgccacgcccgcatggacgcaatagtcaactagaagtcagaggatggccctgaccaagagtactacgactatgaataagagtatgatgcgcaaatacgcaatagctttgaccaactcatcttcctggccccttagcgcgtactcatattttagcagcaggttaatcgagtataccctatactactgattaatcagcccaagtgtttggatccaaactttgaatccaaacttctaatttttttcatcacatcaacctgtcgttttcagtcacattgtaacaatttcaacccaaacttccaactttagaagaaactaaacacaaccaaaatttcaacttataatctctccaaagcatcgagtactgacaatttctcatctcgagattcttgtactgacaagtttttattataaaaaaaggaaaaaaaaatcgtaaattagaaggcggcgcctacaaattaagcgagtcaaacattttggtagaatgcaagcaacggacggcagatgtcgcggaccaccttaaaaccatactcctcgatgacaagagcgaggattaccactagttagctttgtaactaggagcctaagccagggaggagcaatggcgagctcgagcttgtcgcgccgtgccctcctcctcttcttcttggaggtagccgtcgccatggcgctgcttcttccgggcggtcacgcgcgagtgtgcccgccgtgcggctcgacggaggtgccgtacccgctgagcacggcggacgggtgcggcgacccggagtacaaggtccggtgcgcggcggcggcggcggggggcacggcgcccacgctcctgttcgacgcgctcaacggcacgtcgtacccgatcacctccatctccccggcgtcgcagcgcctggtggtgtcgccggcgccgttcgtgtcgccgggcgcgtgcgtgtcggtgggcgcggcggcgtcccccggcgtgcagctggacccatcgcggccgttcaacgtcagctcgtccaacaccgtcatgctgctcaactgcacggagctgctgctgcggtcgccgctcaactgctcctccaactcgctctgccacgcctacgcgggcgccgcggggtcgacggcgtcggcgtgcgcgccgctgccgctgtgctgcacgttcgtggcggggggctcgtcgacgtcgtaccgcatccggctgggcccgcagtcgtgcagcgcgtaccggagcttcgtggggctcgacccgtcgcagccgccggcgacgtggggcagccgcctcgggctggagctgcagtgggcgacgccgagggagccgctgtgccgcacgcaggccgactgcgaggacggcgccgccgccacctgcgccgacgacccgtcggcaaccggaggcgcgggcacggtccggcgctgcctgtgcgtgtccgggctcgtctggaatcccatcgctggcgcgtgccagcagcagagtacgtttaatttttttgcttcgacggctgacagctcggctgtgaggcgcctctaatttttttttatggctgttaattttgatgcagatctcacggatagcggatccaaccatgcgcctctcattgctggtaattatattgcttccttccttcagcgctagctagcgtcttaatttcttattactgtcatcctgggaaattaattaggacctctgttctcgatcgggatgcatgcttgacgcctactatctagttacgacttcaatttgcaaggcgggcgactagccgcttgcttggttttaacggagagagatcgaattgtggagtcgttattcgttgctttggtgaaaactcagtgattaagtaggccgctattacccttttgttagttgttactgcgagtagttactcgctccgtgcacaaatatgaaaatttctcttagcatggagtaaaattaagaaggaaagaatgaggtatggataggggtagaagtgtggtcgttggggataagacgaaaataaatttaaacgagagataaatgattgatgggacacatattattttaaaatctttacatttgtgaataaattttaattgattggaatgtttataatactgaatttttaaaaaaatatttggaatgcttatatttgtagatagagggggtcgtagtattatagttatctgattatgaataagaaataatccaagcatcgaatacatatcaggagcatggtcaaggcacttagtcatttttattcggtatacaataagtaatccgggctgataaaataaaattgaggtcaatgatctggattgaatataaatgagagatcaactgaaagtaggtttacatcagtatcatgctgggtcccatactcccttgcgccaatggtcaacttgcggcggcttacatccggagaaaagcattgaccataccagagcaagtgtaaatctacttaactccatccagagagctagcattgtcagctttacaacacggacgaaccaaggaagttcaacggttggaaatttggaatgagttgctgcacgatttagctcgctttggagtttgtacgaattctccacgcgaaacaatttaactccttcgtggagcccaaccattaaatggatgtaccaagatttttctttgaaaacaatacttaataaataattcatggaggccacatcttggatagtttatatatgaaaattgtctatcctgtctcatggtgccacatcaacttaattaattttttctagatttgggataatcgattgatcaaagttccaaaacatataaaatatatcaaatcaaaccatgttcgctaatcgctacaatgaaaatcaacacaccacacaactcattttaaccattgtgaattcggtagatgtaaccttctatcccacggtaacagcagcaacacacatgtaattttcatctagctggttaaatatagggtgaatagctaatttagtccctcaagtttcaccgaaggtttaatttggtctttcacgttttattttgtccatatagctcctctaaatatttgttttggcttgaaatcatccttgggtccacttaatatgccatatggctatttccagtcaatattcctattagaaaatatcctttttgcccttaatttgtatacaactatacactagaaaagagaaagccaatataaataaacaacattacatatgtacttcccattatttcaatatgtgcacatgaaacttaagcaattgctatcgtatacacttgctagtacataatttatttttattttacataatatactatgtattatctataaaaaattcaagcatgcaatttttctcttttatatatatatatatatgtgtgtgtgtgttatttatgaagaaaattgttggttcaaggataaatttgaactaaaaggaaaacttgaagtacttatatatatatagatagattgaaatagaactaaactaagcctctgatgaaactgatgaaacttggaggactactttgactattcacccttaaatatagatatttgatgtttgttgttccttaaacataagctaaggaattgaagcataaggaattgattaaccagttagtactattggtcgaccgttaattaataagcacatcaaggcagcaagcgtggaatttactaactagtgaattaagaagataatggatggtttaatcttgctataaatacatgaatgcaatgcagggatcgtgtgcggcctaggcggcgcgctgctggtggcgactgcaggactgttcgcttatcggcggcagcagcgcatccggctggccaaggagaagctggccaaggagcgcgaggagatcctcaacgcgaacaactcgagcggccgcaccgccaagaacttctccgggcgagagctgaggcgcgccaccgccaacttctcccgcgacaacctgctcggcgccggcggctacggcgaggtgtacaggggcgtcctcgcggacggcaccgtggtggccgtcaagtgcgccaagctcggcaacaccaagtccacggagcaggtcctgaacgaggtgcgcgtgctgtcgcaggtgaaccaccgcagcctcgtccgcctgctcggctgctgcgtcgacctggagcagcctctgatggtgtacgagttcatccccaacggcacgctggccgaccacctgtacggccccctcagccaccccccgctcccgtggcggcggcggctggccatcgcgcaccacacggcgcagggcatcgcgtacctgcacttctccgctgttccgcccatctaccaccgggacatcaagtcgagcaacatactcctcgacgagcggatggatggcaaggtatccgactttgggctgtcccggctggcggagcaggggttgagccacgtctcgacgtgcgcgcaggggacgctgggttacctcgacccggagtactaccggaactaccagctcaccgacaagagtgacgtgtatagcttcggtgtcgtgctgttggagcttctgacgtgcaagcgcgccattgactttggccgtggcgccgacgatgtcaacttggccgtgcacgtgcaacgggcagcagaggaggagcgccttatggatgtcgtggacccggtgttgaaggataacgccacacagctgcaatgcgacaccatcaaggctctcgggtttcttgcgttaggatgcctcgaggaacgccgccaaaaccggccatccatgaaggaggttgcagaggagatcgaatacattatgaatatcgaggccggcaacgctcatctcaaggagctgcacagcttatgatcagtggtcaattatattagttagtcaaacaacccatataatgcacgggttattatagtttttctttccgagttttctgttttgctagtgtctcctcacgtttcaaaagtaacgaatttactctgtggagttttccatttactcttaggcagggttgaaaatttcggatcgaaatttccgaaattttagaaatttcggttctatcggaccccaccatatgatattatttcggccaaaatttttatttttttatgatttagtaatattttgtttaaattagatcaaaatttattaaaaaaattcatataatttcggaccaaaatttccaaaatttcggtatttcggccacccccaagtacaaatgaccaaaccgaaagattaaaccctgctcgcagctttctacatctgcttattcaacagtaacaaatttacttgcatgaatgcgccccacatcagggttggaaattttggtcatttcggacccctccgatatgatattatttcggccgaaatttttcaaattttttaatttttcgtgaattttggtaatatttgttcaaattcaactaaattttgttcaaaatttcggaaattttggaccgaaatttccaaaatttcggtatttcggtgaggtccgatcaaatcggctaaactgaaaagtttaaccctgccccacatcatacgacaccattcctagatggccataaaataattactatcagcttacaacgctagtaattcttttaccagtgttataaatattggttagacttcgtggtctgcgagtaaaataattaccaccttcctctcgatatagcccatgatctcgtagccaccgtatagtaatatgtttattgatgtgttcaatatacagtataagagtaaaagttgatactaagaggattgttaatctgtatcacaaaatggccatatgaatgaaaaaaaattataggctcaatcacacacgagggatacaattactcacaggtgaatcaaactagaaaagaaaaaaaaatgatacagccaaaaattcatcgtgaagctaggatcctggtggctttgttggatcttgctataaggatagagaggctggtctgtgtcttgtgatggtagtggatagtggagagggaaaccgggtggtgagcggtagtcgacgttggaatcatgaaaggacatagtggcgtggtataaagatgagctcgacgttgcgcagtagcatccatccatcatctagcaagcacggaaaaaatgcaaaaacattctcgttcatgtcatagagacgacgagggaaaaaaatagcaaacaacttccatcaccggcgaactccaccctatcctctacggccaaccacatggagcacgatgtgcaaatgtaagacctgtgcagccgatcagatcaattcagataaggtaatattggagattacacgttaatttgatttgcaaacaggggcttcatgcgtgaaagtgaaggagagtatgtagatgtaaattgaagtgtcatttccttacttgcttgttctgtcaatgtcaccgacgtggagcagccgccggttattgctctcggcctaggtgaacacctccttgctggttaaggtactacctagcgtccggctgcgaggctcgaagcagcaccttcgcctcaaccgccaccggccaccaccgtcaaccgccacggtgtcgtcgtcctcctcctcctccatggtgcatcaccgatctgtgggctaggatggtggatcaattcagataacccccccgccccccaagaaaggaaataatgaagtgagggcgagagtggttggttgggtatggggaaaatataatatatactggaagcgaggaaattgcttttatcgaaataaattatttcctccaataatggtgggagcgggatgatgggacgtggggtgggatcggatgcagggaagttgtttttatctaagtaaatcgtttgctccgataacgatgggagcgggatgatgggacgtgggtgaggtgggcctgcgctgatacatgtttgacacttgctatattaggagcgcactgcgctcctagtagtatctctatttgtttggattgtttttaacgttgattatgtttttcttttaattacctttgcagcatataaattctaactaaaaaagttgatgttaaattaaagatataatgttgttctatcataaatgaacgctaattgttctcatttctgttaacaactattaaaaagctttcatattggttcatactattatttcacacgcgttgtgcaaaatgtatatgacaataaaattgatcaaaattgcctcagcattcactaccaaattaaggatggattaaaacttagataccattgcttccgtataatatataggcaaataaatcatccacataatttgtggctagctagcatatatatcatgattggtacggtgagagttagaattcttctcttccatctgttcacttattttcttcgaaaatgaatttaatttgaaatatgactgcaactatatagatcgagcacgttgatgtgctatagactaaagcctaggtttattgtttgaattacttttcctaactaacattcacgtatttagtcattaaaatatttaaatcaaaactatattgtatatgacgaccgggtcctttatgctaaaaggcaaccttttatgcaaattaattcttcaaacatctaattgatatatgaaagaatttgtatcccttttactcat

SEQ ID NO: 18000 - DNA, 6429 bp, Oryza sativa
ccattaaatccacctccgctcggaccagcattgagaccaaagccacccctccacccatgacctccagcagaattattccatctagtagtactttttgtaaaagacgtataatactccttcgtccttccctgtagaaatatgataatttttttggaagtaactttacaatttgcatatcattttgttatttacaaatatattacatcagtcctaaatatttactccctccgttttaggttataagacgttttgactttggtcaaagtcaaactgtttcaagtttgactaagtttataaacaaatatagtaatatttataatactaaattagtttcatcaaataaaaaattgaatatattttcataataaatttgtcttgggttgaaaatatttctacttttttctacaaacttagtcaagcttaaagcaatttgactttgaccaaaatcaaaacgtcttatgacctgaaacggagggagtacctgcttacctaaattgaggagttttattttccttcaatacgccttatgacacccaccaaagaaaatagcataaaaaatatatgcaaaatttaagacttaccatagataatactatatctaggggtggatagcgagccagctcggctcggtcaagctcgttaagataggagctggctcggctcggctcgttatcgtaacgagctagaaacccagcttggcttggctcatttgaaagctcgaggtagctcgttaggcttgcgaaccaaaccatccaggcggccaggcctctcctcttctcagcggggcgcggcgcaactaggggtaaggggtggatgcggcatgcgggcggcgcggcggcctccttcgtcagggactctagcacggtggcagcgagctcggcttcgacgtgccgccgcacgtcgccgacggggcacacgctccacccggccgccatctgtatgcgacgatgaggccgtgctggaggagctcgtcggcgggctggcgatcggcggcgaaggaggaggaggaggaggaggagctcgtccatgggctggcggctggcggctacagcacgcggcgctggcggcggcgcacgccggtgtgaaaggggattggcggcgcatgatgcgggcatgcggcgcaggaatggcaggatgcgggagacagggaaatcggggagagtgggagaccgagggtagtctctagggttttcctttcagttgggcttgggccgttgagtaacttgtgttgtctcattgtttgttgggcttgggccttagagtgctggctcgttaaggctcacgagctagctcgagctcattatctctaacgagctttaaagccagctcagctcgttacgaaatttaaacgagccaagacgagcgagctaacgagccacgagcttcctgcccacccctaactatatcatataaacataaaaatatgatgatacaagagagtgtaatttgtatatttattcatttctattcagtcttttgagtattgagcggataaatcataagcagtgataaaatcattcgagctaaaagtctacataaatagacaaataattagaaaaaaaaactaaatatagccaaaatgagcaacagattaaactgcaagtatcactaatattttagaaatttcaaatttaaattttagccacataatgatttgaacaatggacacgattattagaaaccttttcttctagataataagataatggatcattagatagcaagatattacactcctccatcccataatataaagtgcgcacatatttttagattcaacttttaaaacatttgtttagtaattagtataatatgaattgaattttatttgttgaaaataatatcattggatttgacatttgaatttactttcatataattataattttgtttctataaaattatatgagaaattataagtcaaatattatttttgaacatcatgccagtcttagccatctaatttatgtgtcttttatattgctacaatagcaagtcaaattggttaccaacatgtttattttatgaaaccaggttatgtctcatgtgtcaaaatggttatgttttttgcaagtcgaacaatattactatgttagtagatctgggttctatgaaatgtactcttttaattaagaagtatctaatataggttacatgcttaacccctcctttgcttataagggaatcctcaatgtagccaagattggtctaaatggtgagtcgaaagtttcaaaattgagttaaaagttctcatttgtttagaaattttactcaaaattttcagttttgaaatgacactttacgttaagaaattctctcacgaaattttactttttttttgcggggatacaaaagtttacttgaatttaagaattcaaaaaaaaactcggaattatctattgcgcgtcaggcgcagccgtgtcgcgtcggcggcgcacggcagacggccgggcagaagcggcgctaattagatctcgcgcttatagaaactacaagtctacaatcgaaccttggtatactctcctaccaatcaaaattaacctgatatcctgttttgccaaatctttactgctactcaagcttagattcactgcggttttgcttcaggcaagttgatgcacacagcattttctcagcctttcagatacgtacgcttcacccacaagctagcataccaaccgttcatgatttgacggcgccgccgtagcgacgcatgcatgcaggtccgttttgccctataaataggcagcctctgcactgatccagtgcactcaccaccactgcactgcaacacagcaagcaagctcacttcttgcattcttagctcatcgattcttagccccttttctactatggcttgcactagggaggttgctttcggcgtgaacctgatcggcaacaacggcgccgcaccggcggacgaggccagcagcctcgccggctgggcgccggtcggctcgcgcaccacgctgtccgctcacgtcgagaaggacgacccgccggcggccatgctcccggctgtggacgacggcgggcgcgagcaccggccgagcggctctcggtacgtcctcgcggcgcgccgtgacggcgaggaggacgggctgcggcacccggtcccggccggcgcgctcgtgccccgggtgacgtaccgtgtcgccgggtgggtcgccgtgcagagcggtggcggcgaacacgccggcggggagagccacgtggtgcgtgtcagcctccacgtggacgatggcggcgagtgccgcgttctcggctgcggcgcggtgtgcgccggagtggccggcggctgggtggagatcaacggcgcgttccgccttaaggcgaccccgcgcggcgcgacggcggtgcacgtccacggcgcgccagccggcgtcgacgtgaagctcatggacctccgtgtgttcgccgccgaccgcaaggcgcggttcaggcatctcaaggagaagaccgacaaggtaagacaacatctctcactctgaatgatcacattaactaacaatatagtaccatgcatgttgatcgggaccatgtcatattcacatcggatttggccatttcaggttcgcaagcgtgacgtcgtcctcaagttcagcggcggagccggagtggaggcgacggcgagcatccccggcgcggccgtccgcgtggtgcagatggacaacgtcttcccgctcggcacctgcatcaacggctcggtgatccaggaccccaacttcgtggacttcttcaccaacaacttcgactgggccgtcttcgagaacgagctcaagtggtactggacggaggcgcagcgcggcctgctcaactaccgcgacgccgacgcgctgctcgacttctgcgaccgccacggcaagccggcgcgcggccactgcatcttctgggcggtcgacggctccgtgcagcagtggatcaaggacctcggccgcgacgacctcgcgtcggcggtgcgcggccgcctcaccggcctcctgtcccgctacgccggccgcttcccgcactacgacgtcaacaacgagatgctgcacggccgcttctaccgcgaccgcctcggcgacgacgccgccgcgctcatgttccgcgaggccgcgcgcctggacccggccgcgcggctcttcgtcaacgactacaacgtcgagtgcgccaacgaccccaacgcgacgcccgagaagtacatcgagctgatcgacgcgctccgccgcggcggcgcggcggtgggcggcgtcggcatccagggccacgtctccaacccgtccggcgaggtcatctgcggcgcgctcgacaagctcgccgcgtcgacggggctccccatctggatcaccgagctggacgtgagcgagcccgacgtgtccctccgcgccgacgacctggaggtggtgctccgcgaggcgtacgcgcacccggccgtcgccggcgtcgtgctctggggtttcatgcagggccgcatgtggcgccaggacgcgtccctcgtcgacgccgacggcaccgtcaacgaggccggccagaggctggtcaatctccggcgggagtggacgtccgacgcgcgcgggaccatcgacggcgacggccatttcacgttcaggggctaccatggcacgtacgtcgtgcaggtgacgacggcgacggggaagatactcaagacgttcaccgtcgacaaaggggacacctcgctcgtgctggatatggaaatttaacgactacgccggtttatcttatatttgcattgattcatgcataatcatatatcgaatgagtggagggcacgtgggacaaaagaattctgctagagaacagagtatgttctgtccctaactccctatgttttacataatttggtaatgggtattgtatggttgtactattgtaagacaaatgtaaggtattgcatttgctaagatttaatgcatatgaataatgtaaacgagttatttccctaacaaaaaaaaaaggtaaacgagtaattcctcgttttatgcaacttatgtgccagccgtgcattgtaacggcttcttagtagggaggataattcatatcagcggtgatcccttataattgtagcacaacaatatctataactaagttattatataccgtgtattagaaaatttacaatataaatattggaacgtacaatgtagttaacatgtaagtgtaggtaatttacagtgttaaaatgatttgaagtgaatttcacaaaactatagatattttggccaaactattgtaaaactatatatttaaaacgttctatcacaaaactatagatttagggcctgttcggctgcatttctttttactatgctgtagcctacctaaacaataatatgtgtgtgtggctgcagtagaaagccagaaacaactgcattgtagtgcagccgaacaaagccttagtgggaaatttattataaaactatagatttaatattaagtatcacaaaattacagattttatattaaagttatcagaaaactacagattcaatatagattttatattaacattatgttggagctataaacgtcgtagttttgggataaatttactacttactcttcaattttataacattccatcctaaatatgtagttctgtgagaaattttgcgttaaatatatagttttacgatataagatcttaaatctatagctttatgatagtttgatcgaagtatttgtagctttgtgaaatttactataacatgataaataaatataactactcttttttcctgtgcattttgatggttattttgccaaaggcaagaaattgtagaatcttagattcgtattgaagttgcatgtgtgaagctgtgcaactcagaggccatgcacactgggaaacacagacagggatgacagttgacaccgctgttgtttctacagtactccggaaagaggagacgtgtgtttactatttatagtaaaaaaggaagggtcgctggttaagctcactgggtgactgtgcacggcatggaagagtgtagctgagccactgacatgtggggccatagcaaaagtgggacccacatgtcagtggctcaactgcatatgccgtaacggaatagcgctgatttgcttccgcgcggcttagtcgcctccacaaataatgaaataatactaatccgcatgcaaattcgtcagggaaattatatataggaccccctctcccgaaatgagtggaagtgttggaacgggttcagcgctgcagactgccactgtgctgcaacctccttatttcttgccgtctcctcgtcccacaaccactctttagctccactggatcgagaaaaccaagcacagatccaacaaacgcccaaagaaaaagtcttttgagatacacaccaatgagcctaactgactagctagcgatcgaaacaccctgctccagatcgatctggcctagctagggaccttgctgcg

SEQ ID NO: 18001 - DNA, 3118 bp, Oryza sativa
atccgtgtgtcattgtggcgttgttggttggttggttggttgcaggagagtataccgatccaggaggtgttcgccgtgctcaagagctcgccgcaggggctcacctccgccgatggcaacggccggctcgagatcttcggccgcaacaagctcgaggagaagaaggtcagaattcagaatcgtgtgttcgatcaagaacgagtttgtgtgttttgggtctcgcgtacgtataaaatatgtgaaattggcatgcaggagagtaagctgctcaagttcttggggttcatgtggaatccgctctcctgggtcatggaggccgccgcgatcatggccatcgccctcgccaacggaggggtacgcgtcgcccgtccccgtcgccgtcgcgtcagttgtgtgtgttttgaccgccgtcgatctgacgcgtgcatgcatgcgtgcgtgcaggggcggccgccggactggcaggacttcgtcgggatcgtgacgctgctcttcatcaactccaccatcagcttcatcgaggagaacaacgccgggaacgccgccgccgcactcatggccagcctcgcgccgcagaccaaggcacgtcgcgcgtgcgcagtgcgccacgccatggacgaacactgacctatctgtgctcgacggaatgactgactgactgactgactgatcgatggtcggtgcatgcagttgctgagggacgggaagtggtcggagcaggacgcggcgatcctggtgcccggggacatcatcagcatcaagctcggcgacatcatcccggcggacgcgcggctgatggagggcgacccgctcaagatcgaccagtcggcgctcaccggcgagtcgctccccgtcaacaagatgcccggcgacagcatctactcgggttccacctgcaagcagggcgagattgaggccgtcgtcatcgccaccggcgtccacaccttcttcggcaaggccgcccacctcgtcgacagcaccaacaacgtcggccatttccagaaggtatcatgcatgcatccatccgccacttctcgtcggagaggtgccaactgcttgcttgctctgctcaccatcaatggtggtcaggtgctgacggcgatcggcaacttctgcatctgctccatcgcggccgggatgctgatcgagatcatcgtgatgtacccgatccagcaccggcagtaccgcgacggcatcgacaacctcctcgtgctgctcatcggcgggatacccatcgccatgcccaccgtgctgtccgtgaccatggccatcggctcgcaccggctgtcgcagcagggcgccatcaccaagcggatgacggccatcgaggagatggccggcatggacgtgctctgcagcgacaagaccggcacgctcaccctcaacaagctcaccgtcgacaagaacatgatcgaggcacgcacagcacacaccattaatctttcagttttgccgttaatttttttccctatcgatcgagtagtagttgtcatcaaatcaaatcgcgcactttggatttggatttcagccgttcgtgaaggatctcgacaaggacgcgatcgtcctgtacgcggcgagggcgtcgcgaaccgagaaccaggacgccattgacgcctccatcgtcggcatgctcgccgacccaagcgaggtaagtgaagctcctcaagctcgcacggacacatcacacaagctcccaatttcctcttcttctacaaataaatctcacgacgtacgacgtgtctggaacgtggcaggcccgtgccggcatccaagaggtgcacttcatgccgttcaaccccgtcgacaagcgcacggccatcacctacatcgacaccaaagatggttcgtggcaccgcatcagcaaaggcgcgccggagcaggtcagccggccggccggccaccgtcagctcagccatgaattctgtaccatttgcattgcatcggtgaatttgatcttgttggtgtgcgtgtgtgtgtgtggcttagatcatcgagctgtgccgtctacgggacgacgtgagccggcgggtgcacgccatcatcgacaagttcgccgaccgcgggctgcggtcgctggcggtggcgaggcagaaggtgccggaggggagcaaggacgcgccgggcacgccgtggcagttcctcgccgtgctcccgctcttcgacccgccgcgccacgacagctccgagaccatccgtcgcgcgctcaacctcggcgtcaacgtcaagatgatcaccggcgaccagctcgccatcggcaaggagaccggccgccgcctcggcatgggcaccaacatgtacccctccagctctctgctcaaagacggcgacaccggcggcctccctgtcgacgagctcatcgagaaggccgacggcttcgccggcgtcttccccggtacgttcccagtgaccttcacaagtacaagatggaaaagcgaagccatggcgcagaactgatgatgaactgatgatgatgatgatgatgcagagcacaagtacgagatcgtgcggaggctgcaggagaggaagcacatctgcgggatgacgggggacggcgtgaacgacgcgccggcgctgaagaaggcggacatcgggatcgcggtggcggacgcgacggacgcggcgaggggggcgtcggacatcgtgctgacggagcccgggcttagcgtgatcatcagcgcggtgctgacgagccgcgccatcttccagcggatgaagaactacaccatctacgccgtgtcgatcaccatccgcgtcgtgctcggcttcctcctcctggcgctcatctggaggttcgacttcgcgcccttcatggtgctcatcatcgccatcctcaacgacggcaccatcatgaccatctccaaggaccgcgtcaagccgtccccgttgcccgacgcatggcgcctccaggagatcttcgccaccggcatcgtcctcggcacctacctcgccctcgccaccgtcctcttcttctgggccgtccgcgacaccgacttcttcacggtgaccactcatcacccaacctcgcacgcctcgccgccgcgcgctctgacgccgtgtgtttgtgggcagaggacgttcggggtgcacccgatcggaggcagcacggaggagctgatgg

SEQ ID NO: 18002 - DNA, 2434 bp, Oryza sativa
cgaacgcacgcagatggcaacgctgatcgcggtgtacgcgaactggccgttcgcgaagatgaagggcatcgggtggtcgtggggcatggtcatctggctcttcagcatcgtcaccttcttccccctcgacatcttcaagttcgccatccgctacttcctcagcggcaaagcctggaacaacgccttcgacaacaaggtaaacacggagacacggattctaatcacccgggtggacgtccacccatttatcgcatgttaattataggaatgagtttggtcgattgcgcgcgagcagacggcgttcgcgaacgagctggactacgggaagagcaagagggaggcgcagtgggcgatcgcgcagaggtcgctgcacgggctgcagcaggcggagacgtcgacggcgctgttcgacgacaacaaggactacctggagctgtcggagatcgcggagcaggcgaagcgccgcgccgagatcgccaggctacgggagctgcacacgctcaagggccacgtcgagtcggtggtcaagctcaagggcctcgacatcgacaccatccagaaccactacaccgtctagctagcaccatcgatctcacacgcatgaataccatacatgatcgatgatgctgctcgttagcttgataagtgagacaggatattctttttttttctttttttttggcagcttaatttaacggggtcaggagactgtcttaatttggtcagatgaataatgggggtacgtagcttttgttgttttaatggttttactttggagaggttgtaggtttgttggtacgtttgattggtcgaagaccagaataaaatgagggctaatttagtactttgtttgtgcatatgttgaagaatccatcagccttttcctaatgtttcaaactaagttttagcatgtactaattgttcttaggtaacactctttttaattccttgaggggatattccatcttttattgcattttatcagaaaaaatgaaaaatatatatatatatatatatatatatatatatatatatatatatatatgtcacatagcaatccataaatatgcaagtttcatttgaacttctacaattacaatagaaaaaaatatatgactataaacacatgtatacaagttagagttaattctgttaattttttataacttaggaagatcgaattttaattcgcatgtttgcaaagtggtatatagcatatcaatctatatttttttactatttttctaaaaaataagtatttaaatgacaagaaaaaggagggaatagccctcgatgggttcaaatacatttttatcattgtttatagagatcgcttggcacgattcgactcgggcacgaccaaggcacggcttgagatcagtcatgccgtacccgcccacgggttgcacatacggcctaagcacgacccaataaaaactcaggtcacttcgggcggtcgtgtcgcccgaagaaacgaccagcccatcgtgctcatccttcgaataagtctattttacctcccataagtctattttgtgtccttcatctccttggaccgtgccgataggctacagcgtgcaggagcggggcatgtcggaccgtggttgtgcttattattgggctatgtcgtgccaagccagcatgtcgtgtcgaggaagaggccaaggcacgacccaacggtcgggttgggtcgggttggcacgggcccgacaacaatcaagccttgttgtgcctaggccaagccaaatcttcatgtcgtgggccaggccgtcgagctacgggccttctggccaactatatcgtccttatacagtttctctaaatcccgtggaactatcatttactattcaaggttatacaaagattctagccttggagtatagaaataccgaacttttcattttatatattaaaatatttaaagaacaatttctattttcaaagtatcacactcctaacattctctggaatggtggttttaaagagcaccctttcgaagagtgttttttatgacgtcatacgcggttagcgcatgctaatgactgtgtgaatgagggctaactattctgccctcctagagggatgtaagagggccaacggccccctagtcgctttcctggaggtcctaagggatcgtctgcaacaaaatggccagccccatgtacaacagttagcatatattaaggttgtgccacattttgaaaaaaaaaaccactccagaagggtgttagagttataatactttaaaaataaaaattattttaaaatattttaatgaataaaataaaaataaaaaaaatctacaaatagcatatattaagaggactgcggtgtacagctcatatggagtaaactgtgggctggggaatcaaaattagtgatgaacaaaaaatggtaattgttcggcccataagaacattttggtggcccagta

SEQ ID NO: 18003 - DNA, 2895 bp, Oryza sativa
tgatacccagcgctttgctgcaggattcatcgattagtatatgttaaatattgtcaaaatgataaaagttgaaatgttaagaaaataatgtgaggaagatgatttgacacatacttgttgatatctataatataatattgtagatgatgtgttatgcttatatgagattttaataggctagaatagtaatttctactgagtgaagatgtggcatgcttgcatgagattttaaatggtctaaaatagtaattgctagtgggtgatgatgtggcatacttgtatgttgagctttcgtttttaataattgttagtgggtatcaactatatagaaagtatagattagcacagttatatagaaagtatagattagcacagttttcttttctttaggttccataatccatatattattaatttttccttggccgacaaacaaaacacaaccaaacgcaccgttgctcatagcaatggcccgaatacataattcaattccagcgcagttttcgccatcgattctgtcttgtctgaatatattacaagtcgttttcaattttgccgggggtgtacgtacgtagtaacgtactgtacggtctcattcccaggattcgaccaaatcgcggccaatcgatggaggtaactgcaaaatatatagagcgcacaaaaaaatcaaacctgcacggtcgattggagaatatatatgccaccatagccctttcctgatcgcactgcaacaacccgatttgattaattagctactagcaggatcgtacgattgatctgtccttttcacacgtgcgacccagccttgtttcctcactcagccgacacatccatccatcgatcagaagagaaaaattagtgccagtgcaatttatttgtatagaactagtctaattaatactgtagctagcctacgcgcttgtctgattgtgcattgtcttatccacttcggcagcagtggcagtataactaatgtgatgattagtactccctccctccgtttcaaaatgtttgacaccattaactttttagcacatatttgaccgttcgtcttattaaaaaaatttatgaaatatgtaaaactatatgtgtacatgaaagtatatttaacaatgaatcaaattatatgaaaaaaataaatgattacttaaattttttttcgaataagacgaatggtcaaacacgtactaaaaagtcaacggtgtcaaacattttgaaacggagggagtagtaagtagtataattatattgctgctgttagagaggcagctatagcttagtagctgctgttagagaggcagctatagcttagtagctctcgatggccatggccagtgccgggtcgccgttaatttcactgtgctggtggttgggaagtggttggagttggctggaattgaaacggtcgatcgatctcgacggcccccggccagcagctgacagctgcgttcctatgatcgaatcgatcgatcgaacgtgtggtctgatatgatcatggaagaagaatcgatcccagcaaataccttttcctgtcgtcgctgtcgcctgcgatattccttcccgtatcgtacgtcgctctcacctctctcacatatggccgtggttgttgcgaccctggaaattcatcagaacccccacgaggcaacgtaccttagctctagaaggagatcgatcagatgatgaggaggaagacgacgagcatgcgctgccactgatcgatcatcctatttgtttattgcgactgcctagcttgtcttcacgcacacatgtgcagtgtgcaaccggtatatataaaggtgtagcgggtgcctctgccatggacattagctagctcagctcagctcactgccactgccgctctgcctgccggcgatcgaggagaagaccggccggcggcgagctagcaggagagggctagtgatggaggaggggttgccgccggggttccggttccacccgacggacgaggagctggtgacgtactacctcgcccgcaaggtctccgacttcggcttcgccacccgcgccatcgccgacgtcgacctcaacaagtgcgagccatgggacctccccagtaagtctctagctaactcttcgatttcgatccccagtaagtgtgtttagctttaaaaacgagttttgaagggagaaattgtgagcatattgaggattgaacacggaacattcgcgggttgaaattgaagtgcatctctaaattgtgtttagctttgattcagcgagtaatataatatgcatgaatatgtcgtccattaatcattctttgatctgcaagttgattttaggggaaatgtaggctcttctgtgtccctttcggacttgttcaagaattcccttttgagaagaaatgccaaaggccctgcatgctttcatagaaagcagaagacttgttcaataattctctccttttaactctatacactttcttcgattaagctttttcttattctcagactcgttctttctgattggtgagaattgcattgccctctcgtacctttatagttgcacccgaaaattttaataaaatttctacacgtgcacttacattattatcgaattgtacgggtgtagtttagtggtcactggtgatcatatcactgcatgcatacactacaaatgcacacgtacaaatgaatgaattgatcaatcgttcttacacatgaacgcaatgttgatggatgtgatatgcaggcaaggcaagcatgggggagaaggagtggtacttcttcagcatgcgcgaccgcaagtacccgacggggatccgcaccaaccgcgccacggactccggctactggaagaccaccggcaaggacaaggagatcttccacggcggcgcgctcgccggcatgaagaagacgctggtgttctaccgcg

SEQ ID NO: 18004 - DNA, 3940 bp, Oryza sativa
gagtgggtcgtctgccgcgtcttcaagaagctccagtgccacctcgccaagccccgcccgccgcacgacgacgtcgacggagacggcgcctcgccgccggagatggtggacgcctcgtcgctcggcgagcttggcgagctcgacgtctcctccatcctcctcggcggcttcgcgccgccgtcgggcgagctctgccatggcggcggcggcggagacggtttcggcgcgcacaggcttcatgtcggcgcgtacatgagctggctgcaggcggcggcggcggccaaccagggcatgttccagtggccggcggccacgcaggcggggctggtcggaggcaccgtgttcgcggcggcgcacaaggcggcggggacgatgccgttcggcggcgggtgcagccagcagcaagcgcgggacgtgggcgtttctctggcgaacgtaggaggaggcgatgcgttgttcggcggggcgccgctggcgaaggtggacatggaatgcggcgagcaggcgccgcagctggacatggacgactccacatggagagccttctgaacatggccacgccaccatcaatttggataattattaagcaaaccatgcatacacgtattatatactcagttatatactagatgaagaattaatgtggtcgtcatccaagatatccacagtacagtacactacagtcagttattaattaattaatcaaaaatgaaagtgtagtgttgtcacctagaaaaaatgtgccgaaaatattttggtggagacggggccctcaagtttaatacaaagcagtaagtctattttgcatactcatcttttacccacgattgaatcgcatccttcaaccacaaaaccgggtataacgtctctcctaacttcgaaaaccgatgcaaatcgactcctttgatggttcgggaaacggcttttgctaacgtggcagaatgaccgcggtcaaaaccgtgagtcagcgcatgggcccacatgtcaatgaaatgtagcaatcatatgtggtagagcccacatgtcaattacatccttttatccttccctgtctctcccctttctctcccctgctgcggaagcggcactgatggagtcagcgaggagatctacagcgggcagcgacgaagacaacattgtggccgccggcgaattcacaatatcttggggacgacagcccatggctgattaagatgttgctatgattgcctgtcacctctgcaggttgcagcgagattgaggtggctggcgagggcggcggcgaggatgaggagggagaggagccacaacgaaagatgctgtagggaggtcaccatctccccattgccgggggtgggttcacctctaccaccagatcgaatctagatagggtaggagaggctacaggaacaggggtcctcccatgcccttggcctggctcccactccctcaccggctcgcccgctctgcctccctcgcacggagtcaaacatgcaacccccaccttctaacaccgccgcccatctctagagaggggaacgccaccagctgcccaccatcatccaagcgtttccttgggttcatcaccttgccaaccccatcgctcctatcccaccatggccgacgagttccttggggctcctcttcccgctgcccctgccctcagatcctccaccgttgcctgatgcatccagcaaacagggatgtgtctctggtcaccatgtttgtctcctcaccgcactccacaagggggacaggaggctccctgcagacggtgtcgagggtggcatggccagggcaccggggagctactccgccgcaaggcgatggatcggcagcaacaagatggagtgaacatcgactgttgcctacaaggggagagggggaggtgagggaaggagaaaagaatgtgtctgacatgtaggccctatgctgacttactggatttgaccacggtcaacccgtcacgtcagtgaaaactcctttccaaaatgctaaatgagtcgatttatactggtttttaaagttgggggagacgttatacccggttttacggtcgatggatgcaattcgatcgagggtaagataagagggaggaatgcaaatcgccacctcctcaaccgccttccacatgaggcaaaatgggctttcgcgcgcggctgcatcatgtatcatgggtggcctcgtggactgacagttgagatggcacgtaagtagattccattccttgtagcttgggcctggacctgggcccgttcctgggacggagaggcagcagagcacgcggcacgccccacaatcgacctcttaatccatcctcccctgtctcctcgcccatcgccctcgactcccgtctcctcacctgccgcctgcgcccgtctccatcctactagaagaggcggcggcggcgttctcctgcttccccccgcatcatcgctctcccgtactccatcccatccggcctcgaatcccgtctcctcgccctgccgcctgcgcccatctccgtcatgcgagctgaaggtggcgcccggcgtcctcctgcttcgtcgctcgccgcctcatcaggtattttctgttattcttcaagatacaacgttagatctgcctctgccctgctccaccaggggtgggcccagtagtaattcaagggtattcccaagatttttggacaaaaaaatatgtatatgtactctatactttgcatatgtattcaaacaaataaaaaagatgccttaaactaatcttgggccctattttaccattgggcccaaattttccactcccctccccctctcctctcacggcctgtttggcaagagaagggaagaggaatgggagtttcaaggagggagttgatggtgggattgatcatgggagttatatttttagtccccattctttgtttggtttcacatcgaattctctacaagtctcacgaattaacaggcctcccccaggtaagagattggtgggaattggacctcttaattttccatcccaaaccccatcgaattcctaagtcttccaaccaaactacaaacttaaactcccagatatcatagactcccattccccttcaccaactccctccaaccaaacaggccgtcagcccatactgagtttgggccacaactcagcccattcggctattcccctcccctaaccctaagactagaggcgggctggagcgtggaggcgggaggcgggcgcgtcggcgcgggcgtggctaggcggcagtaggcgacgcgtcggcggctcaggcgtgcgcccgcggcgtgtggtgccagtgcggctgcgagccggcgactgcggcgtgcgacgacgtctgcgagccgggccggcgactggggtgtgcggcgtgcatctgcgagccggcgtgaagcagggtcacgggcggcgcatggacgaccgttgaggcgtcgcccacagccggtcggcccctctcctcccgtcctctcccctcggcccttgcatgcctcctctcccctgtcctgtggccctatgctcccactggtcacgctgctgcggccgctccctcgcgccgtgctccgccgccgttgctaggccgtctcgccgatcatgcctgactcgattcaatcgattgccggaggtgaggtaacccttcaatcctcatcatttcccaattcgatgtaatttgttgcttgctcaactagtccaacaagacaagtatatactggatttgaacccaatttgttgtctaattttgtagactaaacaccaagggcctgttcactttggtgccattttcaaccttaccaaattttggtaaagttgtcaaaaaaagtggctacatttagtttgttgccaaattttggtaactatataataaatcctaccaaaattttgacaagttaccaaaattttggcatagttgccaaaattttggtgccaaaatttggtaaggttttttttggcatcaaagtgaacagcccacaaattt

SEQ ID NO: 18005 - DNA, 2046 bp, Oryza sativa
actcaagcaaagctgtagtttgtttattgtagtgcatggctacctaattttgtgcattaaccaatgaatttatgaaaatatgcttatagccattatatatattatataggttggaactgtacgaaactatacatacatatcatttattaggcttgatgttgtatttttttatcccttcctatttcgaataccccaacccaaaaatcctgggcccgccactctgctccacctacttccaagttgttgattttgatttttgcttttagcagatgtaatttggtgactgaatctcacgtcaataaattgtgaacaggcacattgcatccattcttgtgtactcatccaaacatccttagaatagttgcattagaatgaaaaaagtaagctctctcataattttgtatactcatccaaactcacataaatttcttagcaagagtcagaccacaaactactcatagtcacttaaattatctttttatcaaagaatattcttatttcacttcacaaaattttctagacatactttgtcacaaaattactttgtcatatttttataaattttaagtacaatctataaataaaaatttataaatataattttatatataattgataatataataaaatacaagttaaaattattaataagaaaaatattattaataacaatgatatttatgtatttataaatattttatcgaatatatttatatctattaatattaaaatatatttatctatttaaatacatgggtcatactattagtcgaacataaacatccttctcttcttgacaggtttttggattttggagtagcggtgtgaaaaaggattagatttctcattccctctcatttccttttccgactacacgaactagagattagatttctcccgccatacatatcctgtccctaacccaaatgcgtgatgtggccgccgcttgcagcgctgctccgtcgcctatcctctcacccgtttgactctcccgccatccacgctaaccttgtcaagtcctcctccatctccagccctatccctgccaccgccctcctcaccgcctacgccaatgcgggcctcccagccgcggcgtcccgtctgttcgacgaaatgcccacccgggatgccgtcgcctggaacgcgctcctcgcctgcctggtcttccatgctcggccctgcgccgccgtggccgccttccgtgacatggccaccgcggggttcacacccacggctacaaccctctgcaccatggccaaggcgtgtgccacgtctcgcgcccttcgtcctggccgtcaggtccacgcgcgcagcatcctcgcgtgtcaaggcgatgtcatcatggcaacaacgcttgtagatctctacatgagctgtggccttgttgaggaagcgctgaggctgtttatgtgcacggattgcccgaaggatgttgctctatacaatgctgttatttcaggttgtgtggagaatggcagattcagggaggcttctttattctggggaggattgagcttaatggaattacgctgacatgtgctctcactgcctgctcagcaacagcgaatttgatgtatggtatgcaggtgcattgcaaggctctccgtggtgggtttactttagagacgatcttatgcaatgcacttattgatatgtacgcaaaatgtgggcggacaacggctgctcgtatggtgtttgatcgaatggcttgcaggaatgtggtttcctggtccagtatgattgatgcttatagtcaccatgggcatggggaagcagcattagatttgtttaaaaggatggatgaaactgtaccagtggtcttgccaaacgccattacatttcttgctgttctttctgcttgtggacaatctggtcttgtggatgaaggcagagctatgtttcatttgatgaaaagacaatatgggattaatccgggaccagagcactatgcatgttttattgatttactaggccgtgcaggccagattgatgaggcatgggatctctattgtagtttcagtacaacccgaagtgagctttctggtt

SEQ ID NO: 18006 - DNA, 569 bp, Oryza sativa
  unsure (1)..(569): unsure at all n locations
tcctgcagcccagacggctcccagctgcggacagacgacggcggacgagagaggcgacggtgggctcgcaaaacaggaatagagaaacggcgaagaagaaatgtctgacatgttggggacggtggtgggtggggggggggggggacggncccgtatgcacagagattatattttccagtgatcacacacgaagtcacgaactaaactggctaatgaaaaccatgcacggcaaattccaaaataatcaacctataattacgtaatcatgtgtacgtaagatcaaattgtttaatacgaacaaaataattatgatgtgtatcagatgatttcgggagcaaggaagacggagctgttcatggggcagccgtaccgtaccatgccggcgaccagccgaaaccgaggctgggcaccgttgagcactcgagcatgtgccgcacggccccgtccaccaatggaccggcgatcagaggcagccgaacgacgaggacatgggcgcgcaccttactcggcggcacgcgacccggttttctttcgcgcaccacggcaacatcgaacgcctgtggtattaa

SEQ ID NO: 18007 - DNA, 661 bp, Oryza sativa
aggggacacctatgggtataaatacaaggccccttaggaggagaggggccacggacaatcgacgaccaccttaatcaacatccaccacaatctacggaacaacagaagccaatatacgccaagacaagacgccggatattgacttcagagataggcatggctagtcccctacggtgtctccagatactatcaggagaggcgaaagcgctatctctgatctcgctgggcacggattcaaggaggaagactaccctgttgtcgactacgagtcagatcgtcagaccgccatgtcgataacagttagataggctaccccaaatattgtactggtgtgattatcatgaataagagcaataccggcttcggccaacaggatgtagggttattacctgacaatcaggagcccgaacctgtataaaaatcctcgtctccgtctcttttacctcagtctcgcataatcctagcaccgacgatccccatactatgcaaataccagaattgcgacatcatatgtcgacagtggcgtgctaggtatggggactttggtgcttcaggatttcgacgagatgggttcaagagatggattctccaacaacaagctactcaacgacttcggctgtgaggagatctaacccaactgaagtgcatcttccgaccaaat

SEQ ID NO: 18008 - DNA, 1992 bp, Oryza sativa
gctcgctttctcgcaaagaacaccatactttgtggagtctcagttgctctatattagcagaaggcaaagcctttttcccgcgctttattaaccaggccagatcgagttcgtgtcacatggtcttaaactcttcaatcttagtacatcaaaccagacacactgtttaaccatcagctcatcatcaccttactcatgagaagaactaatccagagatacggggtaaatcaaacgcccaatgtttcggaagctgcagaggagaagaagtagagagtactatcgctcagattctttggtgctggttcgtcactgcgtcttcttcctggcgtccttggccatgcccctcttgcggatgccgacggacatgttgaggaggagcctgtccacgatgggctccgggaacgcggagatgaggaaccacagcaccgcgtgcggccagtagggcgtgcacctcggctcgtacccgatgtagcgcacggcggcgcgggcgtacgtctccggcgacggcgcgaagaaggacgccttcttgatggacgccatcttcgtcgccgcgtacaggggtacctgattatgagttgcgcataaaaaaaaaaaccatccaagtcagtcggtgctcgtttctatgaaaattaacttagggcacccaaaaaaaaccattaacgcgtaattaattgaattgaagatggatttatatgatattttaaatcaacttatacatatagaaagttttcataaaatgcacaatagtttaaaaaacgttctaacaaaaactaagataaaatatgtatcttaattagaaaagaaagagacaaagattctgatgcggcagctaagacaatcttgataaacgccgaacagctgacacacataaatggtgccagataacgacgttcccaacagcgacagcgaggatgtaagtaatggaaaatgaaaaacaggtagaggtcggccaacagatttgttttaaatagggctatatggaattctcctatcctcctaatgcttcgctgcatgttatgcccattaattttccacatgcactgtttgcctgccttaggagcagttggaagaattgaaagcacggtagaagtgcatttagctttcagccatgaaggtttcagtttcttgttggggcgttatgtcatcatcgccatggccatccagcagatcgcggaagtacccaatgtagtacaagttttttttttttaggacagcatggcaaaaccatgttcatgttgaaaggacatttcttggattactgtataattcaggtgatcactgaccatataaaaacttctactccatagcccataaacaaaaatgtaatgattgcaataacggcttcgtgcaacatatgaaaaaaaaaatggatagcagacaaccgggaacaattagagaaattcatgcatcgtcaggaatggctatttcgtacctggcattgcacatcgatgcctttgttcttgtactcaacatagaggcatctcgagaattgatcaacatacctgaaaagattgaaaacagagttgcatgaatcacttaagcccacatatgaccctatgttgagttgaattcagttatatccagttgtagctggatgtcacacaattgtgctgcggaaaatatctatgcaaagattaaccaatgaccacatcacaaagcatgaattccacattccactagtgaaacatataaaaagcgtgcaagaaagagaaccttgtggatagctaaatatatgtgttgcttgccaaagtaaaacattaaacaacataaacatgctgtcgtatacattatcaaacacagagcaaatgatcaagcaactacgttttgagttcaattttcacaaaactgctggaatacttgaatatggccctgtttagttcccagaaactttttcccaaaaacatcacatcaaatctttggacacatgcatggagtattaaatataaataaattaaaaaactaattgcacacttaggggagaaatcgcgagacga

SEQ ID NO: 18009 - DNA, 1681 bp, Oryza sativa
aaaagtgtgaatatgggaattagtgatatatggttttaattgttaactgtgtgtaacaaattatcagccaagagttcctctgagtaaacaaagtatatgtactttgtcggaacaacttcaaacaaatttagaacaaaaaaaatgttgattacaacatcaccattggagtcctttgagaatcagaaagaccgagcataacccgaatttgctctatccgagcacgcttctcttttcttcgcaagttcttacgttcaccctttattagcgatacagcagtggacatatcgacattcttctcggcatcttcatcagactatgaaaacagttttaggattacagattaataaccacacagtatgattgagaggaaatgaaagatacacaatagctataaatctcagaaggatgccatgagaaccatggacttcatattaacgtatacagtatccgtaatagaagatgaaccatcatgcagtattttggtcaaacaccaagattcaactagaaacaaacaggccagagacaggatgtttggtttgtggcagaattgtgggacacatcaagtcaacattatcttccccattttcttaaaaaacattttttgaaaatctgttctaatttgtagagaaaatgtaaacgtgcctaaatcagatataaagtcctcgcccacgcgaacttagaaagattctatctagtacagccattaatcatgaacttagcaagatataaatcccaaaaatgtgtgaccaaacctaaaataattttgcatacctcttcatcatcttcatcggtctgattagcgtcatcctcgctatcattctcattatcatcatcatcatcatcttcatcatcctcatcttcagaaatttctagccattcagattcagatgcctgcataagaaaggtgagtaaggcaagttcagaaaccaatgtgaatagtaaaaaatgataacagataattttctgttatctctgattgaaataaacaacactatcagttaaacaacaaaatggcaaaaagaaggggccaatctgcaactgaccggtatgatacacttccactcatctagtttgctaaggttaagtgaatacatatcatcaagagtaatttctctatctttcaattccatcattcctccatataaatagagtgtatctttccctacagccaagcatgcattgatccgaccaccgggtttcactgcctgtaagcagcaaatgctaatgagaaacaaaagatcattagaatgtaaatgtcaacatctaaaagaacagctgcaatacctctgggagtacttcttgtgttgtcgaatcagagagaatatcagagctattgcctgagccagctttatttaaggttagactcttggtcaagtgattcgaaaccccatggacttcggattgccctccagtagtttctgagtcctccatgatctcatcctcctcattaccaagattatcttccacattgttcgatggttcttttcttttgatgtcctttgtctacacatggcacccaaaaaaaaaaaaagaagcacaaactgcttttaagcaatgatccaaatattactatataatagtcaatgtgaatatgtcgacagatcgcatatgcttattaagaaaataacagtataatagtatatgagaatatgtacatatcgtatatgcttattaaaaagaa

SEQ ID NO: 18010 - DNA, 846 bp, Oryza sativa
agaacagctcccactacggcaaatggccagagaagaatagcaagacctgcgaacggcacacaagctgtctccagaaaaggtccctctctcccaatcatatcctgaatcagtcgtttccatcctttgaaaagcatcacagggcatttgtagatggcaatcagcgtgaacattataccatccagtatgagtccacatgcagcagataataaagcaccaggaatatcgagcaatctgtaagacaaatgttcctcattttatatatcataattcctcacacaacaaaaatattattcataaaaatgccacctacatgtatagcatcatgtttccctgaaaatggcatagcatttggggatactttcaccttaaaagcttagaggaatgtctgaaatgcttttttggctttgggaatgttatcttaagtcaagtagaaagagtgttacttgcatattaagcttaggtccataagataaggaggaaagaggaggaggaaagatgatccagaaaggttggcgattatgagttgtgatggtaaaatactaaacaagaaccggaagcataccttatctcatatggcttgttatcaggaggtgcctgaagacgaagatcgtccataatagaaaaataggagtggaaaagcaggtctttcacgtccctgactatcgtacagctcccagtgatagtactccacgttccatcctgcaatttgagataattagcacatgaaaaataaaagtttgtaaaaatgaacatggagaaagaaaaattctaccacaaaacaatgaacaaacggcttttcttttccttttccaaccgcaccaaatgttgccattatcggtgctagaa

SEQ ID NO: 18011 - DNA, 1119 bp, Oryza sativa
tgtaaaacaaaatctatacacatccacaccaaacactgtacctaaccaatcatcttcacatcctcaagttttcatctactcctcgtcgtctctaacgaacatgtatctcacatgggtctgtgaatcggtgagagtctgaacaccgcaccgcacgtacgcctcgcatgggatcggtcgaccagatgagcaggcaagatcgtcgccgcgcacatgcgacggggaatctcaatccaaggcgagggttttgcatgtgggttccgaggctgcgtggcaccgggagaggcaggcttaattagcttcagaaaaatggagagattcccaggcgatcaggacaagaggttaagcattctcccttagttatatcctgcacacgttcgtctagcatctgggtgaagttctccggagctaatcagggatcaggagatggtaacttcatgattagatgactcagcatctaatgtcggctagctaacttcataattaggacttgtcatcaatttgatgactcagcatggagtcttaattatctttaggatacagattggttatagttttatccttctctataaactgtttttctttttagatcggagtttggcacattaaccaaattaatccaaaaattttgctcatacattcaaatcagtaaatgtttcacatgtagtgaactaaattttttttttattagaaccaataattttgacaagttcggaattatttaatccataatcatgggcaaacatataaaatgtacttctgaaagagtagtaggtagatgaaatgttgtattggaaatttaagtttttctgaatgccccttgatttttttttccatttatatttctacttgaataagagcgagaaatattttctgtttatcaaatggtgatacatagtgcaatatggtcaaaacatggtgttgtattttttaatacaaatccctaggaaagaaaaggagtctaatccaccaatcattttacgctttttttatccaattagtttatatttgttctagaaaagaaaagtatggatagagatgattttctattgtgtgaaacactttgattaagcatattttcgtctcttttttggtgtcaatgactaattatggggtgcagga

SEQ ID NO: 18012 - DNA, 3055 bp, Oryza sativa
caataagggattcaaatagttatggcttgagaccagggcaagatcatatcaatctcttgaaaaaaaaaggagaaacagcacaacgaatcaactatacgtcacatccacctaacaatacaagattcccccaattgtgtggcaggggatcagatccgaatagacaatcacatgatcaatagctgcacaacgaattaacaagtatacgccaaatccacctaacaacaagatacaccaatcatagcaggggatcagatccgcataggtaatcacttgatcaatagcagcacaacgaattaacaagtgaacgtcaaaacaacctaacaagaagaatcaccaggggatcagatccgaatagacgaagaaatggcaaaaatataacatacgaagggcgtgccgctggcgcaacaggtgagggcgcctctggagaaggagccgcaggtgagggcgccttggaagaaggagccgccgttgcggtcgccttgggagcgggaccagccggtgcagtcgccttgggagcgggacccgccgctgcgggcgccttgcgagcgggaccagccggtgcggtcgccttgggagcgggacccgccgcagcgggcgccttgggagcgggagccgccggcgactgagacatcacgccgatcggggaggtggccgtggcctaggcggtggcggtggcggcgcaagtgctcggcgaaatcgtgattttggcggagaagaagagatcggagaggctgtatcgctcatttataccagcgtgtcgaggataatgtgctgcggctaaatgttcgtgtttcgcaaggaaatccggcaccagcacgttgaggctaatggtctgtgtccaattgttcgtgttttggaacatccagtaatttttatggttctgatcgggctagtgggccagaaatgtgagaggtagaaataatcgaatttcatcaaaaaaaaggccatccgaatcacagaagtgagaaaaccaggagtactttttagctaaaacacagaggggaaatgcgccgtgagggatgtgtcgaaacaatactgctgctactaaatggtacggaagaatcgtaagagtaaaaagaattgaagaaaacgttcgaaaaaactaataggctggaagacattaaaacacaaatggaattaaccaaaggataaaacatcgacaaagaaaaacaaacataaacaaaaaaaaggtaagacaatgatgaaaatattttaccggttgttagatcccagatctgaagaaacgacccgtcacgaacccacggatccgacgggaccggacggatccaacggctggcggaccggatcaaatcaaacagcttgacaagaataccggggcgccgccagtggctggattggtagactcgggccttcgccgcacaagccaacccagccaggagaacgattgctgctacggccggcggcgtgggacacggccaccgttgatgcaggccacagatagcatgtcgccaagacacaccatgggaggtggccgccgtcgtaaatcaaccggtcacacatgcgcctgcctcagtcgtcgcagtcagaggccaggctcaagctggcaccatggaacggctgtagagaccaacaccgtccctcgactgtacaggccggccaaagagactcctccggcgaggccaggtacgaggccatatgtcagagacctcgccaagggctaaagccggcaacttgccggccggctgcagagaccaaggccagacgtccctccactatagaggacgggcacagagacatccctgccgagaccaaggccgtcctctgcagtcacagatacatcaccgccggcgaggcagggtgaggaggccataggtcggcagcaggcgccgaaaccaggccgccggcgaccggcgagagaagttcctgtatgagattgggtgggagacaaatgaatgagatggaaagaggcggccaggggtggagaggaaaccccccctcttgttatatagcggtgagatcccacgcgggcggagaaacctaggttcacacgaaaagcctgccactacctttacgcgtcaacaggaccctacctgtcatcctgcgtcagagtaaaaaacgggtggccattcaaacctttccaattttgcgccgtcgaaagaggtgcgatgctaaccgcaccgcccggtgacgggacgcctccgcaaccaccagtcgacacgcaattaactaccccaccacataacgcctcccccacacagggtcaccgtgcagtggggccacgagcgctaaagataaacgtggtggggcccgcttgggagggtggtggggaaagcgaaaacgagagatctgggaactctacaccacccacccgacacgggaatcccacctgcgtttatcttttcagttttttattagtagatttttatttatgtagtagtacttctctctgacgctctggtcctagctgtcaattgagagcaagtttaattcggaccactagcttcaaattatctatagtcaatttaataactaatttatacaatagttacatattacactattgataattagtctcaccagtcctacacacattacgtcttgaagtccatgctacagctgactataaatctgtagcctgatatttttctctctcctcttttatctctttaaaatatgtttattgctggtttatagcttgctactcttgctatggtagatgctgtgaaacatagtacttctacagtaataaaaaaaaaggagccccccgagactggctcacacagccagctgcagatggaccaatcagctgtagtagtaaaaaaaatttaactcgccgcggtgaaacggacgggtcggttgggttgtcacttgtcgcgccttttgaacctttgaaatggcctagcgcgacgtctcgtgtgctttgctggaaaagacggcaagggcggcagctttgccgggcacgcccgtcaccttcccctggatttttcacattttggtccttttaaaaaacttatttcgtaaatagatccctagaaaaacttatcccaaaaatggtcatttttggggcgccagagtggctggtgtcgtcggacgg

SEQ ID NO: 18013 - DNA, 6696 bp, Oryza sativa
gttgctgtcacgccgtgccgtcgtgtcgccgcccatcgcatcccgccccgagccgcgcgccaccggtgtcgccgtcgccatcgacgtcccgtcgccgcgcgcgtcccatcgccgctgccgcgccgcgcgccgtctcgtcgcctcgcgccgcgagcccgccgcctcgcgccccgcgccgccgcgccgccgtcgtttcacccctccccctccttcccctctctttcttcccctctcccctataaagaccccggcccaatcccccccttctccaccccactccattccctcctcttctccctcttccccttctccacgcgccgccgtcgtcgcgccgccgcgccgccgttgtcgtgccgccgcgccgccaccttcgaagccgccgcgccgtcgccccggagccgccgcgccgtgcgtcgtcgccttgcgctgccgtcgccgtcgtcgccgccaccgccgccgccggtgagccgtcttccccccctcacctcgcgcccaccgccgtcgccgcccggggaagcaaagagccgagagagagagagatatagaaagaagccgggagggagcagagaaaaagaaaagagaggaaaggaggaaggagccgggaggagagaaagaaaagaaaagagaaaagagagaaaaagaaagagaggagagaaaaagagggaaaatagaaaagaagaaaaggagaaaatagaagggaaatttggggagaaattagaggatttaggaaataaaaatggtcggggttaatcgtagattatttttggaaattcctcgagcgtaatagtatttcggtcgaaattccgagttaattataaaaatatgtttcttgatcagattagattaaaattagtagtaatttagatataattaataactaaacaattagatgaattcttatagattattatagattatttttggtaatctctaaaagtcatcggttcacggtagaaattcggatttaattactagggattttagccgtgtattatatttaatcatttagtcatagactaaattaaatcatataatatttctaggatttcgtccgatatttagctcgcgatagaaatctctaacctattatatggatataatgctcgggtagattaaattaaaaacttatgacaacaaaatatttatacccgcaaaatagtttaagtcgaaattgggtttgccgtagttcgcagatagtaaagtttataaaaaggaatcgactttcacattcgactttcatttggatttatttggatttttatttgaattctaaccgaattcaaatcaatttttgcacgtaactatagagcccgagggagttgcggatccaagcgaaggcaagacccgcaagactctgagcaaggcaagtcatcactattccttgaacatgttgatcccaattgcgaaattgttttgtttacaaataaaattgcatgcaatgatgaacatcctacttgtgattatgccatgccttgattattgtttacccttaaatctttgtaaccatgtttacgtatgagtccctagtcaactatgacaattgcttagaaatgctattctagaatcatgcatactcatatttatcaaatgctatatgcttgggcaattacctttgggaaggtaattgagatgcggcatgtggagacatgagcgccacattgccatgatgttgatgacatgatttgtgaaaggagaaataaaattaaataactgttttcgactggggcggacggaggatttgggtggtatctggaaaaggctagtaccgtccccggtcaattaaggaccgagccatgaagttaagcatgaaacaacccccgtacaaccgcacttctcgtatgggtatagacctagcggattagatagccgagcggaggcagtatccctgcatagatggttcacccctgagtgaggcaggtgcgctacgatgggacagccgttgaggtagggccgagaagcgtgccctacatcggtgtcgccattggtaggactgccatgagtgtgtgagagagagaacttaacttgaaccataatttaatatgcgtgtgagacttctctttcccgggagcgccagaactcctctcactgctagaaacatggacgcctagagtgcatgaggatttaagttcatggagcgggtactgccaatgcgaggttatcgaaaagctttgccgtgacgcgtctcatgtgttgggacgaggctcatgtgttgggcagtcgcggagtgcgggtaaagtgtacatccactgcagtgtgagtaaaccaaatctattcgaatagccgtgctcgcggttattgagcaccgggacatgtattacacttggctagactctaaattctttaacttgtgtgggatgggatattgcatgatgatttttatgctgatggagccacttcctgagaggcgggaacgtggacgtcctcagaaaaccataacgactcaatggcgggaagctatccttgggatcacaatggatggtggacagaaccgtcattgtttaatatgaacactggtattaaaacttgatcagtctatgctaggtcttaggcttgtgaaaagaattacaaaacttgctttgcgcaaaagaaccatagccatcctttgaattcctctgtcatgtgcatcattgctgtggtggcttgctgagtacggttggtactcacccttgcaaatataaaattaatcagaagcgggagatgaagcctcggaggatccctatgcctactaccaggagggagatgaagacgatggcgctcagtaggtcttagtacggtcgttgcctgtggcaatggcatgccgctgcctgaattccgctgccttatctatttctgcttttggatgtattccggaccgctcggtccgatgatttaagactacgcctgcggggttatgatgtaataattcgtattagacactcgtgtatgtgcacttggtatttcagctatgaattcgtgtgtaccagactacttgatctagggaaattgtactgtttacacaattgattcctgttataaaaacgggggtccacaggggacgacggggatgggcgacaaacttgttaccgtagcctgccgcctccaatgtcctcggtgccgcccgtctcaccctcttcaccgcgcgcgcctcgccttccccgtggaggactcgtcgaccaccgcctgcctgagctgagaagagatagagagagagggggggggggaaaagggaggcctcactgccgtctccagggaagggagcatcagcggcgccgactagtgacgtcgacaatgaaccactcgtctcctcttgtgcttgttgctccgagtcctcgtctttgcatggatacaggaaagaggagtcgggagagagagagaaagagggaggcgacgcgtgccgacggcgctcacccgtgaccccgagatacctcagcctttccgctaaccacgccgccctcacctccgtggtcactggcctctacagccaccccgccgcatcacccctctcccccacccccgccatggctaccttctcgtgtaagtctggcgtcatccgccgctcccccgaccacaggaggacaaggcatatggtgagctcgacatgccagccatagcccgcgcgcgtgccgctcgttcttagcggcgagcgagcaacgggcgagagagatagaggtgagaggggatagagaggagagcgactatgacaggtaggcccaacattttttaaaataaaaaaatactaactggattgccacgtagggccaaaaccactccgatgttgagttagggggtgttttttcctgtattgaaagtttagggtgagcgatatctgcttttcaagttaaaggggtaattcggttcactgcgatagttcaaccagtaattcatactttttccaaaagaaaaaaaaaacaaacaactttcaggcgtttcccttccttcctgacgagtttttggtgttcgtcttccctcccgcgcccgcgccttctcgctcgcgcgcccgcggggacgcggcggctagggcgatgcagctggtggacgacgccgacggggccctcgactcgtgggcccgcttctgcgacctctccgacgagctcttcggcggcgccggcgacctctcggcgggcccgcgcctggcccccgtcgtcgcggacctctgcgcccgcggcctcgccgagctgcttcgggaccaattcatccgctccctagaggtgacgcaacccccacgcttctctacccacactcacctgctgcgtgttgctcccgccgcgcggagtattggggggctttctgcattgcacggttttggggactcggatcgcgctgcgcgctgagtgtttgtgagaatgcctgccccgaatttgagacggtgtagcagtagcagagggggtatggacttgggctcaaagaccctttcgtgtgtgcttggccatagacagtcaaggttgaactaggccacactatggaaacatggggtagacgggtagtaggactagtttgctttcgctgaaacaattgtcaggacatcacttctttcatcccttcaggtttgtggtgaacccttttatttatctgtgacgtagttaaaaaggagggaagagatggccacaatgcacagggtggctgtttcctgtttgtcagacaggcagagccccctgcaatttaggggagagtatctatgtgctagagtgtctacaatacttgttttagttttatttgagcattgaaaattgacagaatgcctcaggttttcaggttggtttgaaattgtaatggcttaggatttgcacttaacttttttcactccttacattttagttgaattagctcttatgcaaacatataagaggatcctagtctaaaagatgccatattatctgttgcaagtctgctggctgtttaaaattctatacccttgctcgtatttatggaatgctatgcaaagctttttattcttactctttctctattcaacctgtccttattaatgcagggaatatttagaagcaacgcggttaagaagttctggcagcagtttcatccttattgcaattcctctgcagtggaaagaattaaattctgtgtgagttacagaatagttaattatttgttcatccatacgtttgtttcagggtagaaaatttatgttgcagaaatgacatcttgcctgcttcatattctgattgtctttcttgcatacccaggatgtgatatctttcatatgttgtatcaagaaatgaaatggcattctttgtattgaaagatgaaaccataaaaccatcccagccatgcaaatattttaaagatactttcaccagtttgtcaatactgctgtatcataatttgaaactagtgaataaagtgtatattagtaatcatcttacctaatttcggtcttttaacattttacaacagcataatttctctaaccatgaatttcaggttcaagaaaactggcctgaggatatcttaagtaaagcattggaagacatatgtttggaaaagaattaccaggaaaagtgtgttctggctctagttcattctttacaatcttatgaggataggtcaccacacagaaaatctaaagcactggattgtagttccagcttaatgcctaggtaccagttaatggtatcttcagtacttctgacaacactaccattgagttttcctggttagtatctgtttcaccactgttttactgtatgaaaaggcttgagtttgacactgggccaattctgaaatgtttaccatgacttccatttctgaaccttgcggagtggtttgtgtttctctagattattctttagaatcatgaaggatacggtgcatggcaacacaaacaatgttatattttcagtttgttttctaggcatcagttttctaggcctcacaatgatctttagaccagttatgactaaactggagtgttgtgttatctcctatgcgttaattcttccaagactcatgtggccttttcataaagagggaaagatttattactagtattaaatcttatagagccgcagattgatgcaaattacccaactgcctttacttttttggcacttttggatgggatatttatggtttccaaactttgttctctgtatctttgctcctttggtcctgccatctgggggccatatgaataatcactcattgttaggacaataagttagaatatggatgaaactgcaaattggatctgtattggcaatttggattgattttattagcctctgcagaaaaggtcataaccattggaaagcattcaacaatccaaaattttttctattcatgtagcatgcatacccatcttccacattatagttgggttgcggccgtccttttttttgttttttgtttaaggttactttacagggtttcttggattgatggaatcatggacagatctcctattctcctccctctgataaaatcagttacaatatcctcttttagctgccagagcacagcatgcttgttgcacacccactgacacagttagttcaggaatattgcacatgaaacattctacagttactaattaatccaaatagaagctattgtttttaacaaatacattttcctgaaattataatattggtgacttgtttttttttctacttgatctgtagagatattaaatgtatacttcaagaagaaactggaagagttaaatatcatgatggctggattggatgggagcgatccatt

SEQ ID NO: 18014 - DNA, 2143 bp, Oryza sativa
ccctcaaccaccacttcagccccccaaaaaagctgaaattaaaccaaacatttagtactacaccttcgattaattaacaatgctaattagtactaacaatcaacgcacgtacagaacacatcaagaacaactaatcatcaggctatgaccccatgattatcatcatcttttttctcctgtgtatgagcagacgcgagacatgagccggaaaacttgcgatcagccgcggcgatttagaatagccaaagtaggttcatggcctaacccgcccgaccgccctaattatcgtgcttggaaaaggagattaccttagctagctaggctaggctagccggacatgcgttttgccaactcccatgtgattgcgttttgcatgcgagattctttgttcctgtccatgctttgcccgtgtggtctatgcaactcccaggccttttcacccactttacccagcaatgccccaaccaaaaatgccaaactcctttccaagttgtatggacagtggtaaaattgacacgaattttgataaatgtccttcaatcagactgagataatgtttggcgctctacccttttaatctactgaaaagtgatggagctatatatgtatatcatttttctttcactcgtttacttactactgctagtgtcatgcccatatattgcaacgggacatgataaagggtgtgctcgacacgttttcccaactctcctctctcgtttttcgcatgcacgtttttcaaactgctaaacggtgtgttttttttaaaaaagtttatatatgaaagttgcttaaaaaacatattgattcaatttttttaaaaaaaattagctaatacttaattaatcatatgctaatggaccgctccatttttcgtgatcactgttactgttaggaaccgctccaccgaacacaaccaaagatagcctcactagggtgctctctaactagtagtagaaatcaatctgaaccgttagatctcattttattgaaggatacagatctatttataccatcccccagttaacggtagtagaaacgtggtgggacattattattagaaaaaaaaaggtatggagggtataatcgttatttagaagtgattaaactttttttcttttttttgctttttttgatgaaatatgagtgatgcaagcgcaatggatgatcgcagatcgatttagctaggggaaaaaaataaataacaaagtaactcatcattattatattagtaaattattaatttatctctaataatattgatagtataatattatgagtagagagcaccaaagcatcgtttaaagaaagatggtcaaatggttttacggggtttagttttttcatctttttttgatcaatttcgtgtgggaacgtctcgtttttttgtgagttttcctacaggcaggtttccttttcttttgagtgagagaagtgcaatggttgggaagaaaaataatggctccatttttaaggtaatagagaaatactagtacagctgataagtctgaaacatgaaatggcgtcgggccctcatgtcagccccgtggttccatactttcatggaagctgtcgagcgagctgtatggctctgtgtagcagcacaacctgttccatctttggactttgcgaggatcggctgtcccagtgtccccctcattggcgcctttgacaaacagccgcacgcttctaaagctttgtcctttcccacgcccatggctctcccttcgccttcgcttcctgtatatacaccccccacccaccgagctctccttccacggccacaccgatcaccagctgcgcccgccaattgttgcaagaaccgagccctttcagctgagcgaattgagtctctctgaccgggctgtgtgacaatgatcaagctgaggtactccaagaggctgttcaggaggagctcctccaagggcagcactgacagcagtagcagtagcagcagcagcagcgacggcgatgtcggtggccggagcggcggcggcggcagcggggagatagagtgggaggtgaggccgggagggatgctggtgcagaagagggacgggagaggcggcgtggaggtgatcaccgtcagggtggccaccgggttctcctggcacgatgtctccattggggctacctgcacttt

SEQ ID NO: 18015 - DNA, 1305 bp, Oryza sativa
attcctgcagcccggtggactactcgagaaaaggttgttaacggataattctcgcgaacgtcgtcggcttgatcacccgacatgattgcgagcggacatccggatatgctataagttgggtatgtgagcaggggcggatctacagtagtatgagcggtgtcaggcgacaccgacgactttcggcaaaacctatagcgaaattgtttatctatatattataacactatgaattaagtataattaacatactatgacaccgatagacatgttatgacaccaacgaatcgattttctgggtcctccactgtatgtgagtcatgctggccacatgatatgcacatgtaatgaaccaactttagcgcccctataggtgattaagaaactcctactcctggttcttgaaccagtaagacgtagtgatctctctcacctcactttaagtggtcgagttacgactactgcctgttcctcgaccagcgatgtagcgtttctcccactacttccacttcaagtggtcgagttacgactactgcctggtcctcgatcagcgatgtagcgtttctcccactacttccacttcaagtggtcgagttacgactactgcctggtcctcgaccagcggtgtagcgattctcccactatttccacttcaagtggtcgagttacgactactacctggtcctcgaccagaggtgtagcgattctcccattacccctgcttcaacaaagttgatatcaggtacacaagatcgccaagtgttttacccagagatcccttaccacgacaacacttagcgttgaaacctatcctactgtccctttacgccgtcttgacaaggcctccgaggaacctaagggaacttcggctggggacgcccagagccgataaggccttgtcggatctttcagagacgaaagaccatgtaagatctggtcgtgtaagagttctcgctatgcgtattaaccaagctgtgtaatcggaaatggattttccaacttcacggctgggggttaggatcaatgcttgttcaaccgaggcaggtcaaaggtccaagagccttatcttccgagaacgattctctgatgacaaggctgggggctagggagagtgtataactcaacaaactgactgatcgaagtcggtaaaagagtagacgctcatacacaaaacattggtctgtaagtctaattcattttcggttttccatacatattataacatgttaccctttgagtgttcgctcgggggctatttctatctaatattcttttctgagtattgatttcaggaagggctgcaggaat

SEQ ID NO: 18016 - DNA, 4701 bp, Oryza sativa
ccggatctcctcttcgatcctgccgcgcatctccgcgagcagcgcagcgtctgtctccagcacgccgccggcccccagcgactcgtacagagacgccatatctgacgccaagcacatcgatcagatcaaatcaaatcaaatcaactcaagcgccaaattcccacacacacacacacacacacacacacacacacacacacacacacacacacacacacacacacacagagtcagaagcacgcggcaagcggaagctgccacggccattgattcgagtggagggggggggttgaggttttctaccatcggatttgactgcggcgaggacatcggcgcggaggtcgaccttggcgaggtcgtccacgtccgggtgcgagagcaggaacagcttgtgcgccagcaccaggtgcggctgctgcttcccttcctcgcctacgccgccgtccatctcgccgccgcttccgccgccgccgccgccggagaagagtcgcctcgcttctcgctttgcttccgccgcaagaagagattgggagagaacacgagagagaaggagagaaggctagtttcgtcctccaaagtttttaattcgggagagtatttccaggctactacgacgttgcagagcgacgtggtcttatctgagacgtccgtaccacgatccgacggctgtgcggggggccgagatctagtacggcacgtgtacaagggcaaagcgcaacaccgacccgagtccaaactccaaaccccattccgtttccgagttccgacccgcgccgccacgccacgctacatcccgagctctcaccgagagacccaaaaccctttccaccgatggccaccgccgtagccgccgccggcggtggcggcggcggcgagcagccgcgcaggaggaagccggcgccggggagagggggagtggtgctccccgcggggctgtcggaggaggaggcgcgggtgcgggccatcgcggagatcgtgtcggcgatgggggagctctcgcggcgaggggaggacgtggacctgaacgcgctcaagtcggccgcgtgccggaggtacgggctggcgcgggcgccgaagctggtggagatgatcgcggcggtgccggaggccgaccgcgccgcgctgctcccaaggctgcgcgccaagcccgtgcgcacggcgtcgggcattgccgtggtcgccgtgatgtcgaagccgcaccggtgcccccacatcgccaccacggggaacatctgcgtgtactgccccggaggccccgactccgacttcgagtacagcacccagtcctacaccggctcgagcccaccagcatgcgcgccattcgagcaaggtgatttacctcactggctactgatgtcacttggaaatactataccacctgtgagatgagctgcacggcgatgctttctctagtgttgttttgaagtatgctgaactgcaagtgaaggcagagttctgttatttattgaaaattagtcgattgtcagcaagccacggggtagttattttgtcgaaattgaagacttgcattagaggagtacaaatgatgcacaactcattaattactgtgatcaaagttcactagctaatgaaacaagaaagtacaccaatgcccactagtgatcttttggtctggcagttctatagcaacagattgtgttgggcgatatagccatgaagttgtcgccattattttgactgcttcatccctttgggtttcagaactttctgatctgtctacttgtaggtacaatccatatgtgcaggccagaagcaggatagatcagctcaaaaggctaggccatagtgtagacaaggtttgcccttacccttgagagtgttgtgtcttggtttgagtaattcgattcactttctagttacatttgattaatgctatcataagtttaaaataatttgaatacattatgcaggtcgaattcatattgatgggtggaactttcatgtcattaccagctgattatcgggattatttcattagaaatcttcatgatgccttatcgggacacacttctgctaatgttgaagaggctgtttgttattcagaacatggtgcagtcaaatgtattggcatgacaattgagacgtaagatcatttgacaatctaaactacccatatgcttaggttccttgatggttctgtatgatttccccatgaaacatctttattaacttcagttctataaactattgttgtctttcctcaaaattacaggagacctgattattgcttggggcctcatttgcgccagatgctatcttatggttgtacccgcttagaaattggtgttcagagcacatacgaggatgttgcacgtgacacaaacagaggtcacactgtagctgctgttgctgattgcttttgtttggctaaagatgctggttttaaggtagtctccttaaatcattaatcatctcgtttagtcaacttgttgctggcagcatttgttaaaataaagtatcatctcatatggttgaactgttttaatcctccattgattaccttttgataggtggtcgcccacatgatgccagatttacctaatgttggagtgaaagagatctggaaagtttccgagaattttttgaaaatccagcattccgagctgatggtctaaagatttatccaactcttgtgattcgtggaactggcctttatgagctctggaaaactggcaggtacttattttatctagcacttgatattctagattgctagtcttgtgttcactgttgtgtttgttctctagaactttttagtgagaacttaggccctgccaatgtttgttgtgtttcagataccgaaactatccacctgaacttctggtggatattgttgcaagaattctatccatggtaccaccttggacacgagtttaccgtgtacaaagagatatccctatgcctcttgttacttctggtgttgaaaaaggtaatcttcgtgagcttgctttggctcgaatggaagatttaggcttgaagtgccgagatgttagaactcgtgaggcgggaattcaggtctggaacactgcatctcctctcactctcacatgcttgtaatttaacttagctctttgtccttattattttcgttgtttgtctttatgtaggatatccatcacaaaattagacctgacgaagtagagcttgttaggcgtgactatgctgcaaatgagggctgggagacctttctctcatacgaggatacacagcaggtacatatattttgccagcatttcatgtgattttggggaacttgaaaatatgcagaatgtctgagcaggcctgtttgaaattatatgaccaacacctatcttcttggtccgggaatttttactgttatgtgtttcagactttcagcagtccattgaagtatttatttgttatttttaaaattattagatcgatactattctgcagagttcaacgcttggccttatgttctctcaatcttttggagcactcacattttgccatcttacaaattatacaggatatccttattggtctgctgcgattgcgaaaatgtggccgcaatgttacatgccctgagctagtagggaggtgttcaattgtccgtgaacttcattatatggaactgcagtccctgtacatggtcgtgatgcagacaaactacaacaccaggtgaccatagtacatgtgatattattagcataccatgtttgggaaatggatcggtgccatgacagtattagtagcagttagcaccaacgactttgctatgcttgcaaattagatatcctggcacgcttgataaattgtagtcactgttttaaatcaagcttagtgtctaaacttctcaatagtatggcattctggtatggtatattgtcacatattatccaatttcttatcattagaggaaatgtagtgttgctctataaatggtgattatttctcctgttttgacttgcaattggtacatgcctatagatatacttcctaacttgattgtccagaaatataaattacatttctgatttttttttgactcaacatcgacagggttatggtactcttttgatggaagaagcagaaagaattgctcgcaaggagcatcgttcaaagaaaatcgctgttatatcaggagttgggactcgccactactaccgtaaactgggttatgaacttgaggggccttacatggtcaaatgtctggtctaataacttctatttatggatgcttgtactccagcagcattgtcactgtagtatgggttttgtacaccagtgtaactttttttttatatgaatgagtaaacacacctcctttcaaaaaatgagtaaacataacatttgattacatacatctcactacatgttttgaagctgcatttataatagagaaatagaatagccatctcatccaaactcctcgccggacatgccaaattcatgttcagttttcactgcaacatcacattagatcattgaacatcataattttttttcagagatgactgtttttaacatgtcaacttgtcaagtgtaagcacggccacacttgaataatgcacgcacgtgttgacgaacccacggccacgagtgataagtaagctgacaccgaagggtgccagtagccaaaaggcattccggccattgcccctgccatttaatgccaagaagtctggttgaatttctttctgtcatttacagaccgaa

SEQ ID NO: 18017 - DNA, 1209 bp, Oryza sativa
cttgaggaagataggattgtactctggggcagaaagctcttgaaggcttataatgagttctgggacatcatctgagagaaaatactcttggattatgtgtccagattcttctttgaaatgcttgatcttttcaccacttgcatttcgcatatcttcattaggggcagaagatgtagtgaatgaagcatcaagccatccttcagatgtagcagtcagaaccagcttgtcaaagagaatcttggcagaaggaatatcaaggctcagatcatcaatactctctgctagccgacaaaaacccttagacatttgattagaactgatcaggcaacctgcagttgattccttcaacagcttcaggattaatggctgtgatgacagattctccatgctcaaggtgagagcgcgtttaacaacctcatgatggaaaaatggaaggcccagctcccttatacacctaaaagcttcatcaatatctccactctcaatatactccttcagaatatcctggattctccttttcgcctcttccacagtaaagtgagtgctcccaccccacttgcgctcaactagctcagcatgatggggggctgacaagtagcttttctcagaaacttgcagaacttcaatacctttagaaaattcaggaagcagtgctctggctcgagtgaggaaaacaggaggcagtatttcatccacaacagcacgagcaacaaaaacagacaagacatcaatagcatccggtatgtcgacagatagatcttctgttgactcaagaagcatcataaaaccttcactcatcttggaagagcctagtagatccgcatacaacgcagacaacagaattgacgccatttctttttctttgtcatgacgatccattgccatggatatgagcttcttgataaagtaactgtggaactgatcagatccaagactccttaactcagaagctgccagttccacatctcctgtactaaagtactcctcaattacaggaactaaaagccttttatagtcatctaatgtagcaggaacctacaataccagtgagttattgataaattagtgtcaaaccaacaaaataaattagtgccaaaccaacaaagaaaaaaaaaagcaaaattataggagcagcgagatcaaaccttattgttcccattaactagtttgttcgacatcttagatggtacagaatctacatcctcaagg

SEQ ID NO: 18018 - DNA, 2383 bp, Oryza sativa
acctttctgctatctttcctccaatttttatgcattatattcttgcgcatggaagctataaacgtccctgcaaaaatagatatgatttactctattttttgtcgtcatgtgcctctatggtcaggtcaggagtaccgagatttttccttgattttattacagcatagctatgcactctcctagaatgctcaggggatgtgtgggcttgggggggggggggggttcttcatgtgaatggcccttcacatacttcagaaaaatggctacgatcttgtgttgaaaaacttgactgaaatcttattagtattttgcaagtttgtagtcatttgccaattttatgttcatcaattcaacaagatgagtggtatgatactaccatctgaaattaaaagctgaatttgctgctactttcagatgcaagagcaacattcgaggtgtttcattcaaggaacagaagcaacagaggtgacaccgttgatggagtcatgcatgccataagttgttattatgcgggtcatagattatggcggtacttcaaataagttgttatttgcataatcagggtgaacaatctagtggcaatcttgattaacacatttggttatctggcatgagtgtataatgacagactgctccaaagaatacgagtacttgtttggctgccattttaagtgtacatatccgcctataattttggtgtttgccatacaatctgattatattctaattgcatactttctataattcgctccctaaagacagtctattattaatctttagatcgattgtatatgctttgtaatttagattgtccaattcatagtgttatagttgattgacaacatttgaaggtttttggagtaactattattgtattcacaaatatatttacagaacaataatgctcaagtttattgtgtttcacgttatttaagacttgttgcaacgcacgagcaccagactagttaagaaagaacataagaaacttgaatagtacaaggagtggcacaacgggcattcacaatatgctaaaaaaaagataacaagaggattactaccgggtagtaactatctggttcagcgttgtggttgtggacgtaggtagtaaaatgggtagtagcaagatctttccggttcaacgttgtggatgtaggtagtaaaatgggtagtagtaagatctttccgccgtgggtttgtaatacccattaagctaacaagaaaacaacacacttatctgaatgaaactgtattaatcaattacatggccttacatggccaaaacaaaatttaatcggcaaagatctccccttttcactgtcatatctcccctcacaaatctgtttcactgtcataaccttttcctcaattggtgtatggatatctcgtcgagggacaaaattgacagcctttgcaagaaacactttcaaagaataatactattaatcaattacatggccaccgaaacgaaatttaatcggcaaagatctcccctcacaaatctgtttcaccgtcataaccttttcctcaccggtgtatggatatctcgtcgaggggcgaaattgacagcctttgcaagaaacactttcaaagagtaatactgtttctaaattaattgctatttcagttacccgtcttatgtacgtcataaacttctcgtcaacttgaaagcccacaattctgagaacattcaaattttgatgcttaaaatcacgagatgattcccacttcaataatttatcaccttccttttggtatagttcctcatcctcactcgttttgcattcatggtcccacatctgcgtataggagaaaccaagttaacaaaaaaaatagacaatattttaagaaatcaaataaactatatttgctgccaatgtatgtcaacaagagtattgaagaacacaattgaggttgcagtttagtttcaaaaaaaaattgaggttgcagttgttatgaatcaatatcttttgaatggtgacatatttatgtcattctgatataaggaaaacacgttatagtttatgccattatattatttacatagctaccgatgtattcctaagaacacatacctttatgtgcatggtttccaatagaggcgcagcttctaaaagaaaaaatatccaagtaaggttgcactcttcatgaatgcaagtaagactagcaatctgcagattccgcaacacaggagccaatagtttcggatgttccggttgaatccaaatctgcaacatacagctaatgatcaaaccatgatattctaacctaaaacaatttcctttttaacaaaaaaaaaagtttcaaactcacccttccacattcaaaatccagatgcagtgcgcctatagccgcattaccaagaaactcacttagcttgatattc

SEQ ID NO: 18019 - DNA, 3127 bp, Oryza sativa
ttgcatgtgctaagcacatcagtgaagtctgagttacgtagcctcacacaggttaagattagttgcttgaggcaaccaaatgcacgggggcaagcataagagaatgacatgaaacgttttccacatatgatcttgtcatcttccatccgttgtattccatgtttttctggcaaaatcataaacttcgtactgacgatttctctatttgccatggcatcattgatggagtgggcgatgctgatagattcctccctcaaatagaatcccacgctcaaaaaattaattttgcactgacttttatgtgctagaatactttgggttgcttcgatgacagagatgttgcttcttattctcaaatcgtctttggctagcatggaaccatccttaggcttaaatgatccaacatggagaatgatcttagacaggacgccagggagatgcctccaccgtcttgagaggacactagtcctcacagcatcacgtgttttgagtctatccaatatatgaatcaaaatgtcgtcgggaagtgcactgagcctgtcttcttgattagctttgtcaccctgcattagtattatacataataagtatttctgcacttttgtaggcactcataagtgacattaatatctcataaggaataaacattccttcttttctcgaggaatatgtaaaccaaaccttaatactcataaataataaaaaaaggtaaaaaaaacacacacataaataggaacacatggaagacgaggaaatgctgctcttagtgtagttacctctgccacgctggtgccgtttgatgccatgaggaggaaaaacaagaattcagtacaacggatggtgtggaaattgtaccactagtgctgccgcgcctcgtatctgttcgtccggcggcagcgggcgctcatggtatttatcggcgcagccggcgtgcgcgtactgctcggttttggccgaggagtccgattcggtttttacacggtgtactacgtaggtacgggaaatggaattcgatccggactggacgcgtggcggatgcgttgcatagtcggccacgggcacgcacgggaaggcgggaagcggcccagctctccgatgccaacccagccggccagcccacgcccgacgacatcctgcgcactcgtctgttccgttccggattcccatctttccaacccatctctatcatttttcgcgtgcgcatttttcaaactactaaacgagtttttttaaaaaaatttctatataaaaattaatttaaaaataatattaattatttttttaaaaaaaatagctaagacttaattaatcacgtgggatagtttttcatcctgcactgccgaacaaaagataacctatggccctcgcgcgcgtaaattttcagttgattatctgggccgcacctgagagcagtagtgtcgtgcaggctttacgcttcagcccatgtagcggcctacgcgtaacgcgtgcatgcatcgctgttcgattcgttgaagttgactcaacatacaccttcgattggctggtcgagctctcgctcttcttccaggattttaattgggaaacatgtactgcaaactctatgcatatctttttttttaattacacactacaacacagacactcacaacacacgcgcacttacccctatgagcatcttcgaagaccgggccggtaaatcctggagagattgacgaagtcaccacaggtatctcgcctgacgaagtcaccactaggggtgaaaatagagcggatattatccgctccgaatccgtccgatgtgaggatatggtaaaagtttttagatattcggccggatgtggatgcggatgcggattttatcatgtaaatgtggtatcaacgatatccgacggatacggattatccgatattttgatcggattatccgatgcactatttggcggataatccgcaactttcagtctttcaacccatatattgtaacccatttagcccatctattgtgacctaatccactcctcccgaaatctctctctctctctgccgaatgccgtgcgccatctatctctctctcgagtcgcctcttcgcctcttttcccacacgcgccaccgcaacgccactgcaggctggtggcaccgccgccgatcctccattcctcctagcgcgccggccgctcctcctcagctccagccggcgccgccgctggtcgtcgtcggctcctcggcgtcgccgccagtgccagtacagtcgcccgcgccatccgcgccatcccaattgtcggcccgtcggcccgtcgccggcgccaggccgccagcgcccaggcggcaccgtcgcctgcgcaatccccatcgccagctgttgttcccctgttccagtccgacgaggtgatggccaacgacgaggctgtgtgcctgtgtgcacacgtgcagtcctcactgctgtctgtcgtatgctgtatgcctgttgtgtgctgtactactactgcagtactgctgtatgctgcgtgctctactgctctatgtgctctatgttgtatgcctgtatgccttgcctcacgctgatgagtgatgacttttatttttccattttaagcaactcagtgacaagtgagctattgaactgaacacttatattattttttttatggatcatggatgtaccttgaattatattgagaccgggctaattgtattgctgcccccttgttgtatggattgaatacaaacttgacatccgacaattttttgtccgttaccgaaccgactccgcaccgaatccgacgtccgaaataatccgctccgcattcgcatccgcacgtcatccgcacccgctccgcatccgcttaaaaaaaatggtttaggatagatatggtatagctattatccgtttgaatccgctccgttttcacccctagtcaccacaggtacctcgcctaccgggccggcaaatactggagagattgacgaagtcaccacaggcacctcgcctaccactgaaagcacagcgccgttaaattctgaaaaattcgctcccatggcctaccactgaaagcacagcgccgttaaatcctgaaaaatttgctcccccatggagagtcgaacccaggacctcaggtgctactgaggctcttaaattactaggcta

SEQ ID NO: 18020 - DNA, 2651 bp, Oryza sativa
gttcaggggcaaggagagggaggacagtgaccacctcaaggacatggtgctgctccttgaggaccctgccctcaaggacatgaagcttcgggccaccctcgtggcccgggctaccatctagagcccgtatcaatcttttatccaagtctaggactagcccagcctggtccggcccatcttatcacgctaactgctagattgatcgcaccatcatccttcaatgaaacttgcctcaccggggaacgaaggaattaagtcagtggttgcgacggcggtgttgtgccatattggcgttgcatgcgcctggtcaaggaggcggtgaatacacccagacgcggatctgcattcggtctttgaaggcccgacatgcagcgatggcgccggcggcgctgcgttcagcgtttggcggcggtgctgagttcggccttcggcgtggtgggcggcggcgctgacggtgggaaagtgccgcgagcccgcgacggtcgtgcctcgggcgagaaaagtggaggcagcgcattcatcgttgctagggatgaagcatacggacgtatcgagaacgtatccagatttgtttttgctagtattttagtacaatatccatgtataagtcggtttttaagttcgcttgcttttgaaaatacatattcgtatttgagtcagtttttaagatcgttcacttttagtaatacagaataaatcatataagaaatctatttaaaaaactcgcatgctaacttgagacgattgaactcctaactgtagataaaccatatacccgtgacgggcatagtctattttaatcttattattgttatatggtttagttaagttaaaattcattgtaggagttcgcttggatatatatatatatttttagaaaatcataagctgcagttaggagtctgatcgtcttaagttagcatgcgagtttttttaaacagatttcttatatgattgtcttaagttagtattttggtacgtcattcgtgcatgattcggtttttaagttcgtttgcttatggaattacatatatgtatttgagtcggtttttaagatcgttcacttttggtaatacagatagaatcatataaaaaatctgtttaaaaaaactcgcatgctaacttgagacaaccggactcctaattgcagctcatgattttctaaaaatatatatatgcaaacgaactcccacagtgaatttcaacttaactaaactatataacaataataataagattaaaaaagactttatccgttgcaacacacatacatttttttagttattcaaaaattgtaaaaatcgccaatacgtatgggatacttatccgtatccctttgtgtatctgatacggatacgtcgttttctaatgtatgtaggaggcgtttcggtttataaatcagaacacaccgcgcccttcgcccgttccttgtcgccgaacgtatatacgtgcccgggttctccagcgaatcatcgaatcaagcgacgacacgacacgaacacgatggacctgagcaatctgcccgacaatgtcttgctcgacatcctcgacaagctggacacgcgggaggccgtgagatgcagcgtcctctcgaggcggtggaggcgcgtccccggcatgctccccaacatcaagctggacgtcgactcctccttcgagcacgacgacgacggcttcacctccacgctatccgacgccgcgaggaacaactacgcgatggtgggcgcggtgcagagcctcctgtcgcgcgagagccggcacgacatccgccgcctggacctgagcttctcgagggaagagtccgtcggcatcatccacgccatcgacgacacggttcgtagtcttgtcggagaagtcgttcttggaacgcccgcacaaggacagggtcaagcaagggaggcgccttctgcactgcttcgacgcctacccgcgcgtgttcgtcggcctcacccgactgcacctggagtttgtcacggtgcacgggcctcgcttctccgacttgatcgccgcctgtgagcagctcatcaagctctgcctcgtctactgcgacttcggcaaggaaacgacgctgacgatccgacacgagcagctttagcacgatagatctcgagttctgcgcctgttacaccatcgagctggagtggctcccgaagctggcagagctatcgatagccgtctggccatggacgtcgcatgagtacccgctggtggttggccacgccccacgacttcggctgctagacctatctcacgccggtatggttaattcaaaaattctccggttgagcaagctacttgacaatactacgagccttcaagaactgtggttgaactttgaaaccgaaaaggtaagtcgatcatggcactgttaatatcggtagcgaaccattgaaggaaacatcacttgaatgtgtattcattgttcgtcacttcgtccttggtttccttctatcttatgcaggtatggattcaactggagaccccaaaacatttggctccttttatgaggaatttgacgttggtggatgtccaccgcattcatccaaactgtggcatcaattggacgctgtttcttttggaagcagcacctcttttgaagatacttagtatttcggtactgccttcgttcttcgttctcacttactagacaa

SEQ ID NO: 18021 - DNA, 3288 bp, Oryza sativa
tccactcccaattttgttggagctcaaactgtttggctccaattttggtggagctgaaactgtttggctgagctccagctccaggaggggtggagttggagctgaagctgtgccaaataggcccttagtgaggtgcaaagtgtgtgacggaaatataaacccaagtagatatatactccctccgtctcataatataagggattttgattttttgtttgcactgtttgaccgctcgtcttattcaaaaaattttggaattattatttattttttttggtacttactttagtatccagagtactttaagcacaatttttcgggttttatatttgcacaattttttttaataagacgagtggtcaaacagtacaatcaaaaactcaaaatcccttatattataggacggagggagtatatgacacggcattcacacaacaaaaaaaaataaaataacattacactacaaaactatgaacatcacgcacttcgcaaaatggaggttccctgttttctggtctcgatggaaaatccctgctgaatgcaggtatacttcagagttcagacctcggtgtagctacagcaatcaacccaaaagaaaaacataaattgttatggctcagaaaaaggtactacttcagaaattgtaaaagtgactaggaagaaaatgtaaaataaatctcataatagcaaggggcaagaatttaaaaacagattgactagggagcttttggcctagtaggaagtcttcacttcgcgtttagatgcttgccttaaagagtttgccataagaagttcaaatgccaacttcatgcaaatctccttgcattaatagtagagcattgaattgattacagaatattatttcagtatttgtaagcaaaaacaccacagagaagcagagtaccaaagcttctatcaggcacattgaggctttttttttcgaggggacaggttgggagtttctgcaattcactatagaagaagagagttgattcagtttataagtaaaaacggacaaaaaccttataacagcacggttaattaatggaaaaccggtgagaaccatgacattgacatacttaacctaagaacaacagcccactaagggaaaaaaaactcctaaacgaagtcttcaagaacgttgcgtcgacagaatagcgacatcgtccgatcctaacaaatctaggttttcacctggagaatttccttgcagtggagttgaacgaggggtccaatagcaatgcctcaagaaggtgaacggcgccgagggcgtccccgttgctagcaccggaagtggagcaaggctttcgcctcggagtccccatcaaccatagcatccacagcaaaagccaccagatgtcacctacatatcgaagatcacaacaaccggactccatgccacccctgacctgactaatgacgcgtcggatctgaacctagagccagatctagccgtcctcctcaccaccaccgcctgctgacgccacagcgccaccaccagcgtgggagcaccacaaacgccagcgccagacgtggggcaggccgcttgcagcaccgtccaacgccgcgccgccggcggatccgcggactccaccaccgccgtcgccatccccgccgccatcggccgcatccctgctcggcgttgctcaccccgaccgtcgccatccccgctgccatcgccatccccgtcgccagccgccgccccgcaagattcgatcggagcggtacggatctggtggtcattgccgtcgccgccctgggcgggtcccctgtccgcctgagcgctagaagcaagaagccccgctgccgcaaggagagggggcggccgggtcgtcgcctcgcgagtggcctttgggggagagcaacacgataggtttttcccaggcacattgaagctgaccgcagttttgttcactattcgccattgttttgactaaggccagcttctgtgaagcagtacattgcccaaggaggtggccgcggcaatgagcttgtggcacagggtcgacatgatgggaggaacatttcgagtagacttccagcggtatatggaggaacgggtgagacgtagggtttcagaaccatagtcattgcacaatatgagttatcaacgcgatacgttatgcgagatggctacacaaatcagtctactttataaatatttatactaaaatgcattttttttaacgacatttatccaaattttatttggtttcatcaataaccataataactattacacagcttgcgatttacacaacttgcgactatgagcatatggtactaaacttgcaacaaatacaaactgtttaggactagttaatcgatagtcttcactgttccagcttcagatgtgtgaaaaaactgaatcctttcgataggcgatgttcttccctcgttgattgctttctttaccaaatctctctctttcttggtccgtggatatcgtgtaactggataataggacttgcacacctcacacctatcatcgtgcaataatatgtcttccaaattcactgccctttttatgacttgtttatgtactccatgcatttttttccaggttgaaagccataaaatatgagcatggtcaaactgtagtgcttgaaatcagacggttcccagtatatgttgtttttctcacataaagttctctttagcagttctccctcaattggtttacattgatggtccgtcacctacataaagatcagatttagattttagtgttcaataacacaaaagttcagagaagcatcaacagtgaatatatactccatctcgttataaatatttgatgtttatgacaagccaaaatattggctataaatagatttaagctaaatgtacacaagccattttttctttttaaataaagtatttgagaagttattagtggtaaaaatttcgggagttgaataaaatctcatcctaaactttaaatatttatgactatagggtgtattaaataactgtcgggtaaacgagaatgaagaatgaatgtagtaccttaatactgagcatcttcaaaagaggtgccgcttccaaaagaaacagtgtccaagtgatgccgctgtttggatgaatacggtgcacaccaacaaacgtcaaattatttaaaagaggagccaatcgtgttggggtctcaggtagaatccatatctgcataagataaaagaaaacaagactagcaataaatacaaattctcgtgtgaaggtttgctaccaatattagcggtgcttcgattgacttaccttttctctttcaaagttcaaccacagttcacg

SEQ ID NO: 18022 - DNA, 9022 bp, Oryza sativa
cctccagctcgacggtgtcacaggtgcagaactcgagcttcaccacgcggaggtgctcgtggtggatcgtcagcggtgtctcctcaccgaagtcgcagtagacgagtgagaggtagctgagcttctcgcacgcggtgatcacgttggagaagcatggtccttgcaccgtgatgcactccagatgtaggctggtgaggccggcgaacacgtgcgggtaggcgtcgaagcagtacagaaggcgcttcccttgcttgaccctgtccctgtccgggcactccaggtaacacttctccgacacgacgtcaaaacacattttgaggatcctgcggccacgggccatggcgtcgtcgatggcgtggatgatgccgacggactcgtccctcgagaagaagctcaggtccagacggcggatgtcgtgccggctctcgtgcgacaggaggctctgcaccgcgctcaccatcgcgtagctgttcctcgcgtcgtcggatagcgtggacgtgaagccgtcgtcgtggtcgggcgtgaacgagtcgacgtccagctcgatgttggggagcatgccggggacgcgcctccaccgcctcgagaggacgctgcatctcaaggcctcccgtgtgtccagcttgttcaggatgacgagcagggcctcatccggcaaatcgctcaggctcatcgtgccttgtcctctgaaggcctgaactgcagcaggggtacttatgttctttgggagcaagagggaacggacgacctacggcgcgataatgtgtttctgaacaggaaaacctgcccgtacctcctatttgtctgtgacgctgccgctgcgtagtcgtttgactcgtttccgattccaactccaacatccgactccgacgctggctgcttaggcctgccacggtaaggcccatgtccttcgaaaataaaaataggaaaaattgaaaccatgccattataattttataaaatttgagatataccatcctgacccacatgtcattgactcatgtggatgctacatgtcattgagataccgatgacatatctcaaactttgcaaaattataatggcatggttccaaattaccctcgaaaatatgcccgaatactgtttgtcgtcgactgtcgccagctatggccggttctccatgggcatatccatggctgctgcctcgcgttggcggagcgagacgcaaatctgagcttgtcatgttatgcttgcggattggaagttttgaacctcctctggccatttccgttgacgttgagcacgcacactcgatgttcctctctatcctctccttggtcgtttcggctcccatatttctctccaatcgctatccaccatagccttcggagttagtgtctgcagcgtggggtagggagtacatcagtggcggcagtggaatcggttcctgttcctctctgatcctctccttggtcgtttcggctccgatattcctctccgatcgctatccaccatagccttcggagctagtgtctgcagcatggggtagggagtatatcggtggtagcagtggaaccagatcctcttctaagtcagagacgttcgaccacgtatcgtcgttccttgcacatccgatggcaatgaaaaggaaaccgacgcttctagcctagtgttggatgaatgtcacgactttgaatgtaatgaggtgaaaaccctctaatttttaagcaaccatagaacatataggtttgaatgtaatgacacatctttgatgctaaatcattaagttatttaaaatatattgttggtcaaaagacatggtaactcaaagtcaaaaccgaagtttttttaaatgaaaacaatagtttactatataattaaaagtagtttattatgtaattggtgacgatgtagaattaatcataagctgaacgtcatataaacaactccagaagaaaaacatacatatctactactgtactgttgagtgcagtcctttcttttgcaacatagtacaaaattgtttatgaccaatcaatcaatgattttgatagttctagcttctgatgtgtgaaaaaattgaatacttttgataggggacgttcttccctcattgatagctctctttaccaaatccctctcttttttagtatgtggatatcgtgtaattggataataagattcgcaaatctcacacctatcatcgtgcaatgatatttcatccaaattcactgctgccttcatgacccttcttatgtagctcatgaatctattttcaggtcgaaagccataaatgatgagcttcgtcaaattgttgtgcttgaaattagatggttcccaatttatattgtttttctcgcaaatgaacattctctctagcagctcttcctcaaggggcacacagtgatggtccgttacctacataaagatagcacattttagtgtttaacataaaaaaagaaggaccaaagtgaatatatacactccctccaattataaatacttgatgtcaatcataagattattttttttgaaactttgtctattgattttatgttagcataagtttatggtagtatgataatacttctatgccaaatctacacaccatttttctcccttttaaactaagcatttgagaagatattggtgacaaattatttgaatgttctttttgaaaagttgtattttcaattacgtgataatgaataatgaaaatagtaccataatactaagaatcttcaagagaggtgccgcttccaaaagaaaaagtgtccaaatgatgccactatttggatgaatgcggttgacatccataaacgtcaaaattccttaaaataggagctaaatgtgtcggggtctctggctgaatccatatctgcaaaagataaaaagaaacaagaaccaaggataaatacgaattgttgtgacctcccttcaaagattcgataccagtattagctatgcttgtattgacttactttttcgcattcgaagtccaaccacagttcgcgaaggcttgtacaattgtcaagtagcttgctcaaccggagcactttggaatgaactaaaccggcatgagttagctctagccgctggagccgaggagcatggccaaacaccagcggatactgacgcggcgaccaaaaccagacggacatcgacagctccgataacttcgggagccactcaagctcgacggtgtcacatgtgcagaactcgaggtttatcatgctgagctgctcgtgttggatcgttagcgccgtctcctttccaaagttgcagcggacaagggagaggtcgatgagcttctcgcaggcggtgatcacgtcggagaagcggggtccttgcacggtgacgcactccaggtgcaggctggtgaggccagcaaacacgcgtggatagcggtcgaagcagtgaagaaggcgcctcccttgcttgaccctgtcactgtccgggcattccatatatgacttctctgacaagacgtcgaaccgcaggtcgaggattctgcggccgcgggccatggcgtcgtcgatggcgtggatgatcccgacggactcgtccctcgagaagaagctcaggtccagacggcggatgtcgtgccggctctcgtgcgacaggaggctctgcaccgcgctcaccatcgcgtagttgttcctcgcggcgtcggatagcgtggacgtgaagccgtcgtcgtggtcgggcgtgaacgagtcgacgtccagctcgatgttggggagcatgccggggacgcgtctccaccgcctcgagaggacgctgcatctcacggcctcccgtgtgtccagcttgttcaggatgacgagcagggcctcgtccggcagatcgctcaggctcatcgtgttgtcttgtcgtcgctggcgttggttacttgcttttgcaccgtgaatgcccacaggccacagcccaccgtctcaaggcctgaacagcagcaggaaacctgcttgtctgtagttctgatttctgaaccgaaaccaaacctgcggcgagccggcgagagcaagtgcccttgtcacactgtatttatctgcgacgctaccgctggccgcggcgtactcgtttccgactacagtcctactgacctactccctctatttcaggttacaacacgttttgactttagtcaaaatcaaactactataaattcgattaattttgtagaaaaaatagcaatatttttaacacaagacaaatatataatgaaaaatttatttaattatagatttaacaaaatgttgtaaatattactattttttttctacagagttagttaaattttaagtagtttgactttgactaaagttaaagcgtcgtttaacctttaaacggaatttaaacggaggggaaaaagtacacccaaggtccctcaacttgtcatcgggataaaaaacgtcctcaaaccacaaaaccagatatacggggtcccttaattatataaaaccggtcaccggaggtccttcggtggttttgaacctggttttatccgacgtggcggctaaattagcgcaggaccccgtgggccccacatgtcagctggccacgtcatcaaactcctctctcttttcccctcttctctctcttcctcatctctctcccttctctgccgccggcagtgcctcggcggcgggcatcggcggtgatggcggcggcggtggggggagcggcgtacgggctccccgccggtcgccgtccacgcatagctcctccccccgcagcttgcgcccaccgcctgcggtgcgccgccgcctccccgtcggcgaggacgcggtgcttgaggttggatatgtcgaagcagcagaggaagcatgtaggcttggtgcagctggggatgtagtcgcggagcatgtcagcgacgccgcggtagcggcggaacgcgaggagagagcacgcccggagctcgagagcggcctccatgcgcggcgacaactctagcactgcttccactagtccaagcgccgtcgtggccgctgagtggtcgccacattccccattgagcggcgcggcggcagcgaaagcagcccgtgcctcaatgaggtagtcgccgatgatctgctgcacaatgcagagcaccaacaaatcagttgctgaagccaaaggcaaaggcaaatctaaattgggagcaaaaccgcccaaattgccatcattttttgtggcacattagatgaagaattaaagagggagcaagaaacaacctttcggtgtccgcggagccaaatccttctcttgtcaggaggggaagaagacggcgaggacaccgtcgccgaccaccgccgttcgtccgcaagccggctgtcgacgagatgtccccgcgcagcctcgcacacctgcagtgcctcctcacgctcgggctccatcgccgacgagtggcggctgggacgggctactcgacccgctcgaccagaacctccgccgcgaggtcctccgctacggcgacttcgtgcaggccgcatacacagcgttccattccatgctgtcggcggcggcggcgtcgcagcacatctcgggtgggcgcaccggacgctcgtgctccccgacctgcggcggcgtcgcagcacagccagaagggagagagagatgaggaagagagagaagaggggaaaagagagaggagtttgatgacgtggccagctgacatgtggggcccacgtgggtcccgcgccgactcagccgccacgtcggataaaaccggattcagaaccaccgaaggacctcggtgaccggttttgtataattaagggaccccgtatatctggttttgtggttcgaggatgtttttttatccccatgacaagttgagggaccttcggtgtactttttccaatggagggagtagtatccaaccccagcgtccgactccgactcccgcttgcacgcgttcgtcacggcccgttgaggcccaactaagtccaagatgggccgtcggcccacggtgcgaacgccggcgccaccgttgtccctgctgctccccacgagggttttaggcacgcctccgcctccgcctccgcctccggcagcaagtgagcgcggggagagagacagaagccggcggcggcggggcgagatggggaagaagcagaagaagcccaggaaggggaaggagaagacggagcggaagacggccaagggcgaggagaagcgcgcccgccgcgaggcccggaaggtcggcgaggaggacgacatcgacgccatcctcgtacgtgtgctccctccctcccgcccccctcctctgcgtcagctcttcacgctcgctcagtgcgctctagctcgatcggcgtctccatgtgcggttttgtttgctcaccaccaccttctgcgtctcgtgatgcactccggtggctgaaaaattggaagcgattttcgcactggctcacctttttcccttcacatttcgttgcgtagcagctatggattttagatgagtttggtgttgctatgtgtgctgtttgaactttttttttttgctgatttatctatttgctctggttatttttcattgcagaggagcatacaaaaggaggaggctaagaagaaggaggtacatatagatgagaatgtccctgcaccatctccccggtccaattgctcggtaagacattttagagcaagtgccagctaaagaagttaatctttcggtattcttgtgattatgtacttgaagtggactaggtatcatttttatgcttgtggtggtcatgtttgcatgcttagaatttatatactccagtaggattaataaatttcttcaggcaagatggatttttttatgaagtaatttgatcaaatatgatgatcttttggtgatactgaaccgattggtttttcagttccggataggtgatgtcaaattacaattcaggggcaaaatgtgttaaaagatagatgttcgttttgtttttttttttgttaactgttggaaaaagtttttgatgttgtacagagatcctccctctaaatgttaactataacaaataaacctgcatatgatcttccagctgaccaagttaattccttcttaaatgcagcttacaataaatcccctgaaagatacagaattggttctgtatggaggagagttctacaatggcagcaaggtgggagacatatccttcacgatttcactgctggttgaatgagatatgttcatctagtgttctttttgcctctattctgcttctagaggtttttgagtactgaaatagtatttcttttcctcgccacaatctatttctgcagacctttgtttatggtgatctttatcgctacgatgtagagaaaaatgagtggaagttggtatctagtcctaacagtcctcctccacgaagtgctcaccaaacagttgcctggaagaataatatatacatgtttggtaacataacttaactttgggaaggcattctatgagttaaaatgctttttcagtatgtatgatttagttttttattctgtgttgatgtttcaggtggggaattcacttcgccaaaccaagaacgttttcatcattacaaggtagaagactaattttgtcagtctatttcttgtgactgttttgagtatcttctcttggcacaaggcatttgcacaattcgtatataagcagtagcttcataagcaatacatatctggcatgattttttttcaattttaaaccaagagataggtactgattcccatgttcctacataattataagttgaaatatgactaatggagactaatatgtgcagttcttctgctatttattgatttaagattaagatgtagaggatgcggggttcacctgcccttttatttggatttgcacatataacatcactttttattcgctgattgcctttttttttcctttctgttgtgatattaatggggttatttcgagattagctatcttagatggaaaactcattattatggttctattcaaatttctggtctgattttgtactgtaggacttttggtcattggatctaaaaacaaatcaatgggagcaaattcttgcgaagggttgtccaagtgcacgttcagggcacaggatggttagtggttttacattaaaatcagtcatcaactattctgctcccctcttttcaccttaatatttctgtattatgagcagtagtaaattgtgttctttttcctacaggtcctctataagcacaagatcgtgctatttggtggtttttatgacactcttagggaagtgaggttagtacagttacattttatatgactctaccctggtaatcttgttattagagtaacatttatatttggaccatgtctagaagtagtggagtcattatgtccaaactacaaattatgcactacctgaataacagtgtagcactcttacagctgatcatccgcaaagaatgaaatggtgtggcgtagagtacgttctgaataaatagtgtgacatgacatgatctgatctgcattttttttataatatccttctgcagatactacaatgacttacatgtttttgatttagataatttcaaggtgagtacaccatgttaatattttgtttaatactgttagtagtaacacatgaagtcatttattttaatactcttactgggaatatttgtatttcagtgggaggagatcaagcctcgccctgggtgcttgtggccaagtccaagaagtggctttcagctaatggtataccaagatcaggtaggtctttttggatttaaagctaggacattgatacttcataaaaagagtttaaattaactataaaccaaccttgtcttcgactacttttgtttacaagagtattaatggcccttatttctgtagatatatctgtatggcggatattttaaagaagtagtttcttctgacaaatctgcatcagaaaaaggaacagttcatgcagatatgtggactcttgatcctcgtacttgggagtggaataaggtgatctcttgcaattttttagaacattgtatcaacttccatcatgatagtgtatcgagttttactttaagccatatatccactgagtgatttgcatattagggctgcaggaat

SEQ ID NO: 18023 - DNA, 644 bp, Oryza sativa
tcgtctggcttttgatgcactgttcagtagagaaaggcttccccaaagcttttctcctccgcaagtagaaggatcaaaggagattagcaaggaggaagaagatgaagtaaccacggtgacggttgacctcaacaagaatgccgctattattgatcaagaactcgacacagcggatgagccaagagcttcctttcctaatgaattgtcaaacctgaagctgaaatctcgcaggaccggtttcaaaccatacaagaggtgctcagtggaagcgaaggagaacagggtaccggctagcgatgaggttggtaccaagaggattcgtcttgagagcgaagcatcgacatgatttgctttccacctggttgctggcctctaccaagtcagaagttaaatttacatccgagctaccataggacttcagaccttccaatgcattacctcacaaactcaatttattgtgtgttgtatcttaatgcttgccaagcagctcctatagactgcttttaaaccgtatctcatagacttttgattagcatttaagcgactgctaaactttcttcataaaagggtattatccttattatgcattatagtctggggaaggtaataagtggaattttggttcatttttctgggtcatattt

SEQ ID NO: 18024 - DNA, 691 bp, Oryza sativa
cctgcagcccagtaaaattgtcatgttgtgtcccctttgagacaaaacggtatttctgacttggtacatattaactgactcttacacgccctcttcagctggctgtgctcgaggctgaacagaaagctgaggaagaggctagtgcttccactagttccaagaaagacacgaggaaaagcaagcagaagagtggcatgagatagctttggttcgaaatatcgaaatagagagtggtttaggccaatgctttaagccatctgggattttttcctttctgagccattggtcagctcgatcgattaatccacacgaggtgcctataactacctgtgtaggttggcttaatccatggttaaaattttccaacgtactgtatttgcgattcctcggaagcattcatggagagattgtacacagttctattcatcggaaattcgttactacgtacaagttttgagttctctactgttcagtgttcacagcctgcgatgtaacacggtacaccctaacagtatctgggtgcggtgtaaattcactccatccgtttcaggttaccagacgtttatagacaaactattttaagtttgactaaatttatagataaatatagtaatatttataatactaaattagtgtcatcaaatcaataatcgaatatattttcataataaatttgtcttgggtgaaaaat

SEQ ID NO: 18025 - DNA, 2715 bp, Oryza sativa
  unsure (1)..(2715): unsure at all n locations
gtagagagagtgagatgcctctccaccaacagcaaatttatgcatctccttggttcgtatctgtatctccatcagtggcctcatcttcccaggttcacttacatcgatggccacatgcaagctctggtaaccattttcttttggccgtgtgacataattttttgtccttcctggaacttctttccacatagcttgaatgatttcatgtgtcctgtgacaagccctagggccccagtctaacgagctgccatcacaccgaggttctaagattacccttaaagctagtatgtcatttacttcttctggttttctgccatcttttactagctttttcatagtactgaaacggcttttataccgcccttgaattgagatgtcnnnnnnnnnnnnnnnnnnnncatcatcatctttcagtgcctgaagcaactgctccttgtacgaatctattaagagcttgttctcagtctcttggctcctcaaccattgatcaatatggtcatatgaatgcggaaacaaatagcgaaatgaaagatcctctagctccagtgatagattaccagctccaacagcatgggcaagtggggcatatatcttcaggacttcaagagactttatccgctgaagatatctcgggaggcagtcaaggtgtctcatcatatcgagctttagagcaagttccaagataactgctcggatgtcatagtaagaaagacaaaactttctcaatgcacttgcactttcatcatcaagtacatcaagctttgaaggggcatgcttaagccgtaaactctcgtgcagcaaatgagctgtgctgatcccaatctcagatttgacatccctcatgcttattgctcctgcatcaagtgcttccctcagtattccggctgaaataacttcggcgtccatctgccaccatgtgccaaaaaaaactggttagatcttacagtttaaagtggataaataaaccagagatgcttaactgttctatgacacaaagaagtgtaagtataaagtatcttatgaattaccagaacaatacaaggaaatgaagagttagaaaattctcatggacagaagccaaacgacaaataagggatagctgtttcgtaacaagtcctaaccaatattatcttttttttcgccgggctggcgtgaagagccagccgagatttattaagagaaaaggaagaacaagttacaagctacagcaaagagctacatgccggcaaagccagcaacacacttttacatggctgcctgccgctgcgtcaaacgcgagacgacacctcccggcagcgagctaccaccactactactgcaagggctcggttgactgctgcaagcttcctcctggcaccaagcccgcagctccccacattccccactcctcctccatagtcgcacacagctgcacaaccgacattattatcttttttttttaaaaaaagaacaagtcctagtcattaggaatgtcatttttttactctggtaatggaaactactaactcatcaatgccagtttagctatgataataatgtcctctactagttgtacttgtggtaatggtagaaataagcacccagatgaaaactgcgaagcaaacaataataattggtactactaagtactaacataaaactaaactgacaatcgtagccaatgtgtgtatgacaattactgccacaccagcagcaaaatatatcttgcttccagagttttgattacaatgggaattatgtgacgatgaattatcctttgctagaagcaaagaggagttgcaccacatggttttaaatgatatcgaggtactagtactactttatccataagaccataactcatgtggattgctaagcttaatgagatgaatgaaactactaaatttgcaatgcatttcacccaattcggcaagtcgagctacaggatgcaatcattcgattcgagcaaactacctggaggtcggcgagggaggcggcgatagcgagcgcgcgggcgagagcccggccgccgtcgccgtcgcggagggcggggagggcgagcttgagcgcgcggaagaggaggcgcgacgacgacgaggtggccaggccctcccccatcctccccgtcagctcgttgaacgcgcccaccagctccgccaccagccgccctcctccctccgccggagtagacgacgacgacgacgacgacgacgtggatggagaagaggcggccgccgcggcggctgcttgggcagggaggcggaggcggtggaggcggcgcgggcggaggcctgggcggcgcgggtggggatgctgccggcgaccgccgccgccggtggggattgcggcggcggaggtcgtcgcggcggtcgccatgggggaggtggtggggcccactgggagggatgaattggaggcgacgtggcggtcgttgactcgttgtgtgctcgaagcggatgcgtgaagtgaagtggtgtagcgtagcgtggtggcgatgattggcttgcactctgccacgtaggatccgctcctccgtggcgattctcatccacgagttcgtcgtttttttttccatcaaattgatactccctccgttttataatgtaaaactttgtagtattgccctcatttctctgtggtcacgccccacaccggcagccgcgtcctccgtcctcagggccggccctgggccagtgcgggcagtgcgaccgcaccgggcctccaaaaattaggggc

SEQ ID NO: 18026 - DNA, 3656 bp, Oryza sativa
cgttaactgatattaacagaataggggcaaagtgaatattcatttgaaaaaagtaaggggtaaaaacataaaccctaaaaagtaggggcaaaatcacaattgaaacatgaagtaggggtaaagatgcagttgcccctattattatttgttttttttttgtccggacgtgcaagtgcaagtagtgtttcctcttctgcgacatgcccaagtagagtttgggccaaaagtgtgtgatggatggaattcgtgcgaccctcggtccagaaatgtaacatgctttcaccgccttaaaatataacaatttcgaactatttatctcaatgtttttttttaaagatacagggtcaaacattagtactatatttttgaaactgtattgtattctctctgtcccataaaaaataaagctagaatgtgttgtgtcaagatttatatgtaaatatttatatttatatatatactaggaaaaaggcccgtgcgttgcaacgaatgaagtctatttcaaccgttttattgattttttttgtctaaaaagtatatgggatttttatttgataattgatagtattgatatctaatttggaactcttatcgggatgatggtcatatcatgtacattgctttcttattgcctgacaagaattctcaaccaattatgagtatgactctcgtcccaagttagcatgcgtgattttagaaaggatttttcttatacgatttttatgtatttttaaaagcaaacaaacttaaaaactggcttaaatacggacgacgtaccaaagtatcggtgaaaacatttttaatttttacaataggaaagctcaaagttgttggcgaggacgcatgagagagctgcctccttgaactcttgcagcggccgcagaggacaaagttgtgcaggcacggtctgcatcaccctgacgaatcgtccgatccatgcatgcgtcctcgtgccacgggttacgctcgtagccatggtctccgtcgcgtctatggcagtggaacgtcttggcccgaacgccgcttttaaacattggtggcggcggcggcagccagccggccaccaaaaaatcagcacacggtgatctactattacgttattatcacacgtcgctgcctctcggatatattatgatgatcgtatatcgtatcgagccttgcgttttggaatggatcctattccgtttctcacacaagaacgcgatccgattgaaaattgaatcgggtgattttgttcgacagaaatgaaaacgttccatgctttttaagtagtagagaagagaagatataaatataggtaatgatagaattagaaaccaattcaaatacggatgacgtaccaaaatctcggtaaaaacaacttcaatttttataatagtatagacagagattccggtcaaaaaaaaatagtagagatagggatatggtttagttaagatgaatttattgtgggagttcgcttgaatatatatatttttagaaaatcatgagctgcagttaggtgtctgatcgtctcaagttagcatgcgagttttttttaaacatatttcttatatgattccttctgtattaccaaaagtgatcgatcttaaaaactgaatcaaatacagatatgtattttcaaaattgaatcaaatacagatatgtattttcaaaatcaaacgaacttaaaaaccgactaatacacggatgatgtaccaaaatatcggcaaaaatatcttcaatttttataatagtagagaagagataggatgagatgagacattctagaatttttttttgtttttaatttttttattaaaagttttacaaaaataattttccattttgaaaattgacagaagtagtcgccttaaaaatcgccatcccaaagggcggcgaaagtgacgtggcagacggctgttcgctctcgggcgacggccgtcaacgaaatttgcaggcggcccccttgctgccctccgctagggcgattttgtactgtgcggggggccgcctgcaaatgggcagcgagggggcatggaaatttgcaggcggcccccttgccgccctccaataaggcgattttctactgtgcggggggccgcctgcaaatgggcggcggggggcctggaattttgcaggcgcccctttgcagccctgggggaggacgattttatactgtactttatttgagaaatatattttttttataaatatcaatagttatcaaatctttttatattgaaaactatactagattaaaatctccaagactggtaaaatacaattttattattttttagggcctatttggaatgtcaccgtacaaatattttgttagtgccaaaatataagcaagttttggcactaccaaatctttggtaaggtaaaattgcatttgatcatatttggtttgctgccaaaatgtaaaattgtagtgaagaatgttctacataatctcaaatctagattaggtattaccaatgaataggcttcaatcgaaatcaaacacaagtactattcaaattacaaaaatattggtagggcatgtttttggtagcaatccaaataggcccttagtcttacgcatacaaaaattcaccaccataattaaacattgtaatgataagatagataagaagtgccatcgatacacggtacaaatttgtcgatcccgacgaatcaagcatgcggtaacctatcggccccttctaggtcggtcagaatgcattgcattctcgtggtccttcaatcgttgatactctacttgtgtttctgactctgttatcttctggccatgatatgatggagtgacattgtcgatccatcgagtaaatccacacatccttggattgccctgtaaaaatagtaatgtaattcagtttgggtagtaattttgtgcaaatcatagcggattttgtaaacggttagacatacaacgaaatcgttgtctacattggggcagacaaaatatctccttccaaatgtttgttcagcaaaggatgtagccacctgacagcgatctctgcacccacactttggacgctcggaccatttaggtaaccctaatggattgttcctccagtctaagcttgcaatttccacctgacgttcgtactccatccaagcatgaatgaactgtatggtcggttcaggttgcgttatcggcccgccacttgaagtaactctgactgcgtcaatccattgtacgaattgacatttccttacatcctcctatgtacatccattttgggatagttaagttaatgatagtactgaggagtgatgaaaagaatagttgtaattaccacgaaatcatcgtcgacaatgtttggacacacgaaacacctttgtcctcgagttcggtgccttacggaccttatgacctgacaacggtcaccacaacgacactccggacgctcacgccatgtggggagtcctaggggatttacctgccattctaaagcctcagcagcaattcgacgttcatgctcatcctttcgccttaggtagtccgatcttgtttcactacgtgtgtcggtgatatgggaccgggagtatcatgaccagaggcttgaggcagacgcaatcgcccacgtggcctggcaccttcggggacgtcgggcccgagggtgaggtgtccgccctcctcctgatttcccccgagggggggtcgg

SEQ ID NO: 18027 - DNA, 11881 bp, Oryza sativa
tgctggcgcgctcctacgacacccgcccgtcgtccatgacccggagtctccagcccaacgatggctggaagacgtggccaacttggtcatgacggcacagcaacgcctgggtgctggcggacggtccgccaccaccaagacctccggcgccgccactaccggttccgcgtcgtcaagacggagagcgcggcgagcggcggctgctgcacgccattcggctaccactccctcgtcggcgcctccgactcgggaggatcagcatgaagagccggatgcccgcctcgacattgagcgccgacgtagtgatcggcgtactccccgcgcaacggagggtgcctcttcgtccagggtgtcacctcgacatggacgtgaggatcagccctccgtgcccccggttggtggtgttggctgtagagcctttgtggcgagtcttcggaatgtccgttggcccccaaggttccggcccaccatcaccgagaagtatgatgggagcgtcaaccccaccgagtttctccaggtctatacgaccgggatcgaggccgctgggggagacgacagggtcatggcgaatttctttcccatggccctgaagggacaggcgcggggttggctaatgaacctgccacccgcgtcggtccactcctgggaggatttgtgccagcagttcaccatgaactttcaaggcacctatccacgccaggtgaagaagcggacttgcacgcagtacagcgaggggatgatgaatcccttcgctcgtacattcagcgtttctgccaagtccgcaatactataccttgcatccctgcacacgcggtgatctacgcgttcagggggggtgtgcggcacaaccgcatgctcgaaaagattgcctccaaagagccccagactaccgcagagctttttcagctcgcggaccgagtggctcgtaaggaggaggcctggacctggaacccctccggttccggtgtggcagcttcggccgcccccggatccgccgctcagacagggcggcgtgacaggaggaggaagaaaaggtcggtccattccggcgacgagggtcacgtcctcgccgtcgagggcgctccgcgggccacccgaaaggggaggcctgcgagcgacaaaaagaaagaggctggtactcccagcagggagcgcccagccagcaagtggtgctccgtccacaacacctccctccacgatctcgcggactgtcgcgcagtcaaaaacttggctgagcgaacgaggaagtgggaggaggacaggaggcaggaacgccgtgagggcaagtccgcggcagttccctccggtaaacggcgaagtgaggccaaacagaaggcccccgccgctgacatcgatgacggtgatgatgacctaggtttccaagaacctggggccaccattgccactgtcgacgggggagcgtgtgctcacgtttctcgccggagtttcaaggccatgaggcgagagcttctcgccgcggcccctactcatgaggcgacgcgtcgggcgcggtggtcggaggtggccctcacctttgaccagaccgaccacccaccgtgcgttgcccggggagggcagattgcgatggtggtttctcccaccatctgcaatgtgaagttggggcgtgtcctcatagatggaggagcggctctcaacatcctttcccccgcggcctttgatgctatcaaggccccggggatggtgctccagccgtctcaaccgatcatcggtgtgacgccggggcacacatggccgttaggtcacatcgacctaccggtcacctttggtggatcagccaacttccgcacggagcgggtgaacttcgatgtggcggacctcagtctgccctacaacgcggtcctggggaggcccgcgttggtgaagtttatggcggcggtccactacgcctacctccagatgaagatgccgggccccggtggccccatctctgtccgtggcgaccttaaagtcgcgcttgcttgcatggagcagcgcgcggaccacctcgctgctgcgaccaagcccgagggtggtgacgagaggcttggcacctccgcccccaccgccccgaggcagcggattgccacatgcgacgaggtcccggtcaaggaggttgccttgggcgacggcccatccaagaccacacggatcggtggtcttctggatggcaaataggaagacgcgctcgtctccttcctgcgggcaaacgctgacgtcttcgcatggagaccagcggacatgcccggggtccccagggaggtgattgagcaccgtctcgccgtgcggccgggcgcaaggccggtccggcagaaagtgcggtgacaggccccggaacgtcaagccttcatccgcgaggaggtggcgaggcttctcgaggccggattcatccgtgaagtcatccatccggagtggctggcgaacccggtggtcgttcccaaggcgaacggcaagcttcggatgtgcatcgactacaccgaccttaacaaggcatgtcctaaggatccttaccccctgcctcgcatagatcagatcgtcgactccactgcggggtgcgaccttttgtgttttctagatgcatactctggttaccatcagattcgcatggctagggaggatgaggaaaaaactgcgttcattacccccgtaggaacctattgttatacatcaatgcccttcgggttaaagaatgcaggtcctacttttcaacgtactactcgaatttctttgggtagccaaataggacgtaatgttgaggcttatgtcgatgacttggttgtaaaaacgcgcaaccaagaaactttacttttagatctagcggaaacttttgagaacctccgctccgcccgcataaagctgaaccccgataagtgtgtgtttggtgtacctgcgggcaagcttctcgggttcttggtctctgcccgaggcattgaggccaaccccgagaagattcgagctattgagcggatgcgcccccccagcaaacttagggatgtgcaatgcgtcaccggttgcatggccgccctaagtcgtttcatatcaaggctgggagagaaggcgctacccttgtttaagctcctcaagcgctcggggccgtttacttggacggaggaagctgaacatgccctcactcagttaaaggcatatctcagctctcccccggttctagtcgccccggagccaaatgagtccctgctactttacttagcagcgaccccccaagtagttagtgcagcgttggttgtggagcgcgatgaggacaatcctcattctgcgcacccccactctgtgccgacttggcccgggagcaggcagggaggagaggcccccgagtcgaacggtggcctaaggcccccgacgaccggagtcggctctctgcccgcttgtcagacggtgctgggtgcccccgaccctcaggaaggccccgaggccactgcgggaaggccgcacctaccaccctttgaccccgaggctaaccctgtgctgattcgacccgggagagagcagggagaagaggcccccgagccgaacggaggcctgaggcccctgacgaccggagctggccctttgcccgcgtgtctgacgacgccaggagcccccgacccccagggcggccccgaggccactgtgggaaggccgcacctgtcatcttcggaccccgaggtcatcagcgcaggagacgagtgtgccccgagaggccactgggacgaagagcaccccggggatacggcccttagcgaagaggatcggccccgccgaaaggtgcagcggcctgtttactttgttagtgaggccctccgggacgccaaaacccgataccctcaggcccagaagatgctttacgctattctgatggcctcgaggaaactgcgccattatttccaagcgcatcgggtcactgtggttacgtcctaccccctcggccaaatcttacataatcgagaaggtaccggacgggtggtaaaatgggcaatcgagctttctgagttcgatctgcactttgaaccacgccacgctatcaagagccaagccctcgccgattttgtggcagagtggaccccggctccagagaccgtctcaatccccgaggccagcgcggacccctcacagctgcctcacgccgcccactgggtgatgcaattcgacggttctctgtctcttcagggcgccggtgcaggggtcacgttgacctctccaaacggagacgtcctcagatacttggtccgtctcgactttcgagcgactaataatatggcagagtacgagggactccttgccggactcagagtagcagctggactggggatccgccgcctcttggtgttaggcgactcccagctggtcgttaaccaggtctgtaaggagtaccggtgctccgacccacagatggacgcctacgtacgccaagtgcggcgtatggagcgccattttgatgggatagagcttcggcatgtacccagacgggacaacgtggttgccgacgaactctcaaggctcgcgtcctcgcgagcccaaaccccaccaggcgcctttgaagaaaggcttacccagccgtcggcgcgacccgaccccttaggggaaacggatacgcctgaccggcccccgaggcccgtcggagtccaggtctcgggacccgaagggagcgcttcaagctcccttagattgattgcgtggatctctgagatccaagcatacctcacagataagactctacctgaggaccgcgaagggagtgaacgcgtccaacgcatttccaaacgctatgtgctggtagaagggaccctctatcggcgcgcggctaacggaatcctcctgaagtgcattcctcaggaacaaggcgttgagcttcttgttgacatccatgagggcgagtgcggagcccattccgcctcgcgcaccctggttggcaaggcctttcgtcaaggattttattggccgacagctctcaatgatgcagtcgatctggtccggcgatgcagagcgtgtcagttccatgccaagcaaatccatcagccggcccaggccctgcagattataccactgtcatggccatttgctgtctgggggcttgatatcctgggaccgttcaaacgggccccgggcgggtttgagtatctgtatgttgcgatcgacaagttcactaagtggcccgaggcttatccggtcgtcaagatcgataagcactctgctcttaaattcattaagggcatcacggcccgttttggagtgcctaaccgtattattacggataatggcacccaattcactagtgaactcttcggcgactactgcgaagacatgggcatcaagctctgcttcgcctcacctgcccaccccagaagcaatggccaagtggagcgcgccaatgcagaaatcctcaaaggccttaaaaccaagaccttcaatattctcaagaagcacggcgattcatggatcgaggagttgccagcggtgctctgggcaaaccgaaccacaccaagccgagcgaccggggaaacgcctttcttcctcgtctacggcgcagaagcggttctcccatccgagctcaccctgaggtctcctcgggccaccatgtactgcgaggctgatcaagatcagcttcgcagagatgacctcgactacttagaagagcgaaggcggcgcgcggccctccgagccgcgcgctaccagcagagcttgcggcgctaccatcagcgccacgtccgggcccgatcactctgcgtcgacgacctcgtcctacgccgcgtccaaacgcgtgctggattgagcaaactctcaccaatgtgggagggtccgtatcgagtgatcggtgtcccccggccgggctcggtacggctggccacgggcgacggcacggagctgcctaacccatggaacatcgaacaccttcgtcgcttctacccctgaagaggggggggtcgggtgtcaggttttggctcaggccaaccccgcacccccctcgggtgtgcagggttggccgggggctaccacacatgcattacattcttatttctcttttttcaacatttcaatagaagcagtttcaatttcctaaaggttgtgtctgtgctgttctttctttttgaagaatcttgacttaaaataaggtcactcgtactcaaccttgccctcgggggttcggttcggtctgctaaaatcgccaaacggggcccagaaccgagccgtgccctggggcgtggtgaactccgggggggaatcggcaaaaacccacaatcgggtcacccatacccctcggtcaccacgttcccggcctggccagtctcgacatgtggatctccccaggcactagccccgacccgagccattcgaggactgggacttgggcacgagcccttatttcaagctaaggcgcaaaaggaccatggcacagatcatcctcatcgcgtatgtatagcaaaataaaactaacacaaagattttttcgtcatttctgattgcagattaagttaatttgtacacaaaagaggcatgaaggccttagaagaaagaaaaagaaaaaaagtaaagattggcgggggctcgggggctcattccgacgcgcccgagtcgacggcctcgtcaccaccatcgtctgcactgctggtgttgccctcctcgtcggagttgggggcgaacgcgagccgaggggccgagccctcgaagccgttgacgatgtggtcggcggcatcccggacgcgcgcgcgcgcatcgtcctcggtcccgggagggaactcctccagcgccatccagggagagaaattggggtcccgggcctggtaactcgctagcacgagttcgaccgccccccgggcgaggtccctcgaggatgacttgatggtcttctcgagctcctcggggagtcgttcgaggacccaggccatcctgttgaggtgcggagcgaggccttccagattggtggggcgcatcctcgtctggcctttccagaggcccgcttgccgaccggcgcgatccatgcgagagaccgagtcccaaagcatgtcgggcccaatctcgcccgccaagcgaagggcctcggcctccccggtggaggagtccagcgctcgctgcatatcggcgacggtgtgttcggcagctgcgaggcgggcggctaagtcgctttcgcccgcggccgccccaccgatatgcgccctcgtgtacagctccttttcccgcgcctcgaggtcagcagcccgctgctccagtgcggctctctcggcgcggacgcattcaagattgcggcgcgcctgctcctcctgcgccgcctcgcgaagggacaggctgtccgccagccgtttggtcgtggcctcagcctcctcgagagctcgctcccactcagcgagtgcgtcctcgcagaggcggagcgcgcactcctcctcggcgcaggcggcctcgtgcgccgccagcgtcgcctcccggagagcagcggcggcttcgcggtccgtcaagcctttctccacggcgccggcgtgttcttccagcgccatagcacgggcctcaagggactcctcgcgccgccgggacgccgcctcagtctctgttacccgccgctctcgggcagcggcggagtcaaggactccctgggcggcgtcgagcttttctttcagctccgcctcccggctggcgttttgaaggcggagggcgtcttgcgcctcaatcatcgtggtggtagcgatgagggcggccgctcgctcctcctccacctcacgagcgatctccgtcagcgccgccttccgggcttcaagctccgaaacgtgacggcggtgagctttacggcccacctccaccatggcgtccaccgagcgccgcccctcctcaacgcgtgcccatgcggcctcgagctccgctcgttccgcgcgcagggcctccacttgggcgctgaacccatctagcaccgcggtgtttgcggcggccaaggcctgcagaatgggctcggcgctcagcggggcgacggaagatgaggagaagagccgccttggagagaaggcgatgcggctcggccccccggaggacgtgctgggctcggggatgtcccccggacccgtttgatcctgggcatcacccggggaggtgggcccaggcgatgtgcccgcggcctcgtcgcgagcctccccggaggctgtcgcctgagggttgcccgagggagtgggcccagttggcgcgccagcagcagctgttgcctcagcctggcgagcccgggcggcctcttccttagcggcttcctcagcccgggcggcctcctcccgagcggcttcctccgcttggcgaatccgggcggcctcccgggcggcctcttcagcttcccgaaggcggtctgcggcttcacgccggtcagattctcgcctccgctcctctgcggccgctggatcttcggcctcggactggccggacttggggtggcgggaggaatgcgacgggacatcgctgaagcagaagaaaaaaccagaagacgaacaaaatgagtaagaaaaaacttccttttgggagaaagatggttgcaatgagagtgagacgaacctgcgagggggacggttgaatgaccaccttggaggggaaatcaggtttccccggcatggttccgtctcccccgtcttgcggagccgtttcttcttgcgctccccctcgggctgcgacgtcggcgcggccccctccgggcgccgactgctggcacgcaccgccccgccccctcggggaggagatgggggaggtgttcctcccagcttcctcttcccctgggcgtcggcagggcggctgctccccgagcccccgacgcggggcccagaagcacgaccccctcctggggcagattgttccccccggcggcgctcgcccgcgccgtcgtggcccttaggggctctctcctctgaggccccgacccccatcataatggttagaatggaggcgcggtcgggatcgctgcagagggggaggatctcctgaggaatgcgagacgcctccacggagctaagattcagcaccctttggaccacgatcttgaagtcctcgggagcccaatcccatctggctccctggtgggtccgcatgtagtcttcaggcccagagtactcccaagcgctccgggcgcgccgttggagcggcgcaatccggcgacggaggtaatcgccgtacaccatggccccggtgagcccctgggatcgcaggcccgctaggcggtcgaggacggcgtcgtagtcctcccccagatctaccggcgcccgccagctggagacctgcgccgggggctggcttggaagtcggaggcgcgcttcgttggtgaggggggtgtagaaccagtcgctcttccagtcgtcccacttcttgcggaggacgcaggggatgtagcggttcaacaccggcccccgcggctggaagtagcagccgccaaccaccgacggcggtgacaccgactgcacggtgaagaaccaccggaacagctgaagagaggggcgcaccccaatgaacatctcgcacaggtgcgcgaagatggccaatgtcatcaccgcattgggggtgaggtgcgccatctggagatcgtagaactccaggacatccatgaagaaagaagaaaatggcgggaccagcccagccattgcgaaggggaggaagaagatggaccgccccgggtagtctggtgccgggcgtccctcgcccagcatcactatctcccgaccggtggcggactccggcatgaagcggcgcggcagtccggcgtgcctctcgctcacgatgcgggaaggcggtagtacactgccgtcgagcagagcagagccccgtgccatgacggtggaggaagagatgattgagaacgagcgcgtgtggcgaaagtagggcgtagcagagaaagagttagagctcaggcggcgaaggcaagaggaacaatggcgaaaggaaggaagcaaatccttttctcgatgcttttatacccttgccatcgctgggcctggctcctcgtttctcgcgcccactacctcgctccctcgtatctcgctatctcgctccctcgtttcccgtgcccacgcttccactaatcccattcgcccgcatacggcgcatgaagtggatatgcggttgtggcaattgaaatggattgtatcgtgcacgcgttaattacgctcgccgaccgaagcggcgttaccgtatctccgggcgagacaaatctgctcacccagattcgcgcgctgctcaagtggtgtggcagtcttgaatagaccgcccattatggacaaccaaagttaccaataccaatgtgcatggattgagaccgttgggtattttgcccaactacggagaccggtcccacctgtcaccaggctttaggggtggcgtcacacctgaccgcttccctggggaagggaaattgctctggcataacgccgggggctactgtcggtgatatgggaccgggagtatcatgaccagaggcttgaggcagacgcaatcgcccacgtggcctggcaccttcggggacgtcgggcccgagggtgaggtgtccgccctcctcctgatttcccccgagggggggtcgggttgcgcttgccccggccccgagggccgaggcaccccgaccccttaaggaagtctgcgccacatatatgggataagtgagcacagctgtgctcacctaacagcatttattgcagtctggtcaagcgtgtcacgctgcatgcaacgcagtacagcgcgttcctttatccggtctgtgaccagtcacagaccggtcagatcacgggttaggtggcgactggcggtctgacgcacgccttgccccatcccgtcaagacgaaagcctctaggcactcgtctcaagccggagctagcgtgttatctcttagagatggcacgttagccctggtcagatttataccaggcttcatcctaaccattacaggcaaggtgttacacgaagaagggcaaacatgcacgttgttaagctgacgcgtggtggacaagaatgaccggtctggcactggtcgcgtcatcgacagacagccacggtcccgcgtcatctccgtcttcgggggaggtgggggtaggtgtgggctgtcccatcagaagggctcccggatggaaaccgtaccgatctccgcccattaaagagaaaaagaacagtccagtttggaaagagagaggtgcatgtggtatccccttgagatataaaaggaggaccttgcccatttagagagagaacttttttttcccttttggaaggcagaggggaaaggaagtgaatcttttgtaacttgtccatacacaaatccacaaaaacacaggagtagggtattacgcttcgcagcggcccgaacctgtatacatcgccgagtctcgtgtgtcttgcgggcgagtgatctttccacactcggagagagagagagagcttgggattgcaccctaagcccctggtcgaaccggcaaaggggggcttgcgcagtctcccggtgaggggccacgagctccgtcatctggcgcgccaggtagggggctcagcgtgtgttttctgagctctcagactcttccgtgtgcgccaagtttttcttgttcagcctaatggccgagcaaggaaaagcacacgacctctctccgagtgtgagcggcgacgacggggagccgaatccacgccgtcgagctcgtactcctccacctcctccgcgccaaagccctaagcagggggaggcgcttgagagggtcgacaaatccgtggcatcaccagtcgcaggtgatgcaggagaacggcgagatggggagcgtcgcctcctcgtctacggcgacggcagcacgcctcagggtgcgcttcaggctgctggcgcgctcctacgacacccgcccgtcgtccatgacccggagtctccagcccaacgatggctggaagacgtggccaacttggtcatga

SEQ ID NO: 18028 - DNA, 1910 bp, Oryza sativa
tagcaccatatgaatgaaaagaactatgtagacgagacaaacacaagtagtactgcagtagtaatagcaaaagtagtactgctttacaagtttgtaagccaaaagaaacagtcacataaggactgaagaggtagaacactactgacgaggcctcttacccctgtccctcctaccctgcgccctaacgtgcccctgggagtacgtgagtcggtccgggggtatggcacggccaacccgtcctgcctgtacaggtgtgacctctggctgctcctgagtgtgcgcctctggagctcctccaagctgagaggagcctagtacgtcgtggtggtgtgcaccatgcaagtcgtcgtcgtagaactagctagtaggaccagtcctaccggcgtgagacgaagaggccccagtaccgaagatcccggctgcaaatcctgctggacaaggaccatcagtttcatacaggtatttaatagtattaataaaaagtaaagtaccgtgtggacgagggatcgacgctccgtgagaggaagagctggcgaacgcgctcgaagaggtggcgaacgcgccggaagtgctggcgaatgcccctgcggagctcgcggaagcgccggtcgtggctgtgaacgcgctcgaaggcagacgagttcctgcgatgaggaaacgtgcagttaaaacatggtgacatattcgtgcaaaagctgaaacaaaaatgaactaacctctgggctgaactgtaccgtgcgaaaccggtgctgtaggtcgcactgctccgaagctaggggcgctcgaaggcaaacgaggtcctgcgaggatggaacatcaagttacgacggggtgatgttttcgtacaaaaacagaaacaaaacttaagaaacctctgggctgagcagtaccgtcgaaacaggtgccgtaggtcgaggtcctgctccgacggtaggcacgcgaggccgtggttataccggaccagctggaggtacgacgtccacggcgctgcgacaggagaagacgcgcatgaccgcacgcatcttctcctgcatccggtcgaaggtcaccctctgctcaacgtcagtcaagtgcaaacctctgttcaacctcacttggactgcggtgatattggcactgatatcccgtgcggcatcggcctatgcaagatggaaataaaaaattcagtaattgtcctatattatgcaagataaatgaaataattgtaaaaactaatacaaattcgacgtacccccacgaagtagtctcggtcacggtgcgtgggatacgcgtccgtgacagcagcaacgtgcggctctggggcgtctggagtgaaggtcacacgcgcatgagtgcgaggaaggtaccagcgaaggtagtcacggtagttctcctccgtgtgtaggaagagctcgttgatcacctcctctgtagctaacacctagtcatcaacgtactgctgtacacgtggagcccaaagtgcgcctgctagctgtccccgtcgagtcaacctgtgaagagaggtaaattatatggctcgatgaagtaattaccataaaaattttgaaatgaacaatccgaactcacgagtggtcggcagggaggacggtcggctgcacgttgcccggaaacacctgcctaagtccgaactgtctcatcacacgctgcgggcagtgaggctcaacgaaaatgtcgaacaccatcggcaggatggtgagccagtaagcctggtcgcgtgtgcacaaggacgaaagtcctagcggtgctctcgcagcgacggcctcttctgtgtacggctcccagatgacgtcgctcggctggagacggtcaaactcaaacacgaagtccgggtaacctcgtctcacctggacgtgagcgtaacgacgctgcaataaacatgatcggaattagacatgttatgtgatgataaa

SEQ ID NO: 18029 - DNA, 3812 bp, Oryza sativa
agaactttcatagtccaagtgttaccattaatcaatccagctaggtttgttttctgcataccttggggttgggatggactagtgcaccatcaaagcacacggctgcagagcaagttacgattgttgccaacctgctggtcttgttccaatcgaccacgataccactgcattgcataatctccttcccatctgaaaacataggaagaattagtagctggtaagaaatataattatcttgatctgaataaaagcttcctttacctatacttactaatataaaaaggagttgtacccctccaatcctataggccaaatcacatctatcaatccctaccgtccatccacgttgcacgcatcacaaccgtccctaccggctaccgctcaccgattccactccctccaccgcgatttctgcctgcactccctccaccgcgtgtttactccgcccccgcgagatgattccgccgtccactactcgctcctcctcgcgtgtccccgccaccgctgcccccgccggagtcgaggccgtcaccagccgctgctgccccccgccggagccaaggtcgtcaccagccgctactgccccgcctgagccgaggtcatccccagccaccgccgcactccaccgctgctgcaagccgccgccgccgaggtggttcccccctttcgccgaagataagctttcgttcgttagtctgctaatggaaacaatatttagttttttagatccatcctctcttgctccactggtcagtggtctcaggttgtaggcaggagaaggcgatctcatagcagggtgcaatggcaacatcataccatccctcgcaatgcctctggactaaagacgatactgctggatacatgttcctgtatccatgttggaggttgatttcctataagtaggttaattgcatggttgatggaatcttcatggcatcaggttctactttgcaaatttacaaattattttttcctctatagttctgtccctatggactgacatatattttgtatctgaaaatgcatttggggcttgatgtggccatgcggattcttgagtgaaatatccagcaagttccatgggtgctggaaatttgaatatagcatgacatccacaaacgggcttcaggaattaagaggaagccaatcaggacaagggcctcctgagctaatgttgtgtattgcaggtacttctttgtgtctcaatttgggcaactgttgtatcaaaaaaatttgttaatgaagctgatatctcaattgttgtgagttgttcctatgaatacatgtgcttgagcattaaagaaacaaatgtcttcagatatgcactttcatgaattctgagagaagatatggacctcccatagctagctatggagaaacatgcacagtttagacaaaatgtcagagtgcctaggaagacatgttgaagacatgttgggtttctttttccataaaataaattagtataccatttctacatcttggcaaaggttgtacttgataatcttttatggccactgtaggttagttattcactgttgtctctcctttcgttggagaatgggctccatggtgcaatggttgcagttgttggttttgaacaaagttttagtattttttgcagttcatggtacttattcaactataatagccctcaagacaagcatatattctgaggtaactcattgtctactaaagttgaaaatttaatttagttcatacttatggtacttattctgctataatagccctcaagacaagcatatgttcttgaggtaactcactgtctactgaagttgaaaaattaatttagttcatacttgaactggtttatcataaataaggttttttatgtatataaaatgtccagtggcgcaaaaaggtgcgtgattattcaaagatctaaagtaaagtgatcgatctgcatggtcttttgttcgtcgacaagaactctctgaagtttcattcccaggtatttttcctcttgtgatcatataaatgttatttcgattgcaatgtgagaagagcacatatgaagtccttgtggttgtaggaaaaccattgtatagatagtggagttcatctgcttatcaacagatatcatagttctttttttagacagtggagttatcttcaatcccactgaaagacaaatctcttgctttcagcttttcaagtgtttgtcaagcaattttgctctaacgttgcactattttcatggcaaatgtgtaacagggagttactaaaataggccatctcattattgttgatatctatactaatataaaaaggaggagttgcatccctccaatcctacatgccaaatcatcccaactcatctcatccatccattcaccaggtaaaataatcttatccattaatccgctgaaatctttcactgaatccatcttgggcgacctcgcgctatccacgcccgcaccaccgctctttccacgtgcccgacctgattactctgcccccctttccccgcgctatgccaccgccgccgctgtgctactcgctgccgcccctcctctcacgtgttcccccttccgctggactaccgcccgggacccaccgcagccacgcgcgtacgcgctgaccctgccgtgatgcctcaccaccacatcgctgcatcacgtagtcctctcacgataataacgctgccgcctattcctcccggacgacacatcctccaaccactgcgcacatcccccatccgcagtctgccgcacgcctcctctccccggaaatcgcattctcccgttgcaaatcacatcctccagccgcggaatcaccagaaatcgattcctctcgcagtctcgcccacggacgacacttctcgcattctctacagccgcggaatcgccggaaatcaactcctcccgccgcggacgacacttcttgcatccttcccagccgtggtggtctgcccttcagctggcggggctgctccatctccgtctccaccgtaatcgatggcccagtgttccccttgggccctccactgctgatgccgccgtcccggacctctctgccgccaatccttccatcctggtccgctctgctgccgacacatccacccttgccgctgccacttctcccagaggaggcgaacaatgaatctgagaagaagtcggtggccttttgtcctttttcctgcgcgacggagaagcaggaaaggtacaagaccggcagctgctataaatccaaaaacctcaacctgtgagttctcttcccagtgtctctctcatcaaaggtacagtagcagcgatagcgtggataaattgagcgagggagattattgtgtacagcttctcattgttgtttgatgtcatgtatagcatgcttttatcattttgattggatgctaatttagtttgccatacttaacgaaacaactcatagttcatatactttttttctctgaacttaataaaggaaacttgaatagaggattagaaggttatgagtgacccgtagttacttgctgttgaaacaagaaattttgctgaagatcacttctcttaataaaggaaacttgagtagtgcttggttggtgtgcagaatgggtaaaatgataaaagctgatttaaacgggaaaatgtctatgactgccttattgggctatctacaccgataactgtgttgcctggttattccacatatggccttcttctccctgggtgaatgtttatagccaactgccacttttgcttggctgacttttcattaccaagacttaaaatgcttccaacgggcaactggtggtgaattgatagaattatggtgatcttttttatcctagctgg

SEQ ID NO: 18030 - DNA, 8740 bp, Oryza sativa
  unsure (1)..(8740): unsure at all n locations
taaatatattgataaactattcatcttaactattgtggtagtagctatctattgtctcttgatgacatggtataaatttatagccagcaacgggctacactattaaacttgctataaatcttctcaatcaaggggataggccttagtaaattcgtgcaaagtctctgtaaccctaaggccttgttgggtttagaggggattgaaaatgattggaggagattgagggggaataattccacaccacaataggtgtggaataaatcccctctaatccctctctcaaagggattacccgaacaaggcctaacccatttttttcctcccggcactccacaaagtggtcaatgtgttgcttcccgacacctccttgaccccgcctattgcatcgccaccaccctggcctcgccggcgggacggataatttgtgtgggggagacgacaagggaggtggtgggtgttttctcttctctctctctcccaccaataatttatataggtaaggggactgtgtagtgtactcattatcatgaaacccctcctaaattcctaatatcttgcaaactttcaactattgaattactttaggcccctttgaattggaggataaatggaggagaggccttagtagattcgtgcaaagtctccataactctacggccttattcggtttagaggggattgaataggattggaggagattgaggggaaataaatccacaccataataggtgtggaataaataccctccaatccctcctcacagggattaacggaacaaggcctaacccattttcttttttcctcctggccactccacaaagtggtcaatgtgttgcttcccgacgccaccttgaccctatcgcgtcaccaccaccctggcctcgccggcggggcggaatacgccaatggcattggcaaggtccccccagccaacctcctctccctccctactccccctctctctttctcctcacagcggcgttggtgaggtgcccccgccacgccgtcggatccaccaccatcggtcgccgcctcctaaccgcacacttgctctacccctgccaccaacaccagtccacaaccctcttccatcccagtggcttcggcaccgcctctagagccttgccgcccgcccaagtccaccaccgcccacggccctccctccaagcccgacaatctccctccttccttctcccgtccccaacccaaccttgggccctaaaccctaattcattggcaagtcatcggtcgtcgaagttggtggagaaggggtcgtaagagcttgaggtgaggtcgccagagcacgaatcatgtagtgaatcctaaggttaaagatttgcaagattttggctacaattttctatcaacaggcatttagcacttctaataatttaattccttcttgagaaaggctatgttgcaatttggtcgttattggatcgggtcgcaaaagcgttgggcctagcggcaatgggctgtcacacgcacccacgcacgagataggctgtggtggtgggccaatagtcctacgtggcacgttgacctagtttttatccaacgtggcactacttatgtggcaacaccgtcaagtaaaaaaaataaaaactccaattggacaacatgtaagtgagatgaacctttcttcttcctctaaaaaggacccacatttcattccctttccactctctctcctctcttctatctttctcacaacaatcacactgacgccactctatggccgtggagctcgagctcttccttgtagtagtccgccgatctgcgcacctcgatgattgctgcttctcccctgcggtagcaagtccacacctcttgagcatcatggtccatcagttcgtgccatcccctcctcatttgtggtcatgcctccctcatcaacatcactactctcggttgcatgggcctgtgaaaggacgatgaatgggccatttagaggcaatggtagaagggcgactccatctccaccttccgttgtcgcgacatgctcctgttaatgccaaaatttggtaagattcttagtggatttggtcaaggaaagaggtcaatcaatgatggaagtttatctagaaaagaccaagttcaataaggaatcatgaagaccatggcatgacagtttaattctatctattaattaggcaagatttaatagttttccttttatcttgaggaagtgtttatctagtgtccaatcggatcaggacttgtatatttccttttttatctttagaaagttttgtctagtttccgatatggactactacccacccatgggtataaatatgtacacctggggtccctgttatatatctccacagatcaatacaactactctcggtgcatcgccaccctcttttctgatatttttatttatcaccggcggaacttggcatctgacgcggggctgcatcagcttcgatctccggcgaaggggtaagccctacattccgtcggccctggaaattatatcgactacattggtcttgttcaaggctgcatcacttcgacctcttggatcactctggtttgattgataaatttggtcgatccgatatttcaactctatcgttaattacattgtgtttattgtgtttagagatgcatcagtttagttgggactgtcttggttaggtatgatcttctgacttagctgatatatctctacaatcacaatggtgctttagatagatttgctatatccatcacattagagagatttatcagctcattgattattagattattatttacaatctcgtgctgcatcggttaggttcattctaatgttttatcggagtgctatcctataaaattatctttacattggacttcggctaatgcatattttaatcatcgagcctacattcaacattctatttcaatatcggccgattggttcattggatatttacttcgtcatattatcatcagccgattggattgattgctcaagttcttccatcatatttatataatcatttatccaagtgtcaaaatctatatccgacatacaagcgatagttcaaaaccctattgacatcagctagtatcattacatgggcttgttagccgatcgactctttgatcattaatttatatatcttgtcagtgcaggaccaaactgactggcacgccggcatctcatcaaaatttaggacctacgctcgagtgttgatttaaaaacacggtggcctgggagatctgcttaactccggtgcaggtccaaggctagcctcgagtgtatcaagggcgtgccagctgatttgatcctgcgatcagcaagaaagacaaaagcagaattagtcagccgatagccgatcgaccgataggccaatagcgtatcgttggtggtctcatccgatgtagttagaccacatcggctatggattgggtagatgagtgaatattaaaccctaatttgcctcatcgactgtaatactgtctatcaggtttagtaaagaagtttaagacaatattattaaaatatccgatgtgacagtatttagagcgaaaaagataatgtactagataatactctagtacagacttgtatacacaaatcaatctatatcaatatatcaaactgtgatcagttagtagtttagatagcccagccgataccgatctagcttgatataactatatgaagtgatccgtctatataagtggcaaatatacataaaactttagtaaaaaagcatatatactaggtaagatcggttgaaacttcgatgctatccttaattataattgtttccaggttagtttctagggttcaataaaagactagggatgatgcattacaaagtagataaagaaagctagagtctaaacaatcaagtaaacaatcacatttcaggatggtagatgccttaactaatctaatctagtcggaagatttagctgataccggcaagaaccctatagcgagaaccaaccgatagaggtaaatctagatactaagactagattagctaagacatatgatagcagatgaccatgataaaaggactaaaatatctaaagcgacataatagccatgatagcacaagccatcgagacatgttacctcttgcgaagcgaactcgtcgaaaagtaaaaacgaaaagggtggcgatgtgctaaagttgtattgaattgtctcacgtatttcaatgctagggggttcatatttatacctcgagtacaaacttagtccattacggacacgactcaaacctttctaaagataaaatacaaacaagaccatatatggcggtctcttgccaaaaccgacataactaatctaattaatagatgcaattgccttaatagagctctatctctaattggcaatgacgattatctcaatctaggcccatgccaactacacttcaatatacaacttccgtcgcatggccaacggtagttttagttttgacgacttcttgtttgcgagtttgggcatcattggtttcgatctcaggcgagaaagtaagtttctcaactccgcttgtatcagcaaaatttttactttctcagttaagtccgatatactagtgaagcttttactcgtgttgcctatctgacatattagctcattcttagatcgctttgttctcttgattagattcaatatatcaatcactctgaatattaccaatcgactagtttaaatctatcaagtttactattaatcttgaactttcttggttaagttcattcttctaggttataatttgctagttagatttactcaagtcaataagttttaatcattgtttcaatagagttttagccgatgagctatttgcttatcataatttaacttgctatatcggctaatttgtaagatttagcataatcagctagttgttgttcttattatcttcagtcttatactgtctcagttgagtctgatccatgaaaattgtggttgataattatagattgctaagtgattttttttaacttgctttagccgatgttagttgttttctccatatagagtaatggtaagttccaaataactcttggtacatcagcctatatccaaaagatatataattgttcagattctactttattactttcaatcttatattgtctcagtttggtatgatctatcaagattggttgtaatgaagttagaagatttacaaatatattatatcaaagtttcgaccgatgtttaatcttttgatatctaaattccattggttatagctgattgatccaaatttccatcggcatcagctgggcacatgatactttatcggccctgtgaccgattggccccacgatctattttttttttcatatctagttgtaggatcaaactaactggcacgtcttgaaaccgatttgataggacttgcattagagctcagnncaaatctctaaggccccttcgntgtgtgcgacgaattttgcgtcaacactatatttagtgagtttgttggttctacgggctgatttgatggtttccatctattccaagactctctataagtctacaaatatctcatatacatggatttaattgttcccaaataaaagttttaaagataagaaggtttcgatagactagatagtcctacggaaaaacggttgtggatttcgtatacgggcttcgttttgaacgtgagtacttgttggaaagctaatttgatggcccacatcaagtttctggtcccaccttcagatttctcatgagtttatctgcaatctaccaaatcagtcgatgaatgctgctgcagaagtttatttttcatgtccaaattatgtaacgcatttttgacaatcttttttacaatcatgaaattatgttgattctcttcttcatcaacaaatttagcaatcttttaactttttgcggaactcaacccgatcacaccaactcatggaaataattattcataacaaccagttgtaacacaaaaactattagcacattctaggataattgatctttcaacttcccttacaaggcaactctagagcatagatctttcaaatactaacattttctaaaataatttcatcattatttggctcaagaaagtagtgcctcattctctccggcaaccagcttgacgatgattgcggccttaccctcactgacacaacatctagaaggagtcaacgttgtacctagtgctctgccctgcaaaagtgcaagaaaaagatgtcatcatcggcctagagtcagtatcggcttcagagtcatggaatcggccgatgggaattatcaagtcgccaacagtcggattcttagtagattcggttatggaaattaatttactaaaggaagtttatccataagtgaccgagttcaaggaggatgtggcatgacagtttatctattaattatgaatagtctgtttgtttccttttaattatagggaagtgtgtttagtgtccgataaggactttgtgttttccttttatctttattaaagtttatttcttgtccaacaaggactagtatctacccatgggtataaatatgtacaccctgggtcattgtaatctatctctcaatcaatactactctcgacgcatcgccaccctcttttttgagattttacttatcaaccggcggaatttggcacccaacacggggctgcatcggttcagttcgatctccggcgaaggggtaagtcctacgttccgtcggccctggtaaatctatcggctacattggtgttgttcaaggctgcatcgtttcgatctcttggatcgctctggtttggttgatatatttttctacctgatatcttgattctatctctaattgcattgtgtttagagacgcatcggtttagttgggactatctcggttaggtttgatcttatgtcttagccgatatatctctacaatcacaatgatgttatagatagatttgttatatccatcacattagatagatctatcggttaatcgagtattatataatcccgtgctgcatcgattaggtccgacctactaaattgttgttgataatataaatcttgttaagctgataggttcatgctagtgttttatcgaggtgctagccgataagttatctggacgttgcattggcttacaaacattacatacaagttggatttagccgtttgcaacatgtttatctaaatcgattggattttatgtcgtcggacttttagccgatgtatgctttaaccatcagatcaatacttatcctatcatattattattagccgattggtttctattggattatattattgttatattttattatcatcagccgattgtctttatatcattatttgcattggacatatagccgattgctcaaaactctatcgacattggctaatatcggctatcggttggaattactccatcggtttgtcagccgatcagctgttttatctgctgtttacatatcttgtcagttgcagcatcaaactgactggcacgcccgtatctcatcaacatcttggacctgcactggagctaagcagatctcccaggccagtgtgtgttttttcgcatcaacaccgtgcccaacccgacccactgccatccctattcaccgtcgctgctgctccagcctcctccgaccgagcctcactggcattcccgtcgatgccaagattcgtcatcgcctccgttggattcgcaggagcaaggtgaagaccatccacttgtttgttgccgccgaaaagtgccggaacgccgccgccacctttgacccgacctcgtcgtcgtttgaagctcgctgtccgtcatcgttctgcccctcgatgagttcctcgtgtcatgctcttccttccggtgtgcgctggcggtgggcggcggggggaggagctacgcccgggccggcgagcgtcgaggaaggagctgcgcgcgtcctcctcctcctcctcgaacctgccgccatcgtcgttgtcatccattaccgccccgctctgctctgcgccactggctttgcacgccaccgcctcgccagccttctccgcccgtcaacgctgctccgcctcgccgtcgccccactttgcctgctgccgtgctcgaggtcgtcctcttcgatctgtccatgctcccaccgccgcctccctccctttctctcgtgtcgtcgccaccgcatcgccggccggccatcggacctcctctccactgccgaccaacctgcccagggagatgagtgagagagaggaggaggaggaagggagaggaggggaaagagagaccttgatgacgtggcgtcctgacatgtggggtccacgtgtgtcccatgcttactcacccaccacgtcggataaaaccggggtcaaaactaccgaaggacgtaaagtgaacggttttgtaagttaagggatgtcaaaaccggggtcaaaaccaccttgattttataactcgatgacaagttgagggaccttttgtgtactttttccttttaagtagttggttgtgggtttcagccataaaccgacccattaggatggcctgtaacgaggacaaaatacaaaacagtaaatggcccaccaaacccaatccgtgcagaggagcgctacccacgagctcgtgctctcacgcgggatgttgacgcgtgtccgatcggatgaaccaaatttatataaaacagtgcaagcgagttctcaaaagaaaaaaaaggtgcaagcggcatgggcctccattacaacaggcccacctattatctaaaggcccaagttaccacaggcgatcggtacatttcccgccaattcccca

SEQ ID NO: 18031 - DNA, 2093 bp, Oryza sativa
caatttggctatcgtttggtgcgcgcgcgcgtgcgtgcagtgcagtcgtcgattcttgaccgggacgcggtgcggcgcgtggtggcgctgctcgtcgaggcggacgaggcggtggatgcggcgtctccggcggccaccagcgcgcgctcggcgctgcgggtggtggattcgttcgtcgtgccaaggttccactacgatccgatcaagaaagtcttctacgagtacgtagatgccgcttcttcctttccttgtacatcctcttgagaatttcgctatttccttttcccgctttggtgttgaactgtggttagaattgctacattgacgaaattgagttctaagtctggctaaatcttcaatgattcaacaaagaatttatgtagggcatagattccaaaatgatgctactgattttcttttaaaataattaaacctcatttctgtgtgaagagaaaacttgttagatgtatagtattttttttttgtttggattcagtatattgtgcttcactagatgagattgttagcttcttaatgagtattgaactattgatttggttttggaaaaaaaatcaaatgacttgattttatgtgacaattaaagatttgccactccaatgagatgcagttgagactactgtatgtatggctaggttaacatgtcgcctgctccatcctcatgccaataagacatttagcggcaatatttgcagtggcaactcttgttagatatggaagtaacttctggcctactgcaccatggatgcacacatctactccctccgtcccaaaatatagcaacttttggctatgaatctggacacacagttgttcagattcaaaacgcttatattttgggactgagggagtatttaattatgagcatcattgattacacatagattctcttgatgctaggactaatgagcttaaagactgtcctattatttctaaccaagactgaattataagttataatgagttaacagccctgaaatatgctattatataggcataccagcagattagccatacatggagaagctggagataaagcagccctgtacagggacaggtatcaggttctgcttcagaggctagctcgtgatatatacttctctaagccagcttttgacactgttatgaccgaagatgataattgtgaggtatttttttttgtttcatgtcatgattttcacaaaatattcttagttcttgtatgtgaaattacttacacacttttttacatgtagataacttctattcagtccctaattgggtgcactggtcggagatggattatgggggtcatatcacagttggaggaacgtcaattctacttggaggatcttactggagctgtgccaattgacttatcgaatgctatatcctgagagcccattatttgtcatattgtagtatgatttatctaaaaattgaatagtttctttagctacctatgaaatatatataacaacaaaaggtctgctcaaatttgagtgataacatatcattaattcaggattcatgtttgacactaaaatttaatttgatccatatcaatctcttgcttactcagaaaagtgttatgctttccttagcacaaaacacaaaatcacttcaggtttcttcgttgaaaatactgtaattgtagcagaaggggaattgctttcaaatggcattttccaggtctgtaattcttatcaacaagaatgtgttcagctcttgtattgttgtgttcaatctgattttattcctatcatctgcaggtaaatacatgtggattccctcctttagaggatagagaagcatcactttcgatgcttatggggctagatttcttcggtggaggtgtcataccaactgaagaaacagtaagttcaaatatttctgttccgcatgtaatctgacttttcaaaataacctttactgattaattttatcaatggaaatatcaaacaggtaaggctatcaaccttagagaagaaggccatgaatgatatgtttgttatactttcagatgtttggcttgacaattatgaggtatcttcatttgtactaggccctatttcaaataaccattattattgggg

SEQ ID NO: 18032 - DNA, 1388 bp, Oryza sativa
actaagctgttggtaacctgtagttattttgacgactcacagaacccccttattattgttctgagagctatccacacaatatcatgatcatgatgcacactagtaatagcttcatgttaaattgaagaggctataatcaccatacctgtactagtctactgatgtgtattaacagatttttggtcggtggcatgatgcatgatgcgcacattctacttttttgtactaggcattatcttcctcattttatcaatttttttctgaacttatctgattctatctttagtgattccactgtcatttcagtcaatcttggaaaaagcttcatatactcactacccactgagactaccatatagtgatagattggcagagaagagcttgtctaagctatgccattaacctttttgagttgtcatgattaagaaaacacttaagtttgcagattgttcaattattatctgttctatctccagtaaataaaactgtaattatccagggtgaagttttatacacaagaaattgtatttttccggcaagacctcctttataggatgcggcggtcttgtctgattcccccaacaacagaagaaacaagtgaccctttcgagcatgtatgttaaatacccctcctttgttgttatttcaataagcatatattgttcaaagaattaacacatcattttcttttcagctggtagcaaccatcacccatcagagtcatctttgcccattgcctcttacagttcagccaatcatatggagctacgatcattgccttcgactctatcctactcctcatacggtatgcaatttaggacataagcctattcaggaccttgaaatgtgctctaaatttgttgcgatgaatgtgctgttgtgctcatttaattgcttgaccgtgcatgtgtgattactttcttttgtataactattacaattcatcactataaacaaaagttttggacgttctttgctgattttcttcctgaaaaacttcttcagatagtactgggcgacaagagcgaccagaaggccttcaaatacacaggaataacttgcttcaaccctggttcttttgctaacgatagcacctttgcagcttaccgtccttgcactaaggaggttgagctttctgcattagaaagctaatattaaagagatcaaaatgaggctcaccaatttggccaatttggtagcctgtaccatccaaactagcattctccaaatcttcgatgaactgcctatcgccttggacatcagcctgatatttatgacttggacatacaagttaaggtggaggccattttcatgcaagctaattcgaggagatgacataacatgcatgacgccatggttggtgtttctctcaagcaaactgatgctga

SEQ ID NO: 18033 - DNA, 1614 bp, Oryza sativa
cagttttagcttacaagcagtttgtcgcccagctgtttgcggtagacctgaatgagacccgcgctgtcaatcgtctgcagcttctccttcagtatcttcctgtagcgatcgtctttgtcgtccaagcttctcatcagttcgatctgataagacggaatgtgtcaaggatatgtataagaatttgcgggaaatgaagagcatttcaacagttatcattgtgaatatatagagcttgtgattacctgtctctggaatgcttcgaattcatcggagctcaaggagccatcgctgtttgcgtcgagaagatgcatgagctccttagcatctttgcccccagcaccaaggtcttccatcacctctgtgagctcctcaatactgatccttccatcaccgtttttatcaagctggcagaaagcacggttcgtgcagttgctgtctccttgatcactagctgggaggtcacgaagacgcatagctgctaactctgctgcagccaacatgatagccttcagccttttagcctgtagaaaagaatttcaatgaatgatcattccaagtcatctagaaataatttgtctataactttagtcttttataagtcatagggcaatagattttatttcactgagttcatccaataattttttgccgggtcggccaaaagattcggtcgaccaattggctagagcgtatggctgttaaccataaggtcggaggttcgagctctccttctagcgaagtttttcaaaagttcatccaataattacaatatgtcattcacaattaatgacatattgtagatatggacgaaatccagtggcggcgtggatttatccaaaagtgatatacaacacaattccagttaaaagggtcaggatcaaataatcaatcatgtatcaactaataacataaaccaggccatctatgttgtaagctctgaagtaattagtaataggctactgactatttttaagtaaaaaggctctgtacagagtacagactatatgtcctgtatgttagtcagttagttcaaacatattatgcactaattatactgtgaagacatttgttgatatttttcaacttatttgagtaaaaacacttatcttactaatataaggggagctacctgcagtaatttgctaaagcaaagaatatgtgctctgttgtattgcaaaaggacagagtgatgacaatgaggaaactcacctctccaggatctgtaagtccacctttgtagagagagtgagatgcctctccaccaacagcaaatttatgcatctccttggttcgtatctgtatctccatcagtggcctcatcttcccaggttcacttacatcgatggccacatgcaagctctggtaaccattttcttttggccgtgtgacataattttttgtccttcctggaacttctttccacatagcttgaatgatttcatgtgtcctgtgacaagccctagggccccagtctaacgagctgccatcacaccgaggttctaagattacccttaaagctagtatgtcatttacttcttctggttttctgccatcttttactagctttttcatagtactgaaacggcttttataccgcccttgaattgagatgtc

SEQ ID NO: 18034 - DNA, 1932 bp, Oryza sativa
ccagcttcactttgggcttggagtactcaccactcatcgcgagcttagccgcgaggccactgccaaaatcagtgaagtgcacaccatcccagcttagcacctttgatcctggctcgcagagatcatcgcagccaaatttccctggcttgaagttgtatggaggcccaccgttgccgcagcacaccatcaacggccacttgatccctgaacacacaagaatgtgagcgaattcagatgcaatatatgaaactaccataaagttattcatgaatgtgaacacaattatccaaatgttctgaacttttaaagatgggagagtcataccatatttggtgtggttggcgacgaagtcgtacttgatggcaaacatgtcggtgtacacgacggtggcgttcttcagctgcaaccgcatttcgtcgcaaaggtggctcagctttttggtgaactgccgtgcagcttggttgtaattcgccagacagccatgggcgtcgtgctcacccttttctagcaccaccagtgcaggtaggcagccaagggcgccggtgccatgtatccagaacttcctcgcgccgttgtcgtacagaatctgtggatgttggaaacaaccaaagcttctgtcagtgtaactgcttaagagttactactacactcgcaaacggaagtttcagatgctgtattgtagtgtgtaatttacccgaatcgcgtctttgatctcactgacgatcttgctgaattttttgtcccagttatcagatggagtgtgcatcacaccagccacatcgttgtggccgatgtccatcatgtatagagcgttctcgaagccctccttgctcactggccctttctgccctgcaaataaatgcatgatgttttatcatcaatatttccaattttcagctactgtcttctatatttttttcaggtttaaactgtcttcttttttctcgcaattgtaaatgtaacagcacaaacttattcaagcagcaagcagcaaagcaaacctcgttcgaagagctccagggatctgtgcttgaagtacacaaactggtcgacttggacattcaaggaatagggagagacgccgtgtgatactgttgagccagccatagcgaagttgacaccattgctgtagtctgaaccaattgacttcaggtatgggttcagttcacgtgtattcaagctctcacctgaaaacatcatcatcagcgaccgggtagatttaaagggacattaaattactgtgacaacagcagcagcagcagcagtagcagtatttctatgatattgttttaccaccttcaagatccccatattgtgttaagcttcacatttgctaccacaccttactagtcactatatttatctaaacatggtcactacatttatcattttgtggtctaccagtaatatttggaacttatgtaaatatgttaatgttatgttgtcaggcttctggacagctaggtaattaaatcttggcccaaacataacgaaaggttacttataaccaagggctgctaagagtaatatgggcctcatccaaagatattgctcatgtgtccctaccatgtgcacatctcaatcatacatatgcatatatgtgatatcttctatgtctgtacttggggtcacccatggaagttaaagcttgcaactctcatgaccacataacgaaagtacagattctgcctgtcctaatgcaggaacaatgataaatggatttcccaccaaattctcagaagaaaaggggcatgcacagataatacactctttatcccaccaacaaaatgcatgtcatggatgggtctactccatgtgatttacagataatatatacatgatactatgtgagaatcattaactatcacatggtagcatgcatgtgtttggaccatactaatatgtaaattgcttatttcaaatgaagaactg

SEQ ID NO: 18035 - DNA, 4222 bp, Oryza sativa
ccacccatgtcgtgcactgatcacatcgttaatgacaatttcctagtgttgacccagcagctagcacgttacagtcacacaaggtaagagcaaaacaggaatccaaaaaacaaccaactatcatttcagtcaatcaagtgattggagtgcccatctgagcttccatccaatgaccatttggatcagtaatctaacttgggttagatctaagtacaagaaagtgcaagaatcagtctcctcaaggacctgggttgcaatttgcagacacaggtgacagacagggagaactaatactacttcttaagtcgagcagttcacatcaacaacccagacatatccatccaacccggtcacagagaggagcaagtcaaagatacagatcataggtttcctctgtcccaattggcaaaggagaaaaatgcggaaattgttaggcacatgctgctactgcttcggccaccaaactctccccattttttaatcccctcctccagttccacgtcggcggcgaccaaattattcggaatcactcatctcacagcttgctgatttgctagattttgctctaccaacccagattatagcaagatagttactcgaatggtcaacgaatttcagatgaaacagtataatttctagagaaatgggtcgcttggaggggtgaaattcgtggaaatttcacacgtagtagttcaaattctacagtaatcaactaatcatacggcttaagaagcttccaaatcaaatgattttgtacgcgattaaggactgggtttatggctaaatggcagcaaccaacaagaggcgaaatgattaattaatggagagattgattgaactcacagatgaagtcgatgatgacgcggccgtcggagaggcggccggtggggtggtggaagtaggtgcggccctccggcggcatgatccggatcccccccgccgccgccacgccgccggtgtcggagttggagtcgccgaagttgaacagcaccaccccggccgccgccgcctgctcacgctcctcctccgcggccgttgtagccgccactccggctccggcggcggcggcggaggcgtccgctccctctccggcggcggcggtggcggcgacgacggagccgaggttctgcctgacggcggcgcccatggcggacggcgagacgaacgcgagcgagagcaccatgaccgccaccaccaccgccgcgagcacgcagtagtactgcaggcgcaggctgatcaccttgttcccgcctccgcctccgccgttggtggggctcgccatggccatcgcgcgagctcgcctgagctctcgccttcgcggaggaagaagacgacgatggctgagtttctcttctcttctctctcaaaaaaagagcggtgagaaatgtgcgtacgcgtgtatacgcgtatatagtgtgattagtgtgtgacttggggtctcgtgtggttaggtgataattaggagtaattaattactagtagtagtttactaggactaagtgcacccgcaatggtaaagtaaggtgctatctataaaacatgtacacctcaacaatagactagattaatagtaaaccacttcaatggtatgtctacatgggtatctatagctctctaatccattgcctcgtttttctctatagactatctccatgttagtagataactttgctctctctcttcatttaatctcttctaagtaggaaaatatgctgacatggatctcttgtagagagcttatagataaccattgtgggtgccctaatggtgattagcgaatggacatcgagatacttagtacttcatccggttgataatacttgtcgttttggacaagggcacggtctctaaaaaaacaactttgactattattttccataataatatgtattgttaacaaatatatgattttattaaagtactttttaagaataatctatacatgtagtcatcatatttaaaagacaaatattttaaaaatgattcataataaaaattttaaaatttgatctcactcttatctaaaacaacaagtattatcaacccgaagaaagtattagtattatttagttggacatttttgtagttaagacttaagagtggattagttgggttttgaatgagatcacacactccctctcctcacttttttgaacttttcatagtttatagtacaagatacatgtttgttggtgtgtgctccctttgtgtcatattacaaatattgcaagttattttgagtttttcttaagttaaatttctttatgtatttaatgatactaatttggtgttgtaaatgttggtaatttattttttttcttcttatcgaacttggttgagtttgatttgggacaaatccaaaataacttataatatgagatagagggattatatcatttctttttttcctaattactttaaattttacaattgaaaatttacatttttttaatataggaggtgtatgtacatgctaaggtaatttgctagatattttagttaaggactaagatcatgaggttgattaattactgttaggacacaataattggagggagatggtgttgacgcagaggaagtgacggcggtatggcttggatttggacatattttggacattttcaaacttcaggggaagaagagtggacttaacaattgcattaacataatatgaataaacccacatggattatactaatgatgatttacagtgaatccaaaattaaataatggacgtctcagagctgtccttgtgattttttgccaatttaatggaaatttgcagaatcaaacaaaaggaaaaaaatattagtttttctactttcttgtattatacagttgtatagaaagaggttgtggcacaccaatcataactgtagaagtgtatggcatcttatatgacagtgacgtgcattatagcgatgcgtgtatatgaaaccagctgttaaggttgaaaaaaagtttactatcttttggactgatcatgtccggttatgattagcattcagcaggttttaattaagtaaatcaggcaaaaaaaggacctaatcccatttactaactattcaatttacgcttcctaggaacggatgaattttgccttttgtttttttagagatcgaactgattcctgcgagaattctgtagaactcctgtatatcaaaggagccctgcaatctgcaaataaagtacatatgtcaatgattttcttgaacagtatatagcatgagaaccttgtaatcctttagtactagcatggtacaaggaaatatttgttcaatgcaatggcaaagttgtaattttattacactttcatatccattttgcgtttttgctatcaaactgaggaccaacaagatcaaagtaccagagagttcttgcctgaaacgtggccagcttggtacagactccattcagtatacggttaaaacctgaaacttggatgcatctccctttgtttatattttttgtcagtagaggacagcaagttactttttatttgtttggattgtacaatactcttaatgtgtgtttagtttacatcaaatttgaaagtttgattgaaattgaaacgacaaaggttagaaatttttgtgtagaaaagttttgatgtgatggaaaagttagaagtttgaagaaaaagttaggaactaaaacaggccttagttcacttgtattttctattttgggtttgaactgccatactcactgcaaggggagttctgatttaaatttatagattcatctctatttatttatcaaaattaaagaaaagaattatacatagtattaacctgcacgtatcaaccccctaggatatacacacacaccccaagtgtacaaaaaaaataaaattttgaaattcttcatattctgttcttcctcaatgaccgaaaagggcctgaaatcaaatgaattcccttctgttggccagatctgttagtgattcaccttcaccatttcctttgggaaaccaaaataatcttaatttttcataaccgcgaatttttagcctttttgggcctgacaacgctggcggtcagcttgatcctaggaatggaaaattcgccacttatcactttagaagcaacgatctcgtttgcagcatcggtgaagtggaccccatcccagctgatgaacttctcaccaagcttacacaggtccttgtcattggccgtgcagcttttcttcggatcatagttgtaagggggccctccatgtc

SEQ ID NO: 18036 - DNA, 3114 bp, Oryza sativa
caatggctttcctgatttcagcaactatgggaggaagctttcgaagaatttcatcataggacaagtgcaaaacgcccattaaatcattgtgccctatgtccatggtatagagggcattttcaaaccctttgctatcaattggggcatcctcacctggatgacattcaccaaaattaagcaactttgtcactccaaaacaatgcaaataagtcggaaacccaattaattgcgcaaaaaaggaacactttgcttagaacaaaatgtcaccaaattaagatcaaaccgacctctttcgatggactccaagcatctctccttgaaaaatatgaactgatcaagctgcacatcaagcgaaaatgtggtttctcccggtgttgccgtcgagccggcgatggcgaaattcacaccgttgttgtaatccgctcccagtggcctcatgaacgggctgaggtggtgagtgttcaagctctcacctgaaaaacaatgtcatgtcacaccaccacagatcatcaggtagaaagttcagagttttttttttttgagagggaggggggatacgcaaggatagtgtatcgttgcattaagaggaataaagtttttgtacaaccgaaaacagacaaccaaaggtacattctgcaaatggtttgtttgcactttcagttgaaagataaacaagaactggcaaaaagatgggcagcacatgcacaagattccaattgcccttacaaaaggaaaaaacaaaatctaatagtgatttacatctcacttgtgctaaaacaacgaggtggtcctgaagaaacaaggttccatgcttaagaatgcagctgagctgttgagtgagatgcacttgagagctacatgacccggtactgcactggtgacctgtgcatttatttgcagtaaactgaaaggcaacacaccgtgatcgagaggcgaccggtacgtctgtcgcattcggtttactcaactaattcaacttctatttataaggtagtagcaagcataagaacaatatttttttttcaccttgctaaaaaaatctgtgatgcaacagctcttctttttttttctcatttataatctacagctaaattgaaaaggtgggtgagtacacaaagattagtactccatgcttagtagtacagtactaacatggggacgaaaactaaagcgtgactagctcataagttttctctaggacaacaaaaacaccaaggaaaaaaaaacactagtcaatcaagatgtaacctagtggcaagtaatccattcatctacttttgatagttatatttcatcttggcacacagactaaggataagtgattccgcttatcatccatttaaacatgtcactggtcatttctcgtaaacaagcgattcattaatatttatatttctcgatgcccaggtagtcaatcttgtgtggaagaatgaagagttacgcattaaatacaagaaagccattaagatgataagttgttggattgaaatatgtcaattaaaaataaatatttcagatttaaaaatataactattaaaagtagatggagggagtatttaagaagaaaatacgagcgtgcccagaaaaccaacacactcctacgactacgctagtaagtgtgcatctcaatcacaatggaacaggaggaaacaggagggcatgcggatgcatggagaaaagaatgtgtccgtgcagagaattgattgcccacggagtggaagagataccagaatagcgtgttgagctgagcacaatatctctttgaaactcgtggctccactcaggcttcacagaactggaccagagtagtcttttcggcttttcgcaaataccatttgattatcggtgaaatccaactaaattttgtcaaaaaattaaaatatactttgattttgttaacttgacttgggaaacctttcccaatttgacccagaaagtccggttttcgccggtttcgtaaaccccggctcagctagtatatatatatttcaatgaagtgaatgaacaactctagctagcatcactggaacggtagttgagcgagaatggcgggagttattaatgtcatggaagagcctgaaactggtggcaactggcaagtagaagtagttctagcgttcttgccttctcggcatgtggcacaggcaattaattcctctccatttagagagagagagagagagagagagagagagagaggagggagattttcttctgggaattatgggaatattaggcagaagagatcagacagaatgaaggcatcatattgatgatatggtgtgaatggtggaatcagtgaccacactggaagtgtcggaccatctagtagtactagtataggagacgacagagaaagttaggttcaagtaacagtgtaacacgctttccttcctccttcagtttccttttgctgatccgtgacagcttcctaatgcagaatgctggaggaattcatcgtgataaaagatagggtgtgtttcgttcacgctaaaattggaagtttggttgaaattggaacgatgtgacgaaaaagttggaagtttgtgtgtgtaggaaagttttaatgtgatggaaaagttagaagtttgaaaaaaaatttggaactaaacaaggccatagtactagtacaaagaagaagaagtctttttttacgaaattcatgcgttccaaacaaatcaccaatctaccatgaaagaacttgaattctgaactacaaggaacctttgacaatcacaagtgaatatatcaaacttcaccaagcagaggtaaagccatatcgtttcacttatacttatacttataaaaatttaaagtttgaataattttagagttgttgttttttcatcatagtttattttacaacatttacttttaaatcgctaaatatatatatataaaagttttacatacaaattattttttaattattaacaagccgtatagataagcataactgtaagcgatacaatgggctggtaccaccactatacattatgtaactgtcgcttgtgccttacgattgaagaagctattccctccgtcccaaaaaaaaaaaagacaaaccctggtttccgtgtccaatgtttgaccgtccgtttatttgaaaaaatt

SEQ ID NO: 18037 - DNA, 5206 bp, Oryza sativa
aggaaatgtcagtatgaggttctggtctcaaggtgccaacgacttgaaacttgaaagaatggcacatttgccatgtgcaggatataaacaaagaggagtagtaggtgagagaccgtgagagagaccctcgttgaaggtgcaaaggtgctctttacgacttgatcttgccttgctgttcttgcattggaagtacacaaaaactactccaaaccagtacactccgtactcgccattggcaagctaaatactaccagaccattcgactaaaaagaagataaaaaagaaagaaaatgggtacagtaacttattttttttactatctcatctgttgcctaaaaagaataaactgaactaaaaaactttaacttttaagttgattttaaaatattttaaacttttttcaacattaaattttaaataattaaaaacatatataaaaattttacttataaaatattttttatctgttaataaatcattattgtttataatcagctgttaagcaaccgtgagacaaccattcactgtccattcaagtagtcaatttgctgcgaaagggtatatagtctaatggttataagagcctcaatagtattttaggtcctagattcaactctttatgggagcgaatttttcaggatttaatagtattatgctttcagtggtaggtgacgtacccgttgtgtgttgtgttgtactgtataatcttttttaaaaaatagtcaacttgccactttggcagagtttattattattttttactgcagggtaagaaccccaagaggcaagtaggcaaccgcaaccagccaaccacaggagttaggacaggagacatgctcccaaagaggcaaagatagcaaggaccgggtcgcacaattttgacggctgccacgtgtcagcaacaccaccccgcgcgtgccgcgtgccaggagcgggaagacgagctgtccgcgtcgtgcgatccagcgttgctctctccatcccaaccgttaattaatcaacacacctgccttttctttcattctctcttcttttcctttccttagacaaaactccaaatccattccaaaaacttttttcttaaaaaatggcaaacctaccgtgacattggaccattttgcaaaagaacaaataaaataaaataaaatgattttcactccccttttttccctgaggggtggttgtcacgttctgatcaagcatccaggttccaagctggaacctggagaaaaaaaaatagggacgtcctaccatgcgagtgaaccaaacaaagatgtacaaagacctgcgtgatggtgatgctgcagttgttgcggttggtacaaaatttgaagaatttttttcaaagtttgtacgtaccaatacgacccatagtcaacactctaacaaaatgagccagtacccaatcctaaattcagtcggttgtgcctttcgagtcgttcatttttgggcccaaaatattgagaataaaacgagactataccgaccaagtattcaatatccttctttggatagggtttttcacgtaaattggttcaatctcaataaatttcttcaaacttccatcgttcatttttttttctagaataaaatatcagaatttccccgtaatttgtttcagttctaaacttctaataccaaacattttacatcctgtattttttaaaaccgaacaaattataaagggttaattagatatatgccattaaaaatttgccggatttgaaatatgccatcagtattcgcgtatttggaaccataccattgcaattttacacatattcaagatatgccactaccaatcatttatgaaaaaatttggaccaaattacccttctttccttttttttctccccctcctttcttccacagctcagagaactggcggcggcggagcggcggcagcagcgagcggagcaagcggctgcagcggtggagcgagcggcgcggcggcggagcggcggcagcaacgagcggagcaagcggcggcaacggcgagcggcgcgagcggcggcggccgagcgagcggcagcagcgtgcggcgagcggcgcggcgaagcgaccgacggcagcagcgagcggcggcggcggtggcggagcggcagcaacagcgagcagcggcggcggagcgagcggcggtggcggagcggcgagcggcagcgacgtcacagcaacagcgcggcagcgacagcaacagcggcggtgacggcgccagagtagaagcagcggggaaagagctagagatgagagaagagggagagaggtagaagatgagggcattttcgtccaatacatgtaaaatacgtatcttagtggcaccactgagattacaacaaatagcaatggcatcattccaaatacgtaaatattaatggcatattttaaaaccggcaaaattttcatgacatgtatctaattaacccaattataaattatctgactatagctagccgagtactaagaaagtgtggcaacttcaaaaatttatggctatgatctatgcaccaaacaaccgtataaaaaagtttaaactctcctaaaatttgacaaaccaaccgaccacaacctctccaccgatagaggtttaattaaattaaaccatgcttattattaagtaatctaacgatgacaataaaacagagttccaacttccaagccagtcaatatcacgctaagtagaaaaggactaattaaacttaaataaatcccaagccatctaagctcgaacactaataaaaaacagaacgcatacgcatttaaaatccaaattaatctgcacttcgaatcagatttaaaatttgagattaggattgggaggaggaggaggaggaggaggaactcacagatgaagtcgaggatgacgcggccgtcggagaggcggccggtggggtggtggaagtaggcgcggccctccggcgccgcgatgtggatccccatcaccgccgccacgccgccggtgtcggagttggagtcgccgaagttgaacaccaccaccccggccgccgccttcttctccgccgccacctcctcctcctccccgctccacacgtgcttccgcttgcccttgccccgctccaccccgccgccgccgggagcagccgccgccgccgccgcggctgagtctacggtggcggcggaggagcggacggttgcgccgccgccgtcgacggtggggggcgcggtggcgggggcaggcatgtagcggagcgtggcgagcacgacggcggcggcgacgaagcccatcacgcagtagtactgcacacggagaaggcccatcctcttcatcaccccgccgccgccgccgccgcctccgccgccgcagccgttcatcgcgctcgccatcgccgccggcgagcttttccggtggagacgagaagtaattaatccttcggagaaaatggaatggcgatgatgcgtgtggaaccgtgtgttttatatataaacacaggatgcaggcacatgtgtcactagcactttatgcttgggtttcaaacaatgtgtgtgtgtggaggagttggtgtgtttgaaattttattatatgttttctcttgctttttcttgggtggttgtcaattctttagcttttgttttagtactgatgataacaacatacatcaccaataaaataatttttagcacattttatttgttttttcaaaagaaagtcatgatgttaggatttactaaactgtttgcggtaaggatactgccaccctacggtttgacgattactgtgaaaaccaaacggttaccgcgaggtataccgtggttttgtaaaccctgccagatgccaatgttttccttcctataagcccctacgtttaaaaaaatcttgttattggatattaaacatatttaaactctcattactctttttttaaaaagaaaaaaatataagtactaaaaatatattgacatccgttacgttacaaacattaagttttcgttcgtcgtaattcaatcgatcaaagttaaaaataatatcggttagtactaaggctgtgtttagttgatggcaaagtttggattttggttgaaattggagatgatgtgactgaaaagttgtgtgtgtatgacaggttgatgtgatggaaaaggactgaagtttggatctaaacacagcctaacatggtatctgtgatgaaccatagtatatgacgacacatacttgcaccccctgcagggctcacaaaattcttattgaaatgcaaatgcaaatgcacacgcatacatagtatagtacacaacttaaatcatggtaggtggtgacaacatgaacctagctaagctatacacatgcacacacacacgtaaaagtctaccagaatcactttccgttgtcatgccagcatctttaatcatcatccagcttacttatattaacataatcagctgattctagaggcgcaataattaatgacggtgaggggatgattaaattaattagtagtagaaactagtgagaaagcaggtggaaaatgcacataaaggtgatactgctttagttgttgcaagccgtcgtggttgatcgatcagatcgatcgaacgttcgttgatcgtgtggttggtgcaacgttggtttcctatcttggccaaggaaagaaagctgacatcgcatggacctgagcttgttaccggcgagcagcgagcgagcgagcgagcaaccgcaacggcgacgccgcatccgccggcgggtcgggatcgatcgagacgcattccatccatcggtctcggtcgtctcgcctctccagcatatatgcagatttctcggtcggtcgccgcgaaaaatcttgtttgttggtattagtaggtgtgtggctgggctccgcgactttgatatatactcactctgtttcacagtgacgtagctagaatttatagtaaagatggtccatctatatgtaatatgtcaattaaataggtggtccactatataatttttattatattaactagcacatatactatagttttaatcttgatcaaatttttaggtggtccatggaccacagtgccacctagctggctacgccactgctgtttcatatataaaactttctagttttacccaatgtctagattcattaacatctatatgaatatggacaatatttgctagaaaatcttataatataaaacgaagaaaatatgttttttttcccaagcaaacccatcgtaacgtaatgcaacagaaaacggatgcagg

SEQ ID NO: 18038 - DNA, 7943 bp, Oryza sativa
ctacaattaattattagtacaccaaagggagcgcactttaaacaaaaacttaaaaaacactcccaaacatgaagcaaacataaactaataaacgccaacacaagataaagagtacacaattattagatcctatttgtgaacctccatctgaaattaacaaaaagctacatgactgttatctcaagattacggtatgcagactttaaaaacttaatatcttcatcacacgtttgtagttgtgcccagaaccgaagtcaatatgtttccctgaaaagaacctgcatataagatatagatgtcaaaagtcaaaaggaatattaatttaatggagaaattaagtaatgtgacacacttgtgtgcagggcttgtgcgattaaaatatatatgaatttcgtaaaaaatactttagatctaattttcaatttcatgatattaatccgctatacagactacaaaatcattcaactatattttcagaaaaaaaaacattaatgggagatatcgatataatgtcttcgtttggcttcttttttatcacatgcaattctccacgctacagtgaaatatacatttctggccgtccggggcatacaattagtcctaacattttgaagtttaataattagtaattggcgaaacaattcttcaaatgcacctttttttgttgctactaacattttgtataaatacttggggctgaagttacatttatgatttttctatacctcgatctcgtccaaaatttgaaaatatatccatgctcaaaatattaaagtatgacttgaaaccataagtccatatcgaaaacacgtttttttgtgaccgaagcaagtattctaacatggtgacggctactatatataccaaaaaaacaacatgacaaatacgtatgggatccaccgttaattagggtgttagttaaacggcctagctgtcggcgactgtaacagtgggacatcgtacagtactccctccgtaaaaaaaaaaggcaaaccacgggtttgcgtgccaacgtttgactgtccatcttatatgaaatttttttataattagtatttttattgttgttagatgataaaacatgattaatactttatgcgtgacttatctttttaatttttttcataatttttttaaataagatggacggtcaaacattggacacggaaaccagggtttgtctttttttttgggacggagggagtacatacgaagctgcccagcagcagccgccaaatgcacaaaaaaaacactttttcccctttttgaatacgaaaatcaaagaaatgccttggaattaccagtgctatgtactccctccgtcctaaaatataattatttttaaatcataacacggtctccgagatactactttgaccaataatatctataaaaataaaacgttttaaataaaaagagttatatattatgatagtttgtttaatgataaatctagtaacatcaattttacatgattgatctttttttattaatgattaaaattaaaaatgtttgatatattattatgctaaaaatacttatattttaggatattttgggatggaaggattgcctaattaaatcatgcggcaattgcttcaggagcagacaagccaatcaggcagagataccatcatgagattacaaaaggccatttgatcgatgtgccatcatgtacatgcacgaaaaaaaataatgttttatatattaccacatcatggcaatatatggtttggcagtagaaaaaggtgacaggtacgcgcctgaaaatgcaaatatcttcttctaatgatcaaggcccctgcctcagcttagtccaaataaacttactattaacttaccaaacaaatttaaacgagctgttcctttcagatctaccaaacgatgtagtttgtcgatggaaatgagaaccaatttggtagttagtattactttccagtacttaaggagtagttagcaagtggatggagatgatgacatataattgtatatataatggagacatggagttggtagtacggagtactcccttcgtcaaaaaataaatctaaaatttgatatgacacattctgaatctcgggtatgtctagatttgtaacgtggtaacggcacgaagagttgccagctctgaagcaaacaagtcagcagattagactagaaaaattaccagttcgcaagtcttgggtagcgatcgtgccgacgagccagatcacctggcgctctgcgtcggtctcacgtacggccgagatgctcaatcctcagcgtttcagctgagcgcttgtaaaatttgtaatttttttatttctccttcgatatatataaccttctaaaaatttatcaagtataaatatagtatgatagcgtgataacattatagcatgcatgtaattacgattaactttcgttgtaacactattttcatgaagcggacgcttaggaacatatataattccctcgtccgtacacacattatgatttttttattcctggtttgcataaattatgtaaagattataaataagttacattgtaattacatacgagttatgatataattacactataattatacaatacttgcatttgacaaaatgtatagcggaatcgaaagggaaaagtaaaataaaatgagagagaaaaataagaaacaaatatgggaaaattgggaagatatataaaagaagatgaaaatggtaaatacatatatgaatggaataagtctattttgcgtcctttgtatgaggagacagagccctcccttcaggagggactagccgaattcaggaacgagtatgaagagaaaggctacatcgaggctggtgaagactaccacacatacatggctgaggttcaagaatggtcgaagaaatattgggatctttattttaacacttcagagatggaggaggaggaggatgactgactgacttttattttaacactccagaggtggaggaggaggaagatgactgactgactaagcaagtatttatgtcatttagagcctgctcagtatttaggttgctgtgaattctcctactgggaatctaatataatttgctttgtttacatctatttgttttcatgtaagactggtttgttggctactatccatccatctatatcatatttacatgtgatccttgtgtgctagtattacaaaaaaggcttgtgatttttggtgttatgtttgtaacaaggcgcatgtattgatcttgcaagggtggtaacaatcagtgtacgtgacattttgattctggccgttgctctaatgtttactttcaggaattcctttccctgtaaaaaagaggtttttttttcctttcccagaatcctgtaaaaataaggatatatgttccctggattctttcttcagaaatttctagacttactgacaatgacaaatccatttccgtgcgataagtatattcagtaacagtatatatgaaaaaaaaattcctttcgatatttcaggattacctgataaatatttccatatggtatacctgtctttacaaatattccttgtttcttcctttagaggatataagacatgctacgaaaccagaataatctttgggctaattttctcatgggacattgttattgtgagttgtttcatttcattctcgtttatcatatactatagactatagtgcagggatgcactaatttgctagtgaactgtttcagctccaaaataatgagttggagcatgctctctttgccattgtttagagaagtagccaagagttattttgagacctattttttagcacaagaaaatagccctccaataaaatagccttaaattgtttggatccaagggttattttgagagctatttggcgtttaatgtaccttcccacagagagatatagagaaaagaccattttcagcgggccccacccgaaatagccccaattaacaccccttgggtgggatagttttttttttcgaggaaccgacgacaggagtttctcctgtcggaatttatagaagaagagaattggcccagttaataagggaaaccgggcccaaaaacctaacaagcacggttaattaaacgggaaaccgacaaaaacctatacagaaaagaaaaaggaagcaactaatgagacctcacacaagtcgtcgttgccgagcttgccaaaggcaagcagcttcaaacaacaaaatgcacgaggtctccacccaacattctctagtgaagcggaaaccttctgagcgaagccttcaacaagggaaacaacattaagaatgttgtcaacgcccgttcccaaaaggaacccggatttcacctgaagggagagagagccatcatgacgatgcctccaaggaggaaacggcaccgacaagcgtcgaaatcatcagcctaggaaagcactaggcaaggttttcacccgagactctctcaaaaatgctccacctcccaaccctcgtcgtgttgcctggacgtctgttgagggtcatcgttgccgagcttgcaagacaagcagctccgactctgcctcaacggtcaatcacaatgcagctcgaccagagaccacctcacacacaggaacccaactgcagcaaacctacgacgtggccgacgaacagcgagatagaacaccggaaaccaactccacacgccacccctaccacaccaaggagctccccggcaacgactggaagcagcctagcctaagaagggaggagcacctaagaagaggggagcgggcatcgcaccgccagagagcacttggaagaagaacaactggagaagaggagaaccggatctggagggaaaggacggatggagatggaggcgccgtccccgccgccgacaaaccgcagcaggtcggcagccccggccaggtccgcggcagctggcgccggagcagccgtcgacgccgacgaggccgcgccggagaagcccgtcgtcgccgccgcccggcctcgacgtcgggtcgggaccgagggccgctgcccgccgccatttcgctagcccctcatcggctcgccgccgccggtggaagtaccagattcggccaagggagggccggatccgagcacaccacacgctggcctgggctcgtcgccgtcgccgccgcccagcctggtcgtcacatagcacgcgccatcgccgccgcccggcctcgtcgtcgcgcagcttgcgccgacaccgccaccatcccgccagccccttgaaggctcgccgccgccaagtgagggccggatccgagctcaccggcgccggatccggacgtcgttgcgaagccatgctccacctccggtctcgtcggcgccccaaccgcgttgaccaaggagtgagggagatggggagccccgccgccgccgtctttgcagctgcccggctttgccggtggctgctcgggcggcggtgaggcggggggaggaggggaagggtggggcggcggcggatttcgccgcccgcgtcgtccctggggcggagcgaccgagcggaggcaacctaacttgccgttggtgggatagtttttttgggtgggttattttcaaatagccctcaaatagctcacccttttggatctttttggactatttgagggagggctaaaaaatatcccttggatcaaacagggcctttgtgggggtctcccctttatatttggctgcttttacgtggccttagtgtagtatattagtactttagtagaatataataaatctaacaattgatttttatgggtactctataccttctataaacgacctctgaggtattgttgattatgaatacctattttcagggtacatgtgctgctcttccttctccgaacagcagagtagcatatctgtagactgtagtgtactcagcagcttattccatccaaccatactcaataacatgctgttactccatctcaatctttgcatatagttcagtaacatctcagtttttactactaaatgggtccctaatagggataagctggccacaggcctccatttcaatctagtctaataggtttacatttatcatcatcgccccaatgggcacagacacagacgagcatccggacgaatcttcccctcgctttgagttgaaagcagtagagcatcttgaactggccgccttctcccctgtttgaggtttgtgtttaattcctgaaaaaagttggaagtttgaagaaagttgggaatttggaaaaaaaattggaagtttatgtgtgtaggaaagtttttgatgtgatataatgtgatagaaagttgggaatagggggaaactaaacacggccttcttttcattgagcccaacaggaaccgtcaatgaccctactgtgaatgaaccttggcttctactctttggtgttgatagcagcaccggattattagcccttgatgcttgtggctcttttcccaaacgtcctgaggattcttcctttccttttgagttcagcgcatgagagcagcttgaaccagccttcttctccactggtagagtttgtgtttcattcagcacattaggaacaatcaatgaacctactggaattgaaagcatggaaagggaagaaccttacttctgtactcaggagtcttggatgcttttggttcctccaactttgaagaatcttcctctccttttgaattcatagcaggagagcagcttgaaccagccttcttctccactggtagagtttgcattccaacaagcacattaggaacagtcaatgaacctactgacattgaaagcatggaaagggaagaaccttacttctgcacttaggaatccttaatttgttggttcctccaacttcacaaatctactcagatgaggaggtcgatggtttggataatctctgtaagtttggaacatgcttgttccctttcaataaggaacatgccataacattgaacaaggaacataatcaaatagcttctccttctcatcctttgtaaacaacacgaggtaggcacatcttttacgatgtgccacctcacgtggaagcttcctgagaggtcttcacaactctcaaaccaatgctttttatggtagatgggactgaccatttctgcaactccgcggaaataggaatccttacccacctgtaaatcctaattttagaatcataatctaagttttaagacaaaaggttgaacaaatgagatcaagaactcactttcaaaaagagtataattgggcatttgcaattcttttgggcacatatctggtgggcaagtcgaaatgcatcgtcaagagcatgattgccagcagaacaggtccataacatgtcatacctcatggacagatggataacctcctcattatatgcctgaagcacaaaaaagattgcttcctcatacactactgccaagtcagcccagttatactgatgtgtgtatcgcaatggttttggaatctctcctaggattgatcttgctatctgagaataacaaatatttataaataagaaacaatgtaaaaacatgaatatgaacaatgcacaaaattgaaatagaaagttagccagtacctttggaatactagatgattcaccaagactcatgctacaatctgctgtctgtctcttcaaagaatctctatcttgttgcccccctacaagatgtgtgtatctcaatggttttggaatctctcctaggattgaacttgctgcctgagaaacaaatatttataaataagaaacaatgtaaaaacaagaatatgaacaatgcacaaaattgaaatagaaagttaggaagtacatgtggagcgttagacgattcaccaagactcatgctacgatatgttgtctgtctcttcaaagaatctctatcttgttggccccctacaagcattgcaccatcctggaacatcttcagtgagtttacattggatcggacatactgagtatgtgtcatgccacaccgttcaggtggttggtttgttgccgtggctgctgatgtttgccattgccttg

SEQ ID NO: 18039 - DNA, 19028 bp, Oryza sativa
ctccacttttcccgggctctaaaccgtgccttctcccggaagctaagcaacaaccggttctcgagtggaacccggcgccgcctcccgcctgacacgggggacagccctgtcattccctcataaatgaatgatgacttgcgacagcccttcctcgagtgacgcttggatgtgacgggtcatacccacccccactccaccgggaacaagggcgacgtgaggacatgattgccctttccatcggatgcgacggtgacaggccggtcacagaccggtcacattcgatggacaggggttagctaggcgcgccgcatgtctgcccttaccgtattaaatgcggtgagggacagttggggcgtcgcatatttatggctgttcagccagtgctcccctctcgctctctccctctgccgcgtggcagccgggtgaggtcctcggggcgaagccgcgggagagcccgagggggtgacgtcatgccccccctggccgcttccacgactcgcgtgacgcgtgagtggggccatcttgcaaagtcgcgtggccggaggaaaagtaattcccctctacttcacataccccgggcccatatctccgacagtcttacattgtgaaacagaaggaatattagttaattagtcagtggttacgctatatagatgtaatgccaatatgccattaagtggccagcagtgcataatgcatttatttttaaggaaaatcagtgatagagataatgtacaaacacatcagcaacaaagaaaaagacagattgaacaaggactagctcggtcttgcatacatttgggatcgttcgaggaacacattggtgaagagtacttcttgtattccgtgtgcatgtttttttaaactactaattgataatatttattagaaatgtataaaaacaagtttatttaaaaaattatattaattcatttaattattttcaagtttaatctaaataacacttactatatcatccgctaacggctcacatctttctagttaaattgtctttcttcttctttcccttaccagaaatataagggagggggataaatctatttatataggtatattgttctttcgtccgttctttttaagttgtattttttttcacacgcggtagggatttattttttatatggctggtttttcgccctagcgtcgtcgccacgtcgatctgcatccccatgcgttccctcctccaattgattgtaaaaatcgattcccactattctctcattattttcccatgatatttccaatcaattaagctttaatttaccggatataatcttcatttaaaagtcatcatttttatcccgagtttatggttttgctccgattttgataaaaacggtaagaggaaatcgagcgtatcaaaagcgctcaaccaattttagaaaatcgagaaatattcgatcggatttaatggggacgataggttccaacattgtacggagagagattgtctccgtagattgaagatgacattcggctatacaaggtggtcctacagcttcacttatgggctacgtcaaagagaggcaggccaagcagatgtatgtaggctaggctaagcagatgtatgtaggttaggctaggactgaaaagaaaggacgaaatgtgcttttggctcaaaacaacgagtataatgtatgcgatccaaaaaaaatacttttattgtttgcaacgcacgagtatttttttagtacagtgataaaatgcaattgtgcaaacaaccgttcctaatttgacacgtgatgatcctgctacgtggattatggtaatattatctcaactagacattgttgttcatgagctctcatcacatggattaatacaaagtggagtcgaacactaacgtgctgcatgcatgaaaaatgaaaaatgcatcgactaaccaccagtgcacaagcatcattatggtgtacatgttcctccgttattttgacattttgaccattttaaagaacttatttgaagaatagaccttaaaaaaacgtcaacaaaaaagagactgcaatctcatcgtcatcttcctggcgctgataaggattccacgtggacacgggatgccatgtcagcagaccgcaagtgctgtataaaatcttatgtgcttcccttatcatcagtggttgagtagcatccaatctaacccaaagttgtaggttcgactcccggccctttgcccacattttcttttttgcttttttctcaccaatgagcatacttcaaacaaattataatactttcattctttttccacattattattttccaaaaatatgctccaacggtacattcaaaatatgtagtacctccaatttttttttcttatagtattatttcccttttttttgacagtattgtttccaaaatatttctttttaaaagcaccggaatcaaattcaaatatatttcactgcaagaattcgatttgcttctaaaactgactcctaccgcttggggaacagtgccggaagaaaagaataaaaggacggtaaacctgggaaaaaaggtaccggaagaaaaggacggttaaaaatgacaaaaaagagagagagagagaagtgaatccggattacttaggcggtaccagttttcatcaacgacggatgtaaatggaacggtccagatcagtggggcgtactgtttatagcactgtagcatagaatactgtttgtacggtcgctgtatcactagatctgagtaattgatcactgaaatggacggctgaaattgcttgcagttcttaagtcgcagtcacagctataactgcaactgatctgaatccgagaaaagtatagcctgctacctcagcgtgcaagcacagaggccacacgccaacactacaacaacattggttggtgctgctaggctccgttcgttccgggcgatctgggggactgagggagaaatgcatctcgtttttcgcgcgcacgcttcccaaactattaaacggtaagtttttttaaaaaaaaaaaattataggaaagttgctttaaaaaatcatattaatccatttttaaagtttgaaatagttaatactcaattaatcatgtgctaatggctcacctcgttttgcgtatcttctcaatccccttcttctcaaacacacaaaagtagcaacatccgaacaacattgaaattactttatattttcagcgatcaggcttttctcaaaatatatcaacttctccaccaataattatctttccaaccaatcataacttttcactattcactttttctacctacctccacttctcaaccaatcacaacctctccctatttaatgctactattttttaataacagtgtccaactataaaacttcttatagtttaggatagatgtagtagtatttagtatcaaacttatggggtgtttagatccaggggtgtaaagttttggcgtgtcacattagatattatatagggtgtcacatggggtgttcggacactaataataaaactaaatacaaaatccgtcagtaaaccgcaagacgaatttattaagcctaattaatccgtcattagcaaatatttactgtagcaccacattgtcaaattatggagcaattaggctcaaaagattcatctcgcaaattagtcacaatctatgcaattagttattttttaacctatatttaatactctatacaggtgttcaaacgttcgatgtgtcagggtgtaaaatttctgcgtgtgatctaaacatgaccttagaatttacaagacattggtgcaaaaacatatgtgtgccgtcagcccgtcacgtccatgggctggcctaagcgtttaacttgggaaaaagtatattttgactccctcaacaatcgcccgagtatgattctatgtcctccaactataaaaccggatatatcaactcctctaactgtcaaaaccaatgcaaacaatgtcccttgacggttttagaggtggttttggctgacgtggcgcctacatggtgttcttgactgagcctttgtcctacgtggcgtttacgtgggcattagaataaaaaataaaattaaaaaaaaatgtgggacccatatgtcattcacaaaaaaaaaattccaccgcatttctcagcctcctgttcacgcgaacccatggcggccaagctctcgttgctcatgctcctcgtcctcgtcctcccggcttccggcgatgacgccgcggcgcgttcaacgtgacggagatcctcgggcggttcccggagttcggcctgtgttcagctacctgatcagaaagacgcacgtcgaccgcgacatcaacagccgcaacacggtgaccgtgctagtggacaactccgccgtggactgactcctccgctgcagccgccaggctgccgcgggcggcgctcgtcgagctcctctccgtccacgtcgtgctcgactacatcgacgccgcgaagatcgccgcgctgccgcgggggaggcccaccgtgtcgacaaccctgttccagaccaccgggaacatgtgccgccgcaccgggtttgtcgccatcacccccgacggccaagggtggcgctgtcttcgcctccgccgcgctctccgcgctggtgaacgccacgctcaagagggtggtcgccgcggtgccgtacaacatcttcgtgctccagatcagcaacttcgtcgtgccgccgagtgtactcacgaggccacggccggcgctcccctctgccgccgccgctccagagagagacgagggatagagaggagaggaggaagggagagggaggatgacatgtgggtcccacaatatatatttttaataacatatgggtctcacatattttttttatttttattctaatgccacgtaagtgccacgtaggacaaagactcggttaagaatgccatgtaggcgtcacgtcagccaaaaccacctctaaaaccactaaaggatattatttgcaccggtttttgatagttgaaggagtcgatatacccggtttcgtggttggaggatataaatcatactcgggtgatagttgagggagtcaaagtatactttttcctttaacttgggtcagaaaagacacatagcccctagagagaatggcccatctaagaaataaggatatgggccaacctgagaggaacctaggccccctaaaatacagcccaatttagatgacaacgacccaccagcagatataatagccgtcgtgcacaccatctaagaaagaaaacttaaggggaaatgttcacttaggtacttcgtgtataagttaagtttcattcacgtccctcaacagtaaaaccggacataatgtgtcccttaagttttaaaaccggtgtaaattaagtccctcaaaagttttagacaacaattccatcctatgtgacatccacgtggtgtgttgacctaatcttcatgtgatctgatctttatttttacaacttataaatgtgcttttctttctcaaagttataggttggggtaaagattgtgctttgtggattagataaagatgtcacatgaagtcggctttatgtaggctacgatgctatatgcgtctgcactccatcgtctcatgttggagctttgtacgatacaatgtgctgacgactcaatctttatgtgagcatgaagctttatcatatatacttctattgactctttcagtataacgacatgggttgaattactcaacaatgcttatttatgttaggactcaatccacatatcacatacatagtaggtcatcatgtaaagttgtcctttgtccattgcacactagagttctaagggcatttacattgctatgcgatggataatgcatggcctcacaatttcatcgcaatgtcacgtcggacagtttatataaaagtttctgcatgaagcacattgttagtagtttgaaaaacatgctaacgggaattaaggagtagccaagttcaattagctctttagaatagacccttcttcgacacagatcaaggcgagcggctagggcgctgcctagcagtgtcctagcaggagctcatgcctcatggagaaggcaacaaataacaaaagatgtaaaacttggtgtctcttttctttctctaagcctcttctttacgggctctagctcctacttcctccgttttacaatgtaagactttctagcattacccacatttatatagataatgctaaaaaatctttaataagtcttacattatgaaacggggggtacttggctttacttcttcattactccataaacttataaaaccgttctatttatcagcttcctcttcctcaaatcttataatttgtacttaaaaacaactgctatttgtactaagaaaagtggatttctaataacattgtatgatctatcatattcataagattagttactataaatgtcaaaactcaattatcactaagtgggtgacgaccataacatatataaagggggtatattcattcttctcctttctcgttattccttttgcctatggtctctcattctcttagataaggggaaatcctcatgccacttaagctatggccgggggctaagggcctgtttggggtagctttagattctgagaagcagctgtttggtagccagtttctgagaatctggaaaagctctgaaactcagcttctccagcttctggcttcttagtttatttttcagaatctgtaactacatattctcagaagctgtggactgttaagggcagcttctagcagaagcagcttttgggaaaaacttttgggaaaagccgcagttgggacaagctctcccaaacagggctaagactaatttaggtccatatttaaaatatgattttttttgtcaatcgagataagtcaatttaaatcactcagggcatctttaaaatacgatgtactactccgttctataaaaaaacccaatcctaactacgaatctagatatatgtgtgtccagatttgttgttaggattgtttttttttaacggagggataatatacaacattatgaattttcttatcaatagttagcatgtgaattgggttagttccttcatacggagtactatatcgcaattgtgagtttgtgaatgaatgcacatgcacggttacaccgtatctgtcctcgtatgcgcatacgtattccgtagacgctcccgtcggggtcgaattcggtattcgtacccaaactcttcgtatttacatttctgccattctctcctctcctttgtcctttcttgcgcagaaggccagagagacaagcagaggagaaaaaaaaaagaaaaagaaaaaaagaaaaaaaaaacatagcgaagaggagcccgcgagatggcgatggcgagcttggcgaggaggcgcgcggcggaggcggcgctgctgcggcgggcgccggcggcggcgtgggcgtccgcgtggagggggtacgcggcggcggcggcgggggaggagagcgacgtcgtggtgatcggcggcgggccgggcgggtacgtggccgccatcaaggcggcgcagctagggctcaagaccacctgcatcgagaagaggggaacgctcgggggcacctgcctcaacgtcggctgcatcccctccaaggtatcgccccctccctcccgccccgtctccgcgccgcgatctgggatggatggctgcgcgttccccgctgttagctctcggagagctcgtagatccgtgcgaattcgtacgacgaatttgggcgttagggtttgcgttgcgcgggtgtttaggatgtagttgtttgatacgtttcggggtttgcaaaattttgatttatccatgtgaatgtcagagaattgggacctgctcaacaagctatttggggggtgtggtgatgtgaattttaatatggcccccatcggttgggcatatatgcgaattatacgccttacagcgtattagcaaaagaataatgttttgtgggtaaaactatagatatgagatatgtttttagcgatttaaaagctaatgctgaaaaataaacttcgatgaaaaaactttaaaattaagccttaatattcaaattcttggcagcggctgatttcttataatgaaaacgatgggggcctatggttcctgctcttcatgccagattgtcagttcagtgatgcgaattttgagtcttcaagttgtgctaggaatttggaacccgctgataatgttatcagtgctatttgcagctgggttttatattgaattgtctgaaatgtgtggattagttacagtcagttccttttcttctttgctattattggttaggaggtgatgaatcatttcgacccattctatttagctgtgccatcgatttattatgaattacgaagcacaatgggggtaatatgatgccgtaggcctgagtttttatcagtgggtcaactttctgatatcttttagagaaaattgcgaatatcattgccattttatagataagagctttgagtaatctgaggttggtaatctcattgtttgctctacacttgttctgctagtgtgcataaatttgcacctgtcttcattagctagtcatcattgagcatgtagttggaggtttcattattagatctttattgctttagttctgaggtccatggttggggccaggtctgtcatgacaaagggatttaacctacttgatccaacacaaaaattggaatatttttggtgctctaatgaagctagggatggataactggtctcgaaatttggtctcgaatgctcatacactatttattagccgatataatgccacattttatgatgttagtcttttcatatggggccagaaatattaattgaatatcgagaaggtagattcggtattttgctctttaagagtttcagcttatggcttcagtttttctcatctatagttgccactttctattctttactcttgtttatggttcaactctagataaaacactatgtacttcctttgaactgtactatggttatccttctggaatgcaactttagttgaacattaacatttttgttgatttcatacatgctgtatcttcacgcatgcttgtgaaattggtcatgttaaccatgctgaagtagatagatataccaataaattcttgttcaaatgctactgcataccctcctgaagtaccaattttgtacttagcttttgcagttatgtatttgtagctggcttatttgaaagaatgcaaattgcaagtgcatcatttcgatggttattgcattgcatcttatttgttttcttttatcatttcaggctctcctgcattcgtcgcatatgtaccatgaggccaaggcttcttttgcacaccatggtatcaaattctcaaatcttgaaatagatttgcctgccatgatgtcacagaaagacaaagcagttgctgggctgactaaagggattgaaggcctgttcaagaagaacaaggttgagtatgtcaaaggatttggaaagtttgtgtccccttcagaggtatctgttgacttgctcgatggtggtagcactactgttaaagggaagaacataatcattgccactggctcagatgtgaaatcactccctggagttacaatagatgagaagaagatcgtgtcatctactggtgctcttgctctttcagaaataccaaagaagttggtggttattggagctggatacattggtttagagatgggttctgtctggaacaggctagggtctgaggtcactgtcgttgaattcgcttctgacattgtcccgtcaatggatggagagattaggaagcagttccagcgtatgctggagaagcagaaaatgaagttcatgcttaagacaaaagttgttggggttgatacctctgggagtggtgtcaagttaactgtggagcctgcagctggtggagagcagagtgttcttgagtgtgatattgttcttgtatctgctggcagagtaccatacacctctggtcttggattgaacgcccttggtgttgagactgacaagggtggaagaatccttgtcgacaagcgctttatgacaaatgttaagggtgtttatgcgattggagatgcgatccctggacccatgcttgcacataaagctgaagaagatggtgttgcctgtgttgaattcatcgcaggtaaagaaggtcacgtagattatgacactgtacctggagtggtgtacacacacccagaggtggcttctgttgggaagacggaagaacaggtcaaggcatcaggagtggcctaccaggttgggaagttccccctgttggccaacagccgtgcaaaggcaattgatgatgctgaagggttggtcaaggtagtggctgagaaggagaccgatagaatcctcggtgtacatataatggcccctaatgcaggtgagataatccatgaggcggtgcttgcacttcagtatggagcatctagtgaggatattgcacggacatgccatgcgcatccaacagtgagcgaagccctgaaggaggcttgcctacagacctacctgaaggcgattcacatttaaatcatgatacagtttcaactgccatctaaaaatattccccaaagttttgaaataatatggaacgatgtggttaaaacatctagtttgtttaccatttcctcagcggaactgtgaattcgcaccttcacttcttattgtagttatattctttttccttgctagctggcgcgtctgttcctactccttaataatatggtaaaaacttaatgctgaatatgtttcttttttctgttgatacctgagacaagaataccacagaggctggctcccctagatcagatggcgcccttcatctctggaattttttgcttaatcccaattctgatagtctattttcagtatctttgttgggacataaaagatgtataattgtgtgcatgtcacaaatctttccatgattcattattgctcaaattattaaattctactgtaattacttgcagttgcaaacttgcaatatgtcttcagttctgcttggttactcaaacttatcaacgaaaccgcaaggtcaagggcgatttattgaaataaatatttggcactggattttttttttaggcaaatgttttgttgcttccagcatcaagcaaggcctctgcgatttttttagaaaaaatcccgtggaacaatactacacaggaatgaaatgaaaccaaactcctgaaattttatataccaacgacctgtttggcaacaattggggaggggcataatattagctctgggagttgagtgagggaattaatatgggaattgacttttaattccaatctcttgtttgggaatttgattcacattctctgtttgttgcgtgggttttgaggtacgaaattatatcggaagacatgataaacggtaagattaacgagagttggatcaattagtttcccatcctaatccctctaaatttcccacatcctccaatcaaactgagattataatgcttaagggtgagttcgagggataggggattgagaagattgggaagatacgcaaaacgaggtgagccattagcatgtgattaattgagtattaactattttaaattgcaaaaatggattaatatgattttttaaagcaactttcctatagaaaatttttgcaaaaaacacaccgtttagtagtttgggaagcgtgcgcgtggaaaacgatgtgctatatcactcattgtccatgaaacgaacgcactctaaatctcctaaacttccattccctcttttcaaaccccccaaccaaacaaactgcaaatgctttctaaaattgagtacgcaaaaagtgtaactatgtcacatgtcacacaacacagatcttgaaacagttatatcaaactttaggatccaaatttgtacgagttgaatacaaggaaacatttttatatctcctgatgttaaggcccgtattaaattaagcccaaaaacaaaatcacatctctatccaagattccagacaagccaacaagtagagtaaccatcacagaaaccttcaactatccaaaactcctcatcctccccccattctatcaccaagaaaagaggggaaaaaaaaagagagaaaaaaaaagagagagagaagagaggaagagatggagatggccatcgacacgccatcgccgtcgccgtcggcctcgtcggcggcggcggggaggcagacgcgcgcggcggagtcggtgcggctggagcaccagctgctgcgcgtccccctcgaggccctcaagtccaccgtgcgcaccaaccaccgcctcgccgagaaggagatcgccgccgtcctctcctccgccgccgccgcgccgggaggaggaggaggaggcagcggtgacgccgccgccgtcgaccacctcacctccctcgtctcccgcctccacggcctcaagcgcaaggttgtactcccctccccttcccttccccaattccccacctcacttcgccccccaatcagtctctcgccgaatccacacttgccctcgaaaagatcctggctcgttgatcgattgattctctattctatctggatcctacttaggttggggaaatcccatttcgttgctgatggattgattgattatgatgatgatgatgatgatgatgtcttgcagatggaggagggagcgcgggcggaggagctgcaggtgcagaggtgccgggcgcggctcaaccgtctcgcatcggcgagctctggcgatgatgctgagtgggaggaattgcggctcaagcggatcctggttgattacatgctgcggatgtcatactacgacaccgccgcgaatctcgcggagacttccggcattcaggtataagaatggtagtagacaggaagaacataccaaggagagattttccattggttgtgtatatagtttgttcactaacctcacatagtcacattagtggcaacaaagcaagcaataacccacaactttaccctttggccatatcgattgtttgccgctgaaatgatccgtcaagtttgttgaagttaactaactaatcttgcgacgaagaagtatgaatataatgctcaaattgcctgcgagctccttttaatcctttgatgaactagggcctaatgttgcctttaaccataattttacctgtattttatttgtccacattattcgatttccactctggttaagttttgcagtctcttacatgttatatgcttgactaccctcctgccaaacaaaagagaatgcttgttttaaaactatctcatctgtatgtgaatgcagatgacgtagcataagttaatctccttttatttgtagttaccgttattcttttattttaccaatgtacataattattggcgagtagccaaacatgttgctttctgctttttggatatagcatgaatacagaacattttttgtaatgaatcttaagagttaagatttgctttccgctagtatataagtggcttcagcaacaatgataatgagagcagtatcaattcatgctggagtcgagactgatcagtacatactgcctttaactcccataatccataattactcactggaacataatctgactagtcaacttatgcaggaccttgttgacgttgatgtttttctcgatgcaaaaagagtaattgattctcttcagaacaaggaaatcgctcctgctttagcttggtgtgcagaaaacaggtctcggttaaagaaatcaaaggtttgttttactgtgctatttcgtaattcgtactatattgattggtttgcttcaataaaaaattcagcatattagcaagatgaaatgattaatctttggcgtatgatgaaatactggtgtctggtgcttgcattggcatctgattattgatagctctgacttctaatagcacatgaatcatggtggattttgctggctcaaattcttaatcttgtaagctgtcttctttattggaatttggaggcgatttgttctacatgtcctctgttaaaaagcatcctaatctaaagaaacaggcgagagtgcatagtacatcaatgaatatgatgttagtgtacaacatttcttgatgtcattttcaaagaaacaaaataagcccagtttttttaggtgctgactggcgtatactactatctttatgttaacacaattgttagttctagtacattagggtgcctttgttatttgccctgattagagtgcttttgttattttccctgcagagtaagcttgagttttttctgaggcttcaagagtttgtggaacttgtcaaggccaagaacttcatgcacgctatagcatatgctcgaaaatacctttctccctggggggctacacacatgaaagaattgcagcgcgtcacagcaacattggtttttagaagcagtacaaactgtgctccttacaaggttagcagcattgtctgtgtactcttgtttttttttttttggtgtcactgcatgcctgcatcacgaatctgaccacatattttcattcaaatatattattatctatttgactatatgtgcattcttggagagtcctctgatatcaactcctattggagtagagctgcatcatagtcttcataccatgtgtttatgctcgcaggtcctgtttgagcaaaatcagtgggacagccttgtggaccagtttaagcaggaattctgcaaattgtatggcatgacattggagccgttgctgaacatctatatgcaagcagggctcacagctctgaagacaccgtatccttcgcctgatcattattttccgcttcacctttaccatttaatataaaccactagcattgtattacattctcttttttccttgaccatcattagattctgcttcgatggtaactgccccaaagaagaccccttatccctgcctggcttccggaaactagcagagccgcttccattctccaagcagcaccattcaaagcttgtctgctacataaccaaggagctcatggacactgagaacccaccgctcgttttcccgaatggctatgtttatagcaccaaggtaaaaactacgagctgaaccaggtcattacggtattatgccgatctgcgagttcatacttgaaaccgtcgttcgtagtgccacactgataatccgttgctggctgttcattctatcctacctcaggctcttgatgagatggccaagaagaatggaggcaaggttacatgccctcggacaggagacatctgcaactacaccgatctcgtcaaggcctacatatcatgatcacacaacgcgtgtggatctcatctgggaagacactgatttgcgcgggtgatctgcaccctgaatgcttgtacatagactgatcagaacattctctattctgttaagtttagtctgaattgtgatgcaaatgcaagaaccattgaaactacttcagtactgatttctgattacactttgaccttttgtgtcattgcattccatttccatcctttttaacctttttcttggtcaaaatgaattggtgaaatctatctcgaaagtaaattgattcatgcgaaaaatactgcactctattaaagtaggatttggaaaccttataaccatcacttttgatattaaaattaaatcagcatatagctgcagtatgaatatgctttacatgaaagggagatgacttgtacgaatggttcaaaacgcctttccagcctctgctcccacgaaagcggaaatccatgatgcgttttccaagcaagaaagcggaaaagagaaagtaaaccggtgccctatcctgagtaatgggccggaagagaagcaacgaaccagtcccaagcccaacaaacccagatgaaccccagccgtccgatccgaaaacccctagatcgaacagcccacaccgctccacctcctctataaagtcgatctccacatgcgccgcccaaaaccctagccaccttccccccacccctctcgccgccgcagccgcggaggcgacccctcccccgccgccgccaagatgcagatcttcgtgaagaccctgacggggaagaccatcacgctggaggtggagtcctcggacaccatcgacaacgtgaaggccaagatccaggacaaggaagggatccccccggaccagcagcgcctcatcttcgccggcaagcagctcgaggatggccgcaccctcgccgactacaacatccagaaggagtccaccctccacctcgtgctccgcctccgcggcggcgccaagaagcgcaagaagaagacgtacaccaagcccaagaagatcaagcacaagcacaagaaggtgaagctcgccgtgctccagttctacaaggtggacgacgccaccggcaaggtcaccaggctcaggaaggagtgccccaacaacgactgcggcgcgggcaccttcatggccaaccacttcgatcgccactactgcggcaagtgcggcctcacctacgtctacaaccagaaggcctaggttgatgcttgctgctgctcgctttgctctgatctgatgcttttcattcccttttatctgttattatcatgagctgagatgagctgctgctggttacatgttattcagattatatgcgttttgttctccgtttacaattggaaaactttgagtagtagcctcttggaatattattatctgttactgaattgatgatgcgatgtgagttcacttgtgttttctgattcctgttggatgattagtttgcgccagtttcgttgctctgatgtgtttttgagatctcactgattgcaattagataattgtttttctgcatggactgggatgcaattgtgctgattgctggtctcaatggaagtagtctccataattttttaatcatttctgctcatccgttcagttagatgtgcaattgttaatctgattgtatattctgccattaagcatagtgaaggttaccatagaaaattttattcttgtatggcgacttgattgtactgagtgccgatggtatggctcaagtagaagtggttgcgatcatttgcagattgtgtcacataagtagcattgtatgtgtttgtgaccattcttgttctgaagtttagggttgttacagagtttttttttttcttacaataacccttggcttcattgggtggtgcaatcttatgcttttttttggggggtggggggtggggggtgttgaatgatgcttcattctgatgattcaacccccaaactacagaaattatctagatttgaccaatgcttttctgaaatttctgtagtttggatatacaattgctctagacgtgactaatgtgtatgtgatcctttcttgatctgaaattatggggtgctggttagcttctactttgcagcttctcgggttttgcagttattcaggatctgtttgaaagcttgtttagcttttgccttttgctgctgtaggaacaagaaatttcattagcgtatgattagttaggtgttaactattacaaacttgaaaaacaggtttatttgaaaaaataagttatgttgcgctccagatgtgacagttaatctggtgggattaatgtttgtttttattgaagcccagtgaagttctactcttactgtatgctacgttggcttaccagccgtgtgaacctgacagtttattttggagttgattttgggtttttttttcatcaatttacttttcagttttagcttttaaacgagtaaatgtttttacccaatttttgttctactaagatattataaaatttataattatttatagttaagcaggagcgtaaaatggatcgtgcatttgtacgattaggttgttatctgttgttgcctattgctactgactatgatagcgttctgtattctggaatacatttgtttgtgattcttttgggttcctgtgcacaatctataacaggaaatggtaccgttgagcttcttccaacagcttatattgtcacgtacaacagcgtatatacggatataccttagactttttattattagaagctggttagtcttaagcttcctgaaaaccgtcgacataatagttaggagccttaagagcaaggtcaacagtgcagcccactactaccccaaatcttctatagccaatgtaatagccaattcatacaatagttgtttactatactattaatacttggtcccacctgttatacacatattacgtcttggagtccgtgcagttggctacagatctgtagcccactattcttatctctctttctttatctctttaaaatatatttatagttggcttatagcctgctattgtacctgctctaaatgagctactccagaagcatgggattaccaattatgtttcttataggcatgggattaccaattatgtttcttataggttatctctttaaaatatatttatagctggcttatagcctgctattgtacctgctctaaatgagctactccagaagcatgggattaccaattatgtttctcataggctgtgtttagttcagcgcaaagtttggattttggttaaaattgaagatgatatgactgaaaagttgtgtgtgtatgataggttgatgtgatggaaaaagacagccataatcttaatcttttcgcgtcaccgctgggtcggtatttttcttctctatggccagtgtacaataacggccacggcgatcgtcgatagatgttggctgctggctgtgacctgtgatcccaaccacagcagccgcatttattcaaagccctgagtgcgaattcaacaatactcttaaacgatgttttgatttctcaacattgttacatcgcgttctgatttatgaacatctctctatattcattcagccttttactcgtcttaggaactccgtgctcgtttttcttttttattttctagaattttggaggttttgttttacacactgtatgacaaatgtgaacgtccagagatgataatattgattaagcaaggccaaaaagattgtttgcagatatgctccaccgtggttgctgctcataactgcattactggaattgtggtgatgctaatcatgccatgttcttgctgctctgctatagtatgttgcagaaagtgttcttccctcaacttttccaatctctccttttt

SEQ ID NO: 18040 - DNA, 7742 bp, Oryza sativa
cctgcagcccgtccccaacttctagaaacaaacacatagtggtgttcccatgcatgtttcttcactcgtcgcatcttttgaagaccgaaaaatcaacagcgacccgaatgatgtaggaatgccaccaaggcaccaacgctaacattgaacactagatgttcctgccagttgctgaagttccacagaatctcactatgcaatcctggctgtgtgcggcacccttttttttcaacctttctatctcgtttttcacacgcacgcttttcaaactgctagacaatgtgttttcttaaaaagtttctacacgaaagttaccaaaaaaaatcaaattaatctattttttttaaaaaaatagctaatatttaataaattacgcgctaatgaaccgctccgttttaggtgcggagggaatgagttatcatccgggacatgcgaacgcagctggtgggtgatacgagcacagttggtgagagatattggctggtggcattccggactgtgaatctgtgatggcatcccgatggagtttcccaggcaacctttgcatacggacataggcgaataagaataagattagagataggactatctccctattcttactgctttctcttttttttttctccgctctttccttctaccaatgatgatctagcgagatagggattcaagtcctccaatacccacgctagatctgcacctgcatacggagccttggcgggagcagatgagagaggtggtggctgcggaggcagctgcagatgcattttgtggtaagagatcgaattatgaattctgccttgtcatgcattattttcctaagctatatatgtcattaattacgatccttcggagtttttttttcttgaacgatccttgtgggagtcggaagtgtatatacgcacgcacttaattgcatggtcaatttatttacgtcccggattaatttgtcaagcaagcttttgtatattcttattatatttaacagtttactcagacgaaacacaggatacatattttcacaaccaccacgtgcatagtccatataagtggcagagccccgaacatgaaggactctcgcttattccgacacaaagcctaagctcccacggcatccgtacgtcttgatatcgataagtgccacagtccccctcaaggcctcaagggtcaaggcagcgtgtaatctgtgaaaattaaaataagttaattgctctaaatattgaaaaaatgctaaccatcgattaattttgtatgaagaagactagaagagtatatacttgcattagaaaagccactagatgaagataaatcagtgcacataaaacgagaaagtaattaactataattaattgagttttaattatttaaatttaaaatatagatctatttgatattttaaacgaaacacatcatttaacatcatttaacagtttgaaatccgaaatcatactaacgaaaaccgagaaaaaataatctactccctcagtaaaaaaaaccaacctaattggggatttgttacaacttacaacatggcctattatgtcaaattggccatgtattggccatgttgtgtcaaaaccccaactaggttgggtttttttgatggtgggagtacatctttaaggctaagttattttattagtgctcaactcaaatgtccttttttttttcgtgcacgcttttcaaacttttaaattgtatatttttaaaaaaaatattctatacgaaaattgctttaaaaattcatactaatatatttttttaaaaaaatagctaatacaatttaattaatcatgcgacgatgaatcgttctgttatacgtccgtgagggataagttcccaggcaacaccagtctttacctccgcacttgtagccgacggggcggtcggccatgttgcagcgcttggggatggtgatggcgacctccggcttgatcccggcgaccctggccgtgttggacagcatcacggcgcacaggcagctggggctctgcccgatggtgtgcaccgccgagcagcagctgctcgacggcgccgactgcgggtcgtccgccgccgacacgcacggcgccagccgcagcgccacccggtcggcggacgccctcccgcactcgccggcgccctccgccgccccgccgccggcgaccaccaccaccaccgccaccgccacgaggatcaccaacctgcccgccctcattgtgtcaactagctagctaccgttctcttgctttgcttttgctcggatgatcacaacttaatttgtgtgtatgatcagtttagttttgctgctgtgcttactcgtatacaagggtgtggtgcttgttatatactagtgtccagggttcacgatcctgataccgggtcaaaattcgcaaatttcatggaatccgttgataaatcaaaaaccgataaagtcctaataatttctgtcgggaatttaaaattttgttttcttgaattcaattaaaaaccgagtcgtttgtgttttcgacctgattggaaagtccggatattgcgaaatccaaattaaattccactgaaattatgaaccctcacaatcccgacccagaatcaaaatccgctcacgagcagtatcatcggatttcacaaaatcagttgataaacagaaaaacaaatctgaataaattttgtcaaaaatttaaattttagtttcaatattttttaatttaagaaagacaaagtggttttttgttgttgacccgatccagagagttcgaatttcacgaaatccgaataggattccactgcaattcttgtgaacactgctagtgccattgtggcgcacagcacgcacctcaatcatgtcctggggtgaatggggagagcactgacggtgagcacttggcacttggcactcctttgatttctttgcatttgtggcagcatgaatcattagaggtttggtttctccactttggatttatgtaaggaaagcaggcatgaagctagatgtgatagtgggcttctgcctaggaaagcactgtacgtggtggctctacattcatcttgtgtgaacgcgctgcgtgcgcgcgcaacggacgccggccgtcgatttcacattgctcgctcttctctctgtggagcagatgacccacactcatccttataacatattcccaccgacctaaaatataataagtttaaattttatcctaaaatataaaatctagtaattgtaattttttttactatccgtagtaaattttacgatattttaggaaagagaaaacaggtggtgtgaaacatgatacatcgatatcatgcgcgagttgactatccatgtcatttgtcaaacgtatggttagttagttacaaaatactacctaaatccataaaagaatgcccgtatacatatactcctaaaacctataaattttttacatggttttcaatgaaatactttgactactaatttatttatattatgttataacaactatgaaaataaaaatcatatgaaaatattttaaagtatcaatctaattagagtaaatttcactttgggccatgtatatttatcagattgggacattggaccaaggttaaacatatgttttcacttaacatcatatttctttaccatactttataagttggaccagggtttaccacttgggccaccaggacagcttcggcccagcccatgtgaagcgtttgctcgtatggaggcgacgagtctaggtgcacgcatcggctcttggtggggagcagcgaccagtgacgacctccagggctgtgttcagatgccccttttcccgatccctcttcctcgttttccacgcgcacgcttttcaaaatgctaaacggtgtgtttttttaaaaaaagtttctatacgaaagttacttaaaaaaatcaaattaatccatttaaaaaaatcaacaaatacttaattaatcacgcactaatggatcgctctgctttccatgatcactgttccggatgggagctggttctagcgaacaaagccacatcgtgagctcggcacgcagacaccggacgccatggccaagggccagtttagtggacatcgatgccatcacgtatgatggcgtccagagggcacaatctgcggaatagctcgggtcgctgcttggcttcgtggaggcattctatactatatcagtctgttattcggtcttggagagacaaatcaaaacggtgttagagcaactccaatagcctctccaaaagactctccaagctaaattttgtcaattcttacccaaaaaaaaagtgctccaacggcctctctattcaactttccaagctatttggttggtcaaacctttccctcactagcctaatttggccagccaaactcactagccatctgtgggtcccacctattcccccttctctttcctttgcatccacttgtgcgcgctctctctctctctccctttgccgccaatatccctgccaccgtcgcttgccaaatcgacggcgagcagcggcggcggtgctcccgctggcatccatcgctcgcctctgccacccgccggcggtgctcctgttgccgttggcctccaccggctcacgtcagcctcgtccaccgccgtcgcctcatctcctcatcgagcggcgacgacgacgcgtggaagaagcccgcggcaacgaacctccttcctgaattattccctcggaagaagccatatggcctatttggttttgggagggggagttgcattttctattggaagctatattgataaagtcgactgtgatgtagtgccgatgaatgcttgtcacttgttattgggaagaccttggcagtttgatctaaatgcaacacatgagggtatgtccaattgctattcccttatgcataaaggagtaaatcatgtgctgaaaccaatgcaagagagtgttattaaagtggaggtatttccgactatgaagaaaaataaagaagtaagccgaggacggctttgttttaaggaagggaggatgatatgaccaaagcacctgtatcttttgccggtggttcttttcaaatttgtgtgaaacaagatgaagagaagaaaccgacaaggagtgctaccgatcagatgggcatagaagagaagaaattgatgggggtatatacgtgttggttcattgcacgtaccgatcttgtgtcatgctaattttccattagcatgtttatttacttaattaattgcagcataggagatttgtggtgttattaccaagttaattaggactaaacttaattagtctatgtttaattaggttttgggcctttgagcccatgccctttcctggtgcttgcgtgcacacatatatatgtccatgcaataggttacaggggaggttagggtctaatttgttttggttcgtcatcgaggtcgtgtcctccgccgccagggacgatggcgctcccatcgtcgatattctgctgattgttgccgctatcaacgacagtgacacaagtgtgtgattggcagtttttccctgctgagcacgtgctggagccaaggaggtctgcatcttcttctgatcgtgtgctttgccagtgcacgggtagataggtgtggtgttcagtttgcagtctttccaacctctgtaagctgaagaatttaggggctgtttggatacttctgcagctaaagtgtggcataccacaatttagatggctaagaaattcttggccacgaattaggcaaatgttggcaaagatatatgtctataacaagtagggtcacaaaataaaaaagtgtggcatgacaaagatgtggcaagcaaacaaacactaggctaaaagcatgtataaaggtagagtcagatatgagctctatattatttagagactagcatcctacaacagataaaaacaatatggtctctaatcattaatgtatcaaaatactttttcttactctcttttcctttctttcaccaccatataacaaaatttgctctaataaatgctaagagtcgactctgagccgttgtcatgtataacaaccatactattttctctttcttccatgtcatcaaatttacttacattaataaagaccattgtacatgccctaagttggttaaagtagcttaccaaagttatggcaaagtatcgtcaccatccaaacaacccctaatatcgtcgtttgtccagttgactagtcttgattaattttgttgctccatttatcacatcaatatatatatatagccatatatatattattggttgctgattggtaccgtgaaagagaggggaaagtcaaggtgctcgctgcagggtgctcatcacatccgttttcattaataatctaatcttcaactaaactttctatcgatttccaccacctctaccaaacaaggtattgaaattaaaaatcaaattcccaattaccacccctacttaggtattgaaaatgaagggtttccttcctcaattccatcccatggaaattcccaaccaaacaaaacagttaatagctccatctctctaaactcacaatccctcttaaaaaaatccctccaaccaaacaggccgtcatgtaaactcccaatcctctttcctcgagttgccaaacaaactgataaagaaattcaatggttaaatatttgctactccctccgtttcaggttataagatgttttgactttggtcaaagtcaaactacttcaagtctaaccaagtttatagacaaatatagtaatatttatattaccaaattagtttattaaattaataattaaatatatttttataataaatttatcttgggttaaaaatattaccttttttctataaatttggtcagacttgaaacagtttaactgtgaccaaagtcaaaacattttatgacatgaaacggagagaatatatatttaggaggggtttcatgataaggaataagttcactctaggtccctcaatttgtcgtccagtctgattttcgtcctcagtccagaaaaccggatacaaaacatccctcaacttacaaaaccatgcaaacatagtccctcagcagtattgaccctaggttttggatgatgtggcacctacgtggcgtctttgagtagatctgtgtccccacgtggcattgacgtggcgcttacgtggcaaatttgatcccaaaaaattaaaaggagtaaaattgaaaactgaaaaattaaacaaaataaaaaaaatgtgggacccacatgtcagtgggtcccacttaactctacctcaccctcttcccctctcttccaatcttctccaggtggcggcggcaacgcatattcttgtgtggcgaggatgaagacggggagggagcgggggtcgctgagggcccgtcatgcgcggcgtcgtcgtcgaagtgggtgaccgccgggcaaggcggcggcgctgcattttctccgcgcagcaaggatggagacggggaggcagcgggggacgactaggtcggtgggggctcgtcatgcgtggcatcgtcgtcgaaccggatgattgcaggccatggcggcggcggcggcaacgcatattctccgcgcgacgaggagggagcaggggacggtggggtttacgggggcgggagtgagggatgggggcggtcggtcttcctccgcgtagaagcgtggcgcggtttcggcagcggcggcggagcggcgggtcctgttcgccaatgcggcggctccccaaaccctagcccgatcccgacggcggcgatggcgactgcgggagctggaggtaggttggcgccggcgcgcccgtcgactacctccg

SEQ ID NO: 18041 - DNA, 5363 bp, Oryza sativa
gctcgccggccggcgaggccgcgagggagctcgatgaggaaggaaggatagccgggagagagagaaggaggcaccgagccgccgacgcaccgtcgtccgtggatagagaagaaggtgaggcccactcccactattttttctttcgtccgactgacatgtggcccatgtttttattttagttttaatttttttacattttgcttccagtgccactcaacaccacggaggatgatgattaagggtgtgtttgaggaggagattgagtagattgggaagatacgcaaaacgaggtgagccattagcacatgattaattgagtattaactattttaaacttcaaaaatggattaatatgatttttttaaagcaattttcctatagaattttttttgcaaaaatacaccgtttattagttcgggaagcgtgcgcgcggaaaacaaaacaatctttatcccttactcctgcgctcgaacgcagcctaagtcaaaccagccacgtatacgccacgtcacccaaaaccaccatctaaaccgctaagggcaagtggtctctacgttaattagagactatcacgttacaatagttaagacaatacggctctaaccattaatataaaaaaatactttcttactagtcatctttcctttattagactcaatgtagcgaaaaatttcgtaataagtgctcagagtcgactctataccgttgtcatgtgtagcaaccatctttctctttctttcttcctctctcttccacatcaccaaatatgcttgcattacaataaagagagaccgctaataaaaaccaatatacatgccctaagggatcttgtttgcactggttttaatagttgaggtaactgctgtatcttgtttttgggttgaaggacgaaaatcaaattcgtcgaaagttaagggacttcaagtgaacttattccttcatgataacgaggagtacactccacagtccccttaccttacctatataaattattggtgagagagagaagagaaaacacccaccgactccctcgtcgtctccgcgctccgctccggcctcccccgcacaaatcatccgtcccgccgccgaggatgccgccgaaacggggcggtaccatgaagacgatggcggcggcggcggcgggagccacgggcacagcgggagcctctccagtcggcggcggtccagcggggatgcaagtgctgctgcggggaggagggttacccgccttcgatcgagggagctagggctggaggcgacgacgggcgctggggaggatgtcgcgtcggatgatccggggccggctcggaagaaggggaaggtccagccggcgacgaagggagccaagggtaaggccgcacgagcggatccccctaccccgccgccgcgtcctagattgccgccgttccctaaatccggcgatcccatggattttctcaagtgggataaagagttcaggaggatctgcgctcttccaggttaatttatgcttaattaattactacttttctctttagccgatgtcactaggaagaaggaaaacaactgaaattttttgttctgtttgttgcgcgatttcttcagaacctgcaggtactgtcatcccttgcactgtcaggaggaagcctacgggccctcgcaccgtcagcgtcacggacatcgcaagcgtagcagacaatagcatgatccggaaggcttctcgttccgtcgtcggcatttcctccaggatacctggtaaaaagattgctgttaacgatcaatttcaattacaatcccctccaattaacagctgcttctttttttttttttaagataaaggaagcttttattcagatcaagataactacatttcttaccagctgctaattctgcctatgttgctatttcttcctatgttttcagatgggaaggagattatgcaatgcagtggtatcgtggtcgattggaacaagaccagcaggttggcgacaatcgtaacttgctctgcagccgtgtgctttgatggtgcactagtccatcccaaccccaaggtatgcagaaaacaaacctagctggattgattaatggtgacacttggactatgaaagttctctgtaaattccccttcaaatcttaataatatttggtcagcctcttccaagaccatgaaaattaattaacatagggtagatatgtttgcacaatagcactccagaattaacccttgttctttagatagctatgggtcctacgtaaactagttgacaccctgcgtgttgcggtgggcacactataaaattttcaaagtgcataaaattgatgcaaattttggtcatcgaatcagcatatgaaaaaaatagagatttacagtgttgagatagaattcgtgcctaaatgtccgtttttcaattaggaaagcaaccccaattctcatggttcctgacattctagcaataccaggctggtcgatttgctggatggctgcgaagatatgttaggtataaaatcaggattagtctcatggcaatatgattaattgaaaagttcaaaagtttatagaacatataaaaagttatctcaccttcagcagctatcccaaacgaaccttaatggctgccttcatctggataatctaggctacatgcaggccttatttatagcaactccaatctgtattacaagaaatcaatatatgttgaaactgaattcatactgaaatttgtgttttgaggtcggtagagataattggcatttgaagatgaatataaaaactgtacaataggaaagctaaggccaatactgcttctttactgaaacaaatctacagcaagcaatgaaagagagggagtgtttagttttgtttaccacttcattaaggaatgacatataccaattcgatgaattgttgcaaatcctattggacggaaacctgcgaaaataggtagaaaccaattgattaactaatagtccttgtcatatatcaggatgaagaaaaatctagcaaaatcaaccacctgatgggaacatgtacgaagcaaaatgaaaacttagatgttgttagagataaagaaaactatttacggtggaggaataaaaaacaacagctgagcgtggcctgcaattgataagttggtgagccttaaagaataatttagaaaatgtttttagttaggaatgtaaatttagagctttgtgcagtacatacaatcaatgtaaacactcatccacagcaattattagttgaacaaaagatggtactggggttacagggccatgaagtcactattgcttgcagtcggcctcccggggatgaaaacgatagaaaaacaaccttacgcatttttgcaaccattttttttcctcgtaaacagaaccgaaaatgggcatccacaatgttgcatatataaaatgaccttatggaacacagtagtatatttgctctacctttatgcattaggatatatagttgaaagaatgaatattgctatatgcaaccttaaggttaaggttagatcataagaaataaaaaaagtattttatgtattcgcaacatacatgttaccctttgtttattaggtgaatagagttttttttcgcagtgggcctcaccttaaatcaataagagaacatacacattgtagcatgtactatagacaaaaagaacgtaacaccgtgggactcatattatagctcaaatcaccttaaacatcgaggatgttctagattaagatggtgtcagaaatatggaaaaacagaactatgcaaatggaaatacgttgatattgatgggaaagcagtaattactgttggaaacaataaaaatataaactacatatatttaactaagtataattatataatatcaccaaataaatttaagtttattggatccgataattttgctggacttggaagcgctgaaatgtaaaataatcacatatttaacctaatataactatataatataaccaaataaattcaagtttattggattcaataattttactggacttggaattgaagcgctgaaatgtaaaatcacatatttaacctaatataactatataatataaccaaataaattcaagtttgcactatattacaaactgtttagacgtgtactcctctaaactatgaggcaaatagaaaatggactacatccattgaggcatttagaaatacgatttttatgtagttttccagaaataaggaaaaaaggaaatgtgtgttatatgttttcatttccatattttaaccattttaatttttattttcgttcatagcgtttttagatggttcggtcagtaccacattggaaatgtgcataggtagttcaggaatttccatgatcattttcacctactagttctcccaattaatatagtgcaaataatagtccccctccatgtattaacagacaataccattgacttttggtatgatgtttgatcatttatcttatttaaatatatatatatatatatatatatatatatatatatatatatatatatatatatatatatatatatatatatatatatatatatattatttattgacttgttttattattaaagaaactatggttgtgttcgtttgtagcagttcccaactcccatatctcgttttcagcgcgcatgcttttcaaactgttaaatggtgtaaatggtgtgttttttgtaaaaagtttctatacgaaagttactttaaaaaatcgtattgatccattttttttaaaaaaagctaatacttaattaatcacgcgctaatggatcgctcggttttccgtgcacatgagattggatcccaacacccaccaccaacgaacacagcctataagtatgacttatagtttatcatatttatattaaatttttaaataaaataaatagtcaaagcatggcctaattagcgcgcagatcaatcatcgcacggcatcgatctccgttggccttgtcacgcgatccatctccacgctgcgtggaatcttcataatccagaatgattttctaccaggagtatcttcgaaaaaagaagataatttttttaacgaaagttctattggtagagccgaagaaaaattacaagattataatctgaaagatcataaccaggaaaaagaaaaaaaagtatatcaccacccacacaccgaagatcaaatattgtgagtagcttgatatatggcttggatttgtggggcgttagcaaaagactttgggttgtacgtataaatttcagttttttagacctgactactgggaatctcttaatttaggtttcattcaacattatcattttttaatttctacacctttcattttctgcgcgtgcttctcaagctactaaacatttggttttttccaaaataattctatagaaag

SEQ ID NO: 18042 - DNA, 717 bp, Oryza sativa
gctagctactagttaatcattgcttaatcgatcatgtcgcgtggcagggaggcggcggcgtggtgttgccggcggcggaggcgatcgggcgttcgtcgtcgtcgtcggactactcgctggggaagctagtggacaacttcggggtggcgctggaggagacgttcccggcgcagccgcagcagccggcgacgacgatggcgatgacggccgtcgtcgacactacggcggtggcggcggcggcaggtggcttctgccggccgctcaagacgctggacctcttccccggcggcctcaaggaagagcagcatgacgtcgtctagccctaattagctactactactactgctcttaattactttattaattaacatgcatgatggatggatgggtcgatccattattatatattaattaaccatttctctgtctccacaaatttctgcttaattcagaattcagagttactcctagctagctataacttcttttttttccctttttttgagaaagacttcttgtttgctagtgttaatgcatgcttaatttctttctctctcgatctctaaatttactttttttttctctatagttaattatagctagcgttagattgtacgtgtactaggtgatacgaacgtgagcacgtacgtcaagctagcatgcagaggatcaaatcgaggtcggttgtgcacttgcattgactaattaagtagtact

SEQ ID NO: 18043 - DNA, 682 bp, Oryza sativa
aacagaactgtatgcctcgtccacaaccactagcttctcctcctcctcgggatgtttctttatcatcgcttcagcaagcaaggcagacaattcatctatcttcttcatggcatcagcttctcgcaacctgaactcgtcgttctcctgggttaggctctgcagtgcgttctctttatctagtaatcgctccttcagttgtgaattttcatatgttgcctcctgcacagacttgttggcttcagcaacagcagcttctgtgtaaatcagtttctcttcaagactctctttctcagtctttgcctcatgcagagccttgctagcctcagcacacgctgattcagtgtacaccagcctctcttgaagcttttctttctcctcgttggcaacttggagttggtgctcggcatcttgcagtgattccactgccttgtcgacttctaattgaagagcactaatttcttcctccgactgcttgtttaacctgacaatgtcagtctccttagactcacattcttctctgtacttgttcacctcagcctccaatttatcaacatttttccttaagcaagtgatgtcatagtttgcctcatcaagcattacctcataactctccttggtgctttttagggccatcttaagatcaccaatctgcgcgagggcatgctcgtggtcatcttctttg

SEQ ID NO: 18044 - DNA, 2624 bp, Oryza sativa
tcaaccaaactttcaattttaatatgaactaaacacagcctcaatggaatatactaaatgaaattgaaattttatagtcctcccagtctcccatgctactgacgcaagatgtcaaagcacctttctgtctcaaagtgctgagtctgttcctgacacttccaaatccacagctccatcgagctgtctgattcccatgtcgtcggaaggaacagttgccaatgatatcccaccgtccgattcgtgccacgtgtcgtacgcttcatgtatacttgtacatcagactgtatattcatgttagcatgtatgatgtatacgtatctctatgccattcatgccttgcttgaagtatggaccaaggtttgcaacagcagatcagcagagcagagagaaaagaactggtctgaaaaattttgcctttttgccatgaacaatgatgctgtctcatgacactgtattagtactccaagatgcataatcttttttgcctttttttagatcttggtgaaatggtgatcggtgagtgctgtactactactagtctctggaaggaagaacacatcatcaacctggcattgacaagagtgattatctatcagtgacactgaagagagaggcagaactggcaatggcgtgcgtggtgactataatcatatcccatgcatgtgtagtgttgcctgcgccttcttgatgatggccattcgttttcagttcatcatcgatctagtgcttcacccatgtcctttgctttgacacatctttgtgcacaatggtattgtttatctcaacaacttgggggattgcagaaggtcaattgattaaattaactgttgctacttggtatctgttctgaattctgactgaaaacaggtattgctcttctcttgtctctccgtttcagggagggtgcagcaatttatgaaattgagatgagagaaataacaacagagaatgttgtagcttactcttctgtttctgttttccaatatacttttacagggggagaagggatagatctcattactctgcttaaagatatgtaggcctgaatcattctgaataacagtgctacctgattatttcctacctgaactttcagaaagtccctctatgtaatgtagcacttgacccctgcatatcacacacaatagaatcatcaatgaaacacaagcacacatgtacacaatgcaatagtgttcatgtccaccctataaatatattgacaaatgacagctgatctaagcacctggaaatgctgtcttgcacaacagaaattacttcattgattgatatccccagtctgaataaactaaaccagatcaaaatgctgataaatctagctcttattcctgctgtttttgagattcattttacttttagtccatgcatgaaaaaaaggcatgctacagagacctgttactttcagacttcagtgctggaaattacttaaaaggtgtaccagacttttgtctgtcctgatagctgctcatgcttaatgtttctttcctgcaattgtgcagtactactgctagctattgctcgctggcctaccattaattagtatactgtcctatcccctaactaagccaaataagcaaaggtttataagtagtgttcattgttaatagtcagcgtggttctcggtatacgcaccggcttatggtaattagtacttaaccacaagtgtcaatcatgtcaatccctgctcaattgttccataagcctaccatattttacagatcaatattactctgcaccatcacacagtgttgttgattgcacttgcatgaactgcacaaagttattacacacacaacattacaagctaatgcaaattccacgcaactacgtttaattaactgcacatgttgaataacaatcctgtcattcaatggatcaaaactagcatgacaatgacagtgctctgcttctataacctctcttgtttacttaagctcaaagattcagacagttcaggcagtttgcagaaggccacaaaatttgaccatggttaatcaatcaatcagttaattacacaattactcacatgtatgcatgggccgaccaggatggcattggcattggcatgcatccatgagcagcaatgcagcatcattggaggggatgcagccaccatcatgacaacacataattctcacagcctaaatcgcaacacctttccttgcaaccaaagccaaccttctagctagctagctaatctaagctatagtgtgttgttgtgaagtggagtactagctagctaccactctatcttcttcttcttctacctcctcctttatatcttgcccctcacatgcacgcatgcctctccatctccattgccgtcctagctagctagctaagctagtacactagctaggccatggcatggtggtgatcaagaaagcgagagaggtggagcggcaatggcgggcgggtgcaaggcggcgatcgggtgcgtggacgcgcgtgtgccggtgagggcgagctacgtgagcctgtacaagtggccggagtcggacgcggagttcgtcaggtcggtggccatggcgcggcgccacggcggcgaggcggcggcggcagcgccaacgacggagagccccgtgtgctgcaccactactactaca

SEQ ID NO: 18045 - DNA, 1049 bp, Oryza sativa
agaaaatccgccatagaagaaatgagcaaataccacgatttcgtgtgtgtcgggggtcgggaatgcttcgccgaacgccggtcgccacccgataatctccttcgctgggagaacgccgtgcgccaccatctccttcagattatcttctgtcacatcggagggcgcccactgactctcgaagctttctctttcttccgccatgaatgtgaactggatggtttaatttggtctgagatatggctggagaggaatggggaatcggagcggtggacgcggggagaaatttcgcgaagtttttgagggtgggttggagcagattgatgaaccctagcttcgtcggcgtggttctatactgtagcacggagtggggaatggcgagagtctcggcggggaagacgaaacgacgtttggacttcggtgtttttagggtatcggaagtactaatgggcctgggcctatacagtacttcagcccaattatgttttcagcgtggcccattgtgatccctagggacttaggcgctttttgctttggcaatatgtgctcataatgatgtggcccgatgctattaaaatcctttttaacgcgattcaataattctttggaattattatgatgcatatgaaaaggtgcccgatagaaaggtgttataccatttttgtaagcttttttaggctgcaaaagctgtttgggttgatttgagatgactgatttattaatagccattcttttagcatgttatatgcttattttggttatggtaagggtcacagcctaggctattagagtcattaattaccatgattttctatcatgtttggtggatcattttatgagatttttactcagatttctatcgaacatgtctatttctggacctttgagtgtttatcactcggcccttcttgtattttttgtccttgataagttcaagttgagaaacagtcggctgggtatcttactaagtaccatgcgggcttcgctataaaaccactcggttcttgactatatgtttagtttttcaactaatcacatagtcgggggctaca

SEQ ID NO: 18046 - DNA, 701 bp, Oryza sativa
ggctgtgcgcgcaaggtacaggccggccgccagatgcacgcctcatccacgcgtcgcacatctgactcgggtacgcacggattgaggtttgcatccggtatgcaccaaatttttttccgatggttacgccggcggctggccgcactcgccggctggggctgacccgccccgccggtgtgggaaggcggctcgccggagtagaggagcggatgtcttctcttcgcatcgccatcgccatcgcttgatgtactctctcctcctcgtccgcgaggagcggcggcagcggcggaaggaggtggtggagtcggggacagggagggcggggacggccgcggcggtgaggaggaggagcggcgacggcggggcagctcagcgaggaggaggagcggcggcggcggctcggtgaggaggagcgacgcgcgatgggaacggacgggagaaaaaaaagaacgaagcgaaatgtttttttctaatggcaaaggtgggtaatttttttttccaaaagcaggtgaaagcgtagggtagagattattttgatttatactacaccaaaaactggcttggagcaaaagcagctgtggcttttgggtcctttggttggcttttggcttttgcaaaagcaaaagcaggttgaaaagcctaacgaaacacactctaaaatcatgtttatgaaagaaatgaaatgacagtgtttaatacta

SEQ ID NO: 18047 - DNA, 1844 bp, Oryza sativa
aatgactaccgattaattaataataattagtgattaattatcatgattaacagtaattaaggctgtcggtctcactggttgaggatgcgagaccgctgctcggtctcgctggatgggtatgcaagaccgctcagtctcacagctcgagactacaatatcaacgatatatttgtgcgaataatttgtacctgaatatttctaagagcaaaaaaataaatagtatattttcaaattttatgagggacctaagtaaattattcctgtggatgaaacgtccatacacagttcatattgtcggccaggtggggcccaggcccatgactgagctctccacgtcagcacaccacgcaagaacactggacaataaacgtgcgtctacttaccattaactatgtctaaatacgtgctgcattattaattgtgttatccaaattgtagacagtactaggactagtagtatattagtagtagtagaaatttaaaacacagtacgcatatatatgtacagtactatagatcactggctaacaataattaattccttctagacaacataagacaaattaattatctagtctcagctcatgccaaaataaccttatatctatattttaatgaaattaaacatttatttgtttttatagattcactctatccaaaaatcttaaaaatatttctttttttttcaaatgtccaaaagtcttaagtatattatttcatttttctcaaatgatataatatttttttatttgcttatggcctgacgaacaactcatgggtctctgccatccgcggtgccctcactgtcccggtcatctcccagtttctccttatttgggatgcgatgcttcacgtacagctctcgccgggggtcgaggatcgtctccttattagatgattcttttttctaaatgtttctaaaatcatgctctatcatattgttgtgttcttactgctattattttggccattttttcatgtgactttgttttatcaattaaaaatttgaatttcaaaacttcaaataatattctgaagcagtaattgatttcagctgaaaaagtcatcaacaaaaaagttgtataactcatcgagatctataacttttattttggtcatttcttcatacgacaaagtgatagtaatattttcacaaaatttacatagtttataaaactatataagagatatgttcattttgtgaacaatcttacaaatcactttatcggatgaagaaaactcttttcgtctaatatattgacgtgcaatccttttgcgcgttcgtgaaaaaaataatatttttattctgtagtacaaaattaaattgttcggtacaacctgagcagcagctgagggagtatagaaatactagtatatgcatcgtcgtacatgagtacttcatacgcgcgtgttagttggatttgtcccactgaaatactcccttcgtctctaaatatttgacgctgttaacttttttaaacatatttgactgctcatcttattgaaaaacttttatgaaatatgtaaaactatatatatacataaaaatatatttaacaatgaatcaaatgataggaaaataattaataattacttaaattttttaaataagacgaatggtcaaacatgttttaaaaaattaacaacgtcaaatatttagtgacggaggtatggtatacgcggatcctatacgcagataagcacagtagcaacagtaatgcaatatatatgtgcgctacagtacagggccattttgcactgcaactaatttactgtaccggtactgtttatctgtatttctattggccggatagctatatggattgcatatactctcctaaaga

SEQ ID NO: 18048 - DNA, 1438 bp, Oryza sativa
ttcctgcagcccccctggaagttcgtggtgaactgctagcacaaatcctcccaagagtggaccgacgcgggtggcaagttcattagccaaccccacgcctgacccttcagggccatggggaagaaattcgccatgaccctgtcgtcatccccggcggcctcgatcccggtcgtgtagatctggagaaactcggcggggttgacgcttccgtcgtatttttcggtgatggtgggccggaaccttgggggccaacggacgttccgaaggctcgccacaaaggctcgacagccggcaccgccaaccggggacacggggggccggcccccgtgcccggaccgaagtggtgctccgaacgaggaagcgccctccgttgcgtgggcggcgcgacgagtgtcgcgccggcgctcgatgtcgaggcaggcatccggccccccacgcacatctccttgggtcggaggcgttgacgagggaatggcggacgaacggcgggtaacggccgccgcttgccgcgccctccgcctcgacgacatggagccggcggcggcagcgccagaggtctcggtggcggaggaccgcccgccggcgcctaggcgctgctgcgccgtcatgaccaagtcggccacatcatccagccaacgtcgggctggagtctctggatcggggacgacgggcgggtgacgcaggagcgcgcccgcagcctggagcgcgccctggggcgtgccgccatcgccgtagacgaggcggcgacgcgccccgtctcgccgtcctcccccgtcgcccgcgggcggcgaagtcgcggatcctccggcctccccgagcgcctccccccgcccaagatttcggcgagagggggacggtagggtgcgagcccgacggcgcgggttctgctccccgtcgtcaccgctagcgttcggagagagcctgtgcgccactgcccgctcggccattgggctgagcgggagaagcttggcgcacacgaaagaggacgagggcttcaaaagacacgcgcgccccctacctggcgcgccagatgacggagcgtggggctcctcaccgggagaccgcgcaggccctcctttgccggttcggccgggggcgctaagtgaggttcttcgccctcgatctgaggaacgtcagcgagaaaagaaatgcgcaagacacgggcgacgtagacaggttcgggccgctgagaagcgtaacaccctactcctgtgttctggtggatctgtgtgtgaaggaatccagagggcggagagcgagagagagttcaggctctaggaaccattcgccagagtcccaactccccctcctttcttttcccccctcttcttttcttaggcctgggcctcctttttatctggtcaggggtcaccacatgggcctctagctgcctaagaagggaaacatgctttttacaatcagggctgggctgcaggaa

SEQ ID NO: 18049 - DNA, 508 bp, Oryza sativa
caaggcggtacagcacccgagcggcggcgtggtgtcgcaaattcaggtgcatgagggcgaccgggtcagcgcagggcaggtgctgctgctgatggataccgtcgacagccgcacccagcgcgatgcgctgcgcagccagcagttgagcaacgccgcgcagcgggcgcggctgcaggccgagcgcgacggcctgcaggcgatcgctttcccggcattgctgcaggcgcggcgggaggagccggaggtgatgtcgttgatgctgttgcaacagcagctgttcaccagccgccgcgcggcgttgcagagcgagctggcggcgatcgcggagagcatcgccggatcgcaggcgatgctggaagggatccggcagtcttacgccagcaagcagcggcaaaaggccatgttgcaggagcaactgagcggcatgcgcaagctggcggcgcagggatatgtggcgtgcaaccggctgctggatctggaagggcagtatgcgcagatcgacggccag

SEQ ID NO: 18050 - DNA, 1357 bp, Oryza sativa
tcctgcagcccccaagcagaaattgaaaaggtcattgaaaagatagtcgagagaactagcttatcggaggccaaaggaagcagcacctggaaaaatgcaccctctagaacaagagtgccactccggctattcctctttccagccaagaaaaagaagccgtcactattggcatgtgtaaacccggctcttcagaaacagcatagtgacatggtattcttcactaaatgaattaggtactcctgtctatctgtctaatgcaaaagtgataaaatttcagctatgttcttatgagttggtggaatactggactaacccgctccctgttttgatgatcaggccttctggatgtaaccagattcgtcatcgagctaattaggtgcatagcaggtcagaaaacaagacttaaaaatgatcaaatgatgacatgttgtagccaaatgccatagacggctccgttcacattgttagtgtttactaaacacatgcctgtattccatggggattactataagatgtactttaaggtgtatttaagtacatttttgacaagaaagtatatttgtcagtagaacattgcagattgtgagatcattcagaagatatattcatagttaattctttcaacaaaacaaaatcgtttcaggatataattctttttcggcgggccaattgcattgggatttagcttgtgctgttgggtaagaataaaccgttctgtgttgggagtttataggcacgcacctgacacttgcgaggcaagcattccgtcgagcaggtatcgagcattgccgtcgacacgaatagcccacccatcccccaagccccggccgggatgatcaactcttcaccatccaacgcaggggatggaggaacgaagcagtagcacaagaggggaaacgggatcgccagcggccggcggccaccgcgcgccatgaatccctcgctccctctctctctctctccgcctctccccagtttgagccgcgaacgagcgtgacagatgggccctgcagaaacgggcctcaagtagatgggccgagaataaggcccacacggtccccacctcccctgccacgtggcggcgcgtcgtcgtttgcacgcagctcgacgtgacgggaatatatctatccatccataagagcaggtacaatagcaggctataataagccagctataaatatattttaaacatataaatgagaagagagaaggacaacgggctatagatttatagacagctgtagcacggactctaagacacagtgtgtgtatgatatgtgggaccatatatcaatagtgtggtatgtaactattgtatgaatgagctattagattggctatagatgaattaaagcta

SEQ ID NO: 18051 - DNA, 4716 bp, Oryza sativa
  unsure (1)..(4716): unsure at all n locations
catcgtagtttcggcttgtttcctggtgaaataatctggtagtatatgaatcaagttggcaacacttctctaaaaagaaaatcaagctggcaaccattctctcgtgtgttgagatatgattagttattagttgtcacgcgttgaatgccttgtttctgttcaagtatttgcacgttagtcatgttctagagtcagaattttgcaacgaggattggtatggtaggtacaactacttttatatttcccagtaggatatggctaagatcggagctgtctttcggtactatatagatgcctccacgctgttcattgcacaacatcaatggttggttttctgatgagagtggatcgtttcatgtattggaaatatcaaagatttatttcatgccatctcattccaatttcaagaattcagtttgctcataccatgatcatcctactttgtttcagatagcttagcttgattggggtgggtgacaatgggaggtggcaaggacaagcatgacgagagcgacaaggggctcttctctaacatgatgcacggcgttgccggcggccatgggtatcctcctcaccagggataccctcctcagggctacccgccgccgccgggagcgtacccgcctcctccgggggcttatccccctcctcctggggcttaccctccaccacctggggcataccctccacagcatgggtaccctcagcctggtggctaccctccacctggtggttacccccaacatggtggctaccctcctgcgggctaccccggatcatctgggcaccagggtatgtaattcttgttcacttatgtgctattaaggttctgttcttgtcatttttgtacaattcttgttgaacttttaagcaaattcagtattgagttgaattgtggtaattccctcctgttggaccatgcatgatatatgatgctgatcatgctgtatcacctatgccgtgatatgtgaagtttttatctttattgcaatcatttgcgctcatgatgccaactccattcttaccacttcgtcttagttgaatgcatgatgtttcttctccaattattagatgccattatgtgtgtttttaatctacatcgtactgcaattcctgctgaactcgagtaaacacctctgcattttgcacatattctgaattttaggattgatttggattactctagttcccttctgttgtaccataccacatacaactcttgatgcttcatctacactttagatgccatactatgcgtattttttgttaccatcattgaactgtttcagcaaaatggtgtgactctgttctcagcgttctatccttagagagtttctaatgtaatgttgcaggcggccatgggagtagcggtggaggacacatgggagcaatgctggctggaggcgccgctgcggctgctgcagcctatggggcacacaagatctcttctcatggccatggtggacacatgggctatggaggccatggaggctttggtggttacggccatggctacggcggtcaccacggcggcaagttcaagcatggcaagcacggccaccatggcaagttcaagcatggcaagcatgggcacggcatgttcggtggtggcaagttcaagaagtggaagtaatgcgcatgatctgatcatgctggaactctgtttaggctttaactgaagtgcttgcgcttggctggttaaaagcctaaaaaaagcctctcgaatgtatctaagcaggatggagctntgctcagttgctgctcccatccttcctctatgatttggtactctagtatgtggctcaatgacaatatggcttgctaataattaattaaataccttctgacgcttatgcacatctgtgttctaatgttctatagcctgatagatatgatgtgttgaaaccttctttgctgcttttctttcttctgtgaaagtttatgttaccatttattggtaactgctgtctcctgggacataattgttggtttctgattgtgaatttataaatttttaaaattttggatgtgcaatgcaacattagactggggagatccagatttttttcagagatctgagctcttctcgacttctcctagcctcctgatatagttataaaagtggtcagaactaataagatagataagttgtcatatatgttgacaaattgtcattgtatccctataatttggatggaggtatattcttctttgcggagttgattgataagtaccctttatgtaattgtggttatgaattaaagtttgttttagtctggtgttgactagtactctctctgtttcatattataagattttcgtattgtccacattcatatagatgttaatgaatcttaaacacatatgctagaaagtcttgtaatataaaatggggggagtagtttttaatttcttgtgtcaattaaaactatacatttacataagcataaaatcaagaaaaggttttgttttaaaaaaaagattagccatgtcattctaaagggacaatgttacaacaataattttgatcaaagattaagctattttgactgcacaaattagaaaggaacattctttttgtgattaaacgtactactccgccgtttctgctcaaaacttaccgacaacgacacacagatttccggcgcatctaattcccccactatgataagataagcaaaagcaagggctatgattttacacggcagagttcaagattctcacaattaaataaggaacataaaaaagcatgctttatttatcgccaaaataaaccttactaatttctttccataagccaaacaaaccaaataggacctcaccattatgacctttaccaaaatctaataaagttccaaaaccaaatagcactttcacactaataaccttatgatctttctgctttacaacatattggtaagatttattttagcaacaaagtaaacatgccataaatgaacaattagaacaaccagtgcaagtctccttctccaataaacatctccttccatacataaacaccaccaagtcaaaaatcagcacgtcactacggctatatatatagtacacgtgaagaacaatcaggtcgcaatttagcttttactattctaatcagcaactccaaccgatccactaattacacgtcagcttgcttagccgcgtcgcgctgctctgcttgatcatcatcaccttctccgatcgatcctcctcgacgccgcccacaaatataaatcccacacgcgtcctcctcctcctaataaactcctccaattcctcgacgaatcagttttctcctctgattttccaccacaagatctctagtttctttgatttcttgatcagacgacgatgggagggagcaaggatgagcagcaagacagggggctcttctccaacctgatgcacggcgtcgccggcggcggcggcggccatggctatccgtaccctcctcagcaggggtactacccgccgccgcccaccgcgtatcctcctcctcctccggcggggtacggcggcggctatggctaccctcctgcaggttaccccggctcgtccgcgccattccaacacggtacgcgtctcgttcttgttcctgttcgattctgttgtgaacttgtgatgattatatatagtcgcttaattggaattgtgattttgttcctgttcggctcgattcgtcgaattgatcggtagtagtattaggttggatcaatttgctgtttctatttcatagattttgcattgataggatctatccccaatttagacccttttttgatcttattccctgttacatcggtcacatcggatgtttaacactaattaaaaatattaaacataaactaataataaaaaacatttcataacccttaaccaatttacgagacgaatctatttagtctaattaatctatgattagcctatgtgatactccagtaaacatgtgctaattgtagattaattaggcttaaaaatttatcttgcaaattagctctcaattatgcttagttttattgttagtctatgttaatatttctaattaatatttaaacatccgatgtgacaggtactaaaatttagtctcttatccaaacaccaccttagctgccataatttgcaaacctttgtaacctttctttggcctgatttagttcctaactttttcttcaaacttttaactttttcatcatatcattccaatttcaatcaaactttcaattttagcgtgaaaaacacacggtttgaatcctctgtttttggtgattcagacaaagaacggtggaattctgttcgtacaattttaatcgttttgaggactccctgattggttttgcaggtaaccatggcggaggaaacatggggatgctagctgcaggtgcagccgctgccgcggcggcgtacggcgcgcacaagctttcccacggtcatggccatggaggctacggctacggtggccaccacggcggcctcttcggcggtcaccatggccaccacggcggcttgtttggaggccatcacggacaccacggcggcggcctcttcggcggccaccacggccaccatggcggcttgtttggcggtcaccacggcttcggtggccaccacggacaccatggccaccattgatggtgatcaccatatcgtgttgcacggcgtgttcaatcagtgcgagtgataagatgatcatgagttggtttgattatactactataaact

SEQ ID NO: 18052 - DNA, 9752 bp, Oryza sativa
ttcctgcagcccttattatcaatggccggtgaaaattgaaatagttgaaatcataccggatttacttttacaaaatctaaagaagtgctacaatattatcgcgtttgtgggaggatagcgaaaatctgtcaaatctaaggtagattaggtgagatgactagcaaaactttcttttgtgggactatcggttctttttatcagcttattttactctattattaaaataaatgatttatttcacgtttcaaataaaattctagcaaagcaccgtgcactgtacagcgccacgcctacgcccaagcagcatacaacagttgtctattatatatgaaatgaattatttacttactccacgcttctataccgtgcactgtacagcgctgcacctgcgcccaggcagtatacaacggttgcgtcggtgatgaaacagaacaaaatttaccctgatcctatgcatactaattatctaattgttaactgatatattaattaaaattaaaatgatataaattagttataattagataatttacatgggttcttgtgactttgagaaaaacaacgtaggaaataggaagctacatagtgctgcgagcatatatgcactaaggctataatattataaatgttatgcaacgctatatagtgtagccgagcatgctctaaggctataatattacacacccgtaatcaaataataaatatgtagcaaccgatattaaatgtatagtactattacacatttatattaaaaaaagatatttggagggaggatgttcctccaaacatttttttaagaagtaattgtgagcgtgttagagattaaatacgggatcttggggttgaaaccgtgcacccttgccactacactattaagtgcatctcattattgcccacttatgaaaatcaaaaacagtagaatggattcgattcattgtccatgaatttgatatcttccaaatggaacttattttgataatcaaatagagtggtttcgaccatctagcactctcccctgtaactatgtttatgttttgtcgtttatttataaaaataagggacatattctcaagactccatattggacaatgtccacgaccaagaatgagacatcagtaactataatttagactataccgaaaattggaataattaactttttaccgcaacaagtgtgagtggaaaagaatttttccactttacgagatgatgttacgagattaactaaatgtattattggcactatatagttaggttagaacccattcactttggattcgagtatgagactcgatacggatattcttgtttaccactaaggccctgttagtttctcctactaggagaggataaaattttggattagtgtggcatgcttttcaaactgctaaacgatgtgtttcgtgcgaaaaatttctatatgaaagttgttctaaaatatcagattaatctatttttgaagtttctaataattaaaactttaattaatcacatgttattaccacctcgttttacgtggaacacttaatctttatcttcatcttcatcttcaagagattcaaacaccaccgtattcttttagtgactaaaaaatatacccgtgcgttgcaacaggtaaatgatattttaattttattgttgttatatggtttagctagagtaaattcacagtaggattcgcttggatatttttttagaaaatcataagttgtaattaggaatcattatttcattccaaattagcatgcgagtttttttaaagagattttttatataacttcttttgtatttctaaaagcaagttagcttaaaatccaacttaaacaaggatttgtatttctaaaaacgaataaatttaaaaaccgactcaaacacagatgacgtaccaaaataccggcaaaaaaatcttcaatttttataatagtagaagtaggtggcatgcctatcaatagtaagttaattatgatgattttatcaagagtaaaatgcagtagcgtgtcggcgcgaccatcctcctcccctagtcgccgccgtccccctccctcccatcagtgccgccgtcctcctccccaagtcaccgccgtcccctccctcctgtcagtgccgctgtcctccctcccgttgcgcgcttgcctctggcacggctgctcggcgaaaccgcggcagtggcggcgctcatggcgtgcggtggttcagcatcgccaccgctgtcctccccccatcaacgccgccccgcgctctcgccgccctccttccaccgtgccggttggccggcgcctcgccaagcaccaccgcgacggcccctcccctcgtgccgcctcttaccaccgagaaaaaagaaggaagaaagagaaaaaagaaggaagaagggagaaaaaaaatttcatgtcatcgtccacgtgacatgctacttaggcaagaccacggtcaaacgcggctttggaccgggatgatacatacaataaactaagtttagagacctcgatgtgcgctttacaagttcgtgaatctaagtgaaacctcctgataagtttaagaatcgctggtgcattttactcttttatcaatctcgttttgtatttgaaggtagggggtaaaatatgtctacttacattctagaaatacttacgtgtaataaagtgtgtctttaaaagaaaaaaaaaggttaaatgcattcctcccctaccacatggacgacgcggtccggtcgcctatggcccacatggcagtgacgtggagcacaaatgacacgcttcatcccgcccaccattccgggtaataatcaggttgctaatcctccatccatcgcgtcgccttgcttagccgcgtcgccatctccctccatcaccttctccgatcgatcctccccgacgccctccacgcgccaccgccatcgcgttcgctatatataccccacacacgcgaacacatcttcttcatcttcctcagctcgatcacttcgatttctcctctaacttcccgcgacaaagctctagtttctttctcgatcagaccacgtacgacaatggaaaaggacaaggggctcgtctccaacctcatgcacggcgtcgccggcggcggccatgcctatccgtaccctcctcagcagggctactaccctccgccgcccaccgcatatcctcctccggctggctatgctgcgccataccagggtatgtactcgatcgtcaactgattctagctttctgttcgattctgtgctgcagatcttgttctgttcttacgattcatctttcaaaagagattctgttcgatcgtcgtgacgaattcatcgccaagatttcatggtggttgttgtttttttttttcaggttatggaggtagccatggtggaggagggcacatggctccgatgcttggagcgggtgcagccgtcgccgccgcggcgtacggtgcacacaagctttcttcccatggcggccatggaggctacggttacggttacggcggtcaccatggcggtggcggcttctttggcggcgatcaccatggccacggcggccatcacggcgaatactatggaggccatcacggacacgacgaccaccatggcggcttctatggcggtcatcacggacacgacggccaccacggcggcttctatggcggtcaccacggcggtcaccatggtggccaccattaatactgctctcagcttctcaccatgcctgctcaataagtgagagtgatagatgttggcttggcgacatatatatatatagtttgatcatgctaaactcaaatatgtggataggtcttaatttctagaggtgaagtgtggtttggagaagcttttctccatactttgatttcatttactctgcttgtgtgtctgagtgatgacaatatatatatgtggtatgctaattactaattaagtgcttatgagtgtttataccctgtgtttactgtactgatagtgatactcaaggcagtcctgccgttggcatgtctggaagcttaccagcggagaggcatcggtcaggtgtggcggaggccatgtgccgcctggcctctggtgttcggatggtggttttggattgggagatataccacggcggtagggttgtgagggttccaagcgaaagcttagcccaatgtttcattgggccaacagtggctactgtttcgggcgtggtaaccctcctaagggcactgttgaggtacccccttcttcctcggcaagaaactctgggtgaaagccttgtccagttctttggatggacgacgacggtgtctttcagtgtcgtgatcttcttgggggtgtcgttttttagagtcttcgctccgtggtgatgttgtaggcccagtggcgaccggtttcgtatagcgacggctggttcggtgctcgctttccctttctgtagcttgtgtttgggtggttggcacatggttttgggcgtatgctctagtgcacatctttccttgacacttcgaaaatcagctattgatgaaaaactttcttgtaacattttcttcctatctaaattacattggatgacctccttcggtcatcccgacaaaaaaccctatcagagaaaatttgtttttatctgggttccaccagctcatgctcttccttatgccggtatttcctaattttgtatttacaatagtttctggtttatgtaggacaacgtccatgaacatgaatgagattgaagcatatagcatttctgctaaattacaatatgaaagataagaaaatgtgccagcaattataacttgggagtttcataatttggacatgccccctgaaagtgatattctacaacatatttgagatgagcaaccaaaaagaaatcctggtgagagaggtgatcataagaggttatgggtgtttaacattcaggagatcttttggcccaactgagacagaggaatggactgagataaaattgtaatagagaacactgagctgagtagaaaccaagataagttggtatggggattaacagcaaataagagatatactagctctatgtatagtacaatgacctttagaggggtagtggataataacatgcaaaaggtctggaagtccaccttttttgtttagagagggtttttctttacccggcctctaaatctagagaagggtaaattaaatttttttacctggcctcgcaaataccccaatctaatcaaatatatgcagccatttaaattgaaaacttagccccgcaaataactcaatctaaaaattcgctcatacgaagatttgaatccaagaccttgaaatgctactcaggtcactacaaccactaagctataagcctttttgcacatggagatcgaattcagtcaactgagcagctaaaaaagaaaggttgggaggggtgatgtttactgtctcctatgtggagaaactaaaactactaaccatatagtgtttagatgtcctatggcaagttttgtttggtgttggtctagagatgttttgggttgggcaaatactcctagaaatttagatgatttttttttctcctgtgcaatatcagaactaatcccatcaaggaaagaatcaagcttacagtgctggctgccgtttgctggtgattgtggcttactagagataacatggtctttatgaatgcgttggttttatgttatactctgcctttccaaatcatttctatgttgctgcagtggaagaagctgcttcgctctgatgaggagagcacgctgatggtgctgactcaaaggatgaaagagatggtggcaagactaaaaccgacgagaacaggagttggttgattccctgcttagtctgttgttatttttcaatagtttgatcttcagtgttaagttgtcgattaggcaggacttcactatagttatcttttgtgttggtattggaagcacgcgtataattttttcttaagaattttttgtgatatttgctaattgtacggaaagctcgtgtacatataatacgtttccatcttatttgatacatgttgctgctccatctcgaagaccataacaaactcctacaactgaaacctgtgtgatggagatcagatcagctttttgggatcagctgaaagtctgtccaagatatgctaatcccaacccaaatcaaatcagagacaatttattatggagaaaattaacctcaagacatacactctagtttctcttttatcctactaactactccactaattgatttactacttagtactaagtactccctccgtcctaaaatatagtaatttttagctataaatctgtccagatttataattaaaaattgctatattttagaacggatggagtagtaattaatcaaaatgctccactaatttgtatttttgaggataacttcggtacctgttgctataccttgaagaccataaaagaagtcctacaactgaaaccatatgtgatggagatctgctaatcccagcccaaattagagacagaatcaagtcatcaacacatgatttattatggaagaagaaattaacctcaagacatacacactcttactttctctctcgtcctactaagtaagtactcaacaactaattactactactactaatcactaagcagtaatccataatgaatcaaaatgcaaggtgttgtggaagagggaagattagtcggcggcgaagacggcgtcgttgagctggaaggcgccggtgaagaaggccggccagcagaggtaggtggagaggatgctgctgacggtggaagcgcccatgagcatgttcatcaccacgatctgcagctggatggcctccagcggcgacgcgccgcccatgatgaggccggtcatggcgcccggcagcgcgatcagccccaccgtcttggcgttgtcgatcaccggcgacagcgcgatcaccagcgacctcctcacctgccgcgccgtcgcctgccgcggcgtcgcgcccagcgccagcgccgtctccaccacccctcgctgcatccccacgtcctccctcagcttcttcatcgtcaccccggtcaccgtcatcgcgttcccgaccatcatcccggccaccgggatgatgtaccgcggcgtgaacgggaacacccggagcgccacgaggagggccatggtgacggaggtgccggcgaggatggagacggcggcgatgtgcttcccccgcgggacgtggcgggcgcgctgccccgcggtgtagccggcgacggtgaccatgaagaggtaggcgaggaggatccaggcggcgctcttctgggtgaagatgaactggaggacgaagccgatgacggagagctggaggaacgcccgcgccatggcgtacagcatctcgccctcgagccccagccgctgcgtgaagctcagcgccaccgccatcgccaccaccgccgtcgccgccaccggcttcagcatgcccaccaagaactcccgccagaaccccggcgcgcccgggtccacctgattcaccaccaccagcagacgctgcagcagcgccgccatgctcgccatcatgcgttccagagcgaggcgaggcgaccgagcgcgttgatgaagacgaggaggagttggtggtggtgagcgagcggaagcgggggaggcggcgagcgagggaggcgactacgccttcttcttcggctttcgcggtgtttctctctgcttccttggcggcgtcggcgtggcgtttgggtgctacgtggggaaggcacgctggatggtggggcccacgctgcagtggcactacagtatttgtgttttttttaatcttgtcagttgatgaagaactacagtgcccgcctctcttttccatcttttattaaaaaaaattaatatcgtcagttgatgaagagttgaaggatgctgtctgctcatgtcctgaatttcctcgtccctatgtgagaaaaaaaaatgaaaatgatcttgtactacccttcaacctcaattcctcaaaataaattcatttttcacaagtctcacacatattgatatagaacccaaaaaactataataccctcctttatcaaattccaatgtaattattctcattttaaaaacacatttatctttgatttttcataaactcagatacaataattacttttataacttattttaagttaaccaagagaaacaaaaataaacttattctacaaagtatttgcacgagagaaaaattcagcagatgctggaatcctttgctttgctcggtgctgactgatgtgtaatgcagtaatggatcgcacgatgcaaaggttgatgggtctcttatgctgaagataaaaaggcagaaagaagaaagatgaaagagagataggagctgcaggatttcagacacagattgtgagagaaacaacaaatccatggattccatactccaccttctctcctcctttttctgccctttatttgttgacaattgctcacccattgatgagaagaaacttgtcctatgaaatctctcatcacacactacttatcaaggggaaaaaaaagcttgtaattggtcattaccattggagcctgcacaaccaatattttttcaattattctcagctttggacatccaacaaaacaaaccaaagccagtgacactgacagtgactgcggccggtttcagaggtccagcctcagatgggaactggaaattgcacacgcaaatagtaatactatgataaaaagggccagaagtcaaacaaagctaaaaaatgcatccgtcaaaatcttggtataagcataaattaatgataatgattaatgaagccgaggaaaagaaaatgactccttaaacagtcctgaatcatggcacttgtactagtagtaagatttttaaacatgcacatccatacttgtagatcatgtccaactgcttgaataatccttacccaagtatatgttcaacgaacctgctgtacacgactggtgatcttgaacgagcaaggataatagagtagaaagattttccattacttagcgtaaacccaaactaaaaacgattagacggctgtactgaacatgatggagtccttcagtttttgctaccgccaggcttcttgtaagactcttcaacttcctttgctttccccatccaatccctcataagtttcttcatgtttgggacgtcatagttctgcgcaatgtagataccacacccgatgccgacacacactgagaaagtgttttgcaggaaacccattggagctaatctgcagaaaaataaagagaacattgtgaacatatgctcagaaaccatgaaccagctagctggtgggtctatccaacctgtagctgcacttgaaggttgtatgcacatgccaatagtaaattgataagtaaaatatattgcacatgcagggatgtttgttttggggaatcacatggggagaactgaattatattagtccaagaataaattagcatgacaagtgtaaacaaccaaccctttcttattttgcttgtaattgacgatttgcaacaactagcaatttaatagttgaacagcagcaaggatctcagaattacacatgaaaacctgaaaagctcatagccacatagaaacaacaatacagctcaagcattgacaaggctacacgactgctttctctgattatcccgttgagttgcaaagccaataacaagtcttgactcttgactatagccgtatacaagaaatgacatatataaacagaagaacttagcactataattactggcttactgatccacaggcatggaaatccagatagaataaacaaaaaccatgcaaaaggtcacctgatcccaa

SEQ ID NO: 18053 - DNA, 729 bp, Oryza sativa
cctcatctcatcttcttacatctcccactgtctctctctttcatgtcttcctcctatctcatcttccagtggcttgtcaatagggatgaaaacggagcggatagtttccgtccgctctggacaaaaacggatacggatacctttcggatcggataattctcggatatttcggatacggatacgaatatggatattttctcccggatacgaatacgaatatggtatcaaggtttccgtcggatacggataataattcggatatccggtgaacagtgctattcggatatccgcaggacccatgagacataccccatttctttctaactctataaccttcaatatacctttatagattttaatagtagtttatctcttaatactagtccatactattaatattatttaaattttaaaaaatatttataaattatacctcattttatataaaataagctaattatatatgttgatatttatttctattagaagttgagttggttttcgtgttccgagaaaaatttgtttccgtattcgtgtccgatcatattcgattcttattcgtatttgagataatccgtatttgtttccatattcgttttcgtatccggtaaaaaatataaaaacgaatatggtatgagcattatccgtccgtatccgctccgttttcatccctacttgtcagcgagcaagttccttcccacccgcgtcgcggtcagcgacccccccccc

SEQ ID NO: 18054 - DNA, 4975 bp, Oryza sativa
cccagagaaaatatagggagggaagaggtgggaaagaagacgatacaaggtggaagttgctaacatatgggtcccacatattgtttcaacaagtcaaccgcgatcaaactgccatgttggtagaaaccacttttcaaaaaaccatcgaaggggagttgatttgcattggtttttgaagacgaggagacattataccggttttgcggttgaggggcacgattcaacatgagcgtgagagggagataaaatagacgtattccaaaattaaaagtctaaaagataagcagtattttctgggccgactaaagtatgggccgtggtccgatggcactcgccgttacatatcatttgcattactgacaagtgggggttagcgttaggtgggacccaacacgtcagcatcagaagagagttaataattcggtcacgcccgtacgaataccactatgtactcctaattaagaaaaacaaagtactctatagtcacaaaaaggttaatgataatttgttagttggagtgggcttgtcttgtccgtgtttagtcttcctcctccagtctcttccttttggttgggagaccgccggtgggccccactcagatcgatcggccgtcggattcacgcaacacaacgcatgcatccatgcaaagaagcaaaggtcaattagagcagatacagtagcgggctataagccagctataaacatatttttaaataataaaagaagaaagagaaaaacagcgggctacaaatctgtagccagttgcagcacagactttaagatgtaacgagtgtatgacatatatgcccgggtattaatagtatagtaagcaactattgtatgaattggctattacactggctctagataatttgtagctaatagttggctatagtattaaacttgctcttactcgactatagtccactccacgtagtatgcacaatcaagccgagtaattgatatccatgctaattttatactagcccaatttaattaattaatgaagcaacgtcgccgtcgacatggagtatataaataaattttgggttatttatatagtacaagaagtacactatagagcactattttctaggcaagcaaagctccatcaccaccgacgccgtaaatatatacttcttggagtatatgtatggagtatgtaccgattgagataaggtgtagttatacttgcaattgcaagataccactgcacataattttgaccgtccgtttgtaactttgtatgattaatggttcagatcaaatgctacagtaatcatgcgaataatactccgtgctgtactgtatgcgtcgtacagtatataatctagacttttcgatttgcatccaacaacatgcacttttactgcttaagttggagtcataatagtgactgcagctgatccgaatccagtagctacatcctactagatttttgttttgtttagattactgggaaaaaacatatgatctatttaatcgtataggtaaattaaatataaaaataaacttaacaaatagcttaaaacaattgatctaaataatataacagaaaaatatatttttagtatgtattttttaaaacacatagaaaataatctacttttaataacccgataaataagctaagtcattccaccccataactcattttgttataaatacctacccctattcagttttgtcgcaaaaaccacttcaatgcgcttgtgtttaacccgaataacatgtttttcataaactgtgagcgtcaatatgatctttattaaattaaatatttcaaagatatcttaacatttttcttggagatcccacaaacaaaattgttgattagagcttaaacattgtcgaactgagttttcgctatatgcacacaaaaaatcaatgaaacataaagaatagtttaagtctaatacaagtatttggataagattgactcgactagcttagcctatgatggttttacatgggtggtaatagactgcttcggttaagcatgtgtgtattgggatggtttttgtaataagatggaatagaaaggtggcaataaaataacttatgaagtgaagtgttaaactttaaataacttatagggcaatttttgcataagctaaaaagaataacatggcgtagctaatcgcagtcatggagtcactttctcatctgcatgaaaaccatcgtaagccgtaggaacatgggcttctttggttaggtttaggtttattggcttaaacttttaagtcaacttattggcttatatgatttataagttgatggatttactgtcctaagtttaatgatggagtcatatatctatcgtacataagtaaaaaccttctccatctaacttttagcttaataatgtttggtttatggcttaaaaaaaccaaacgaaaaaactaggttagacttttcgacttataagctaacttataaatcttgaccaagagggcctatattcaacacatattagtatatgatatatacgggttctggttagcgaataagccaatgtatcagtgtcaaggaggttggttaatcactctatccatctgcctgtaaatttctaacaccaatgagttcatatctctttattttataaaactaaaatggtataaagctatagcttctggcttattcttaattttcagtatgtaatcaatattcaatcgatttttttaaaaaaaaggtccagctacttcatatatatgtatgtaaattaattactgtgtacagtactaggtacattctctagctacatgcatgcaaatgtgggccatacacaataatataatcgcacatgtcaccactgatcagtgttagttacgctatggtgtttatactaccctggcatacagtactttatatgcccatctgtccccataattatttctacctcattatctttgctttgaaaccatgcttaattaattcttgatcatatccggcccaattaattaattaattaattaagtaatttatgccttgcataatgcatcacatgacattatggtagtggtacgtgtatatagagctggcgtcatcatgcaattaaataattaattaagcaggtactagtacatacagttatatactactgatggtgaatgctattactcgcgtgtgtgcatagtttacgtacattctgtttcgttgtcaaattaaagaggaattttctttgctaccaagcacacaactcgtacaagtactccacttgtactgtcgattgatcttccttacaagttttgtttggttggcagtcacagcttgcaaagcgtgatgcgtcgcaattgtgtgatcattaaccttaaattatgttcaaaattaagttgatattgctttgcttttgaaacttatttattttataaagccttggtgatactacatttatatttttcctctacacgaaagataactgcacacatatcgttctacacgcacgacttacatgcacccccggacacacgtttaaagatacggatatcaaccatccatgatttcactgaatttctatcaaaagcgcactcgtgtgtacatagtattcgacgacatcaaaatttttatctttgatagattaagtcatgcacccacgactgcactataataccagcggtgctttctctcatttttttcaaatccaccatgatgaaaaccttacatttctaactctattttttatggtatttaccggattgtgagagcgtacataatggctttctttagcttgtgtcaattgtattataatatagatttattctacctccgtcccaagaaaattgcatttctagctctaaggctttgtcccataaaaattgtatttctagccatgtgggtcctaacaaattgattcatctagataagtttccttaagttctctcagcttgtaattaaagtatgctaattatatgggttaattctctcaaacttccttttaatcatttatatatatggaatgtgtgtatgcaatgggttcattaaataaggtcattgtggtcatttttcaatcctattgttttgtcctaaattagctagaaatgtaatttttatgggatggagggagtaaattctctactatacacaaaccccagtatttatatagatatggttgatcaaccttacctcacttagccaaatgcctccaaagatcagtccaaatggtttcccaccatcttaattaaagaaaaagaagaagagttgagagtccaaacagtgccactactcactagtactactactgcttgtttctacttaccaccacagttccataataatcaatttaatcatgcatacaatggtttggtgggcaatgctaattgctatggcatcgggatgcaatcaccatcagtaggtgaagggagttgatccatgattagcactcaccagctagcttagctaatcgctcgccgctgccgctgccgctgctggtggtggccgtgacggtggcgctggtggtggtggtagcatcatccatcatctttgtctttggcatgtgcctccttttgcctttggctccctcctctccttccttccttcccttgtttgccttttgcctttgcagcctttttcgcaagggagcccacgcctccctctcgcttcttctcctcctcctccttctttgaagagcgaagagtgaagtgtgaagagttctctcttcttcttcttcctcagccatgtccacaatgctgccctccaaatccaggtgtgttcttggtagttctctctttgtgtgtgtatggattggttgatgttggtttgtttggttgggggatttgttttttgttgccttgtgttcttggcagatctaaaccggtcactgcgttcactcagatttgtttttattttttttccctcgcgctgttcgttccaattgagtactggattgtgctcgctctcggaatctggaaaatgtggcatcttgaacgaattggataggtttcagttggaacggcttcttgatccgctcgattcctct

SEQ ID NO: 18055 - DNA, 1752 bp, Oryza sativa
attggagctttccgtgaatcgccattaatggcggtgacattgacagatctgggccgaacgagtcccccatcagcagggggcggccgagcacgccgtcgtccaaccaccggccatccacgccgtcctccatccaccgcccctccactcccggcgccaccaggaggagcatcggcggcacgccgtccacgccgcgctcccgcaacaacggcgtcggcggcggcggcggcggcccgttcaagtccgagcccaactcgccgccgtcggccaccgcccgcccccgcctctccttcgaccgctcgccgagatccgtcgactccaagcccgtcgtcgagcgccgggttcccaagatcggcactccacctgatgtaagtgcattcatatatgcaagcattgttgtgtgagttgttgatgctaattgtgtgaattttttgttgtgtgagttgttgatgctaattgagtgaaatttttgttgtgtgagttgttgatggtgattgtgtgaaatttttgttgtgtgagttgttgatggtgattgtgtgaaatttggtggaatgcagaagcagccgaggaaggaggcggagctgcaggcgcggctcgagtccgcgcaggaggatctcaagaaggccaaggatcagctggccttcgccgttggcgagagggatcgccttgtcggggagctgaatgaggcgaagagggttgctgatgagacgcatgagaagctccaggatgcgctcatggcgaagaggtgggccgaggaggcaacggagatcgagaagttccgggcggatgagctcgagcaggcgggcatcgatgaggcgcagaagcgggaggaggagtggcagagggagatcgagtgcgtgcgtggccagcacgccgccgatttggagacgttggtcactacgacggaggagctggagagattcaggcgtgagcttgcgatggcgaatgaggccaagaaagctgcacttggccacgcagacgatgccatgaagatcgctgaggtcaatgcggagaaggtggagatcctctccagtgaagttgtccgcttgaaaggactgcttgattcgactgcagagagcgaggagagtaaaaaccgtgaaaccgaggagcttgttaagaatctggagtccgaggtttcagttctgaagggcaaactagaggaagccagaattattgaggagaggttagccgagacggaaaaactgattgaggagcttaaatcagaggttgctgatgcgaagaaggccgaatcagaagcccgtcagctattcgaagaatggaagcacaaggcaggattgcttgaaatggaattggaggcagttactctctcagataagttcaaaggtgaatcgcttgcctccacaacagaagaattgggtaagatccagtctgcattacaagatagagaatctgaaattgaagtgctcaaaggaaagacaactgccttggaaattgaggtagcaaggcttttagcagatgtcaacgaatccaacgagcaatttgatgcatctcagcaagaggtgtttgggctacagacgactatagatgttctgagaaacaagcttgaggctgctgaagaagcagcttcagaggccttaaacaatgagaaggccgcgaatgtaaagattgaaggcctgaccgaggagaatgtgaagctaataagcgagttgaacgagactagggatagagaagagaaggagaaaagagcagtggaagatcttactgctgcattgagtgaggaatctgacaaagcaa

SEQ ID NO: 18056 - DNA, 4636 bp, Oryza sativa
tgttagattaccagtaattaattgcttccacgatgcttattatggaaggattagtggaaacaaagatgcaaacgtatatacggtcctatcaagaacgtcgtttggttgagtagaacaaaagcaaccagcaaaatgtccctatcgttggtgcctgcctgaatgcaactcccaaccaatattcaccaaactcaacgggtaatgatgttgagacaggaaatactcaccaaactgaaattttacgttgtgcatgtttgaagcgtttttttcatggataattgagacggatttttttacttgattagcatggtaaattgatatttttcagaaataaactttacaaatacttcagaataattggctaaacaatgcagtagaagaattttcttttctaagaaattgtatctttagaagcatgggcaaataatccatgaaaaaattagagagaaaaaaaaagctgagcagaacaagacctagtatatcggagtaatagaaactaagtacacaggaaaaaaaaacaatatttgattatcttaaaaattgagaaaaattaaaacatggtgttaatttcaatcttgcggcaagtggtgacttggggtatttttgatatgacagaaccagaagaagatacaagcaagcaaccttgcatgtccatctatcaaagtcttttgaataaatgggttacttatctatctctatctatctccgtactgttctttcttgcgtccagactcttgacgacgtgtgacaccatggtcttcttgttagacttgtgcaagaaacaaatttttagagatgcagacaaagatggaacccggcaatttttccaaagtctgcacctggggccttaatttctctgtctatatactacctagctacctggccttgctctgtctaaaaacctagccatcaaccaatcttttatgacatacctctctctcctctcgcgtcgtcctccccgggcgactcggaaggcgacgacgccgccgcctcttcgtcttcagcgcctcctcccccgcctcgccgccgcctgggcgggcactggcaaagccgtgcgcccgcaaggacggagcggcggggcctctctccccttgcacccggcggctggggacgccgctcgtcggcgtcggtggtgcccagatccgccatggctggccggatctgggggagcggcagtcggcggcggggaatgaaggtggcggcggtggacgacgtggagcgggaggtggcggctggggacgccgctcgacggtggcgatgcccagatccgtgcggtgctagctggatctgggggagcggcagccggcggcggggaaggaaggtggcggcggtggacgacgcggcggcgctggagttggcggtggcggctggtggcgactgtggctggctggcgttcgcgtcggtgactgcggttgtcgacggtggcggctgactgctggcgaggaggcggctggtggcgaggcggtggctgctatggtgactgctgaagcggtgacggtggcggcggctactgatgcaccggctggcgacgaggcggcgactggcgagctgtggcggcggccggatggctactgtggtggcagctggcgaggcagtgccgcggcagtggcggccgtgtctggcagcggcgactgccgacggtggcggatgcggcggcggggaaggcgcggagaagtaggcatggcggcggggaaagatgcggcgacgggggtacgaacgcggtgtcgacgaccggaaacgggcgttgatgaccgcgaaagggcggcggtggcggtggaaggaggcatggcggcctcagacggctagtcgagggtgtggcagacggctgcatttggccggcgcggcaatggttggaggagggtcggagaccggcttggcgcagagaggcgcagccgatggtagcggaggccggctcggcgcgagaggcgcgggcggcggagatggaggccagcttggcgcgagaggcgcggccggtggagggaggccggattgacgcgaggcgcgtccggtggaggaggccggcttagcgtgagaggcgcggccggcagtggaggaggcgaccttggtgcgaggaggagctgccggtggatgtggcgcggtcttcggcgcatgaaggctggccggcgggggcgccggtgcagtggtcccacatgtcggcagaggttgagtggtggtggagcatctgtgcatgagccgtggattcgcacgtattgagcagcaggtgaaaacctagcccggccttggccgggccggcaacgagggttaattccccctcctgagggcgttgtcgtgctgtctcatccctcacgggtggttgctgggcgaaagcccagtcttggctcctttaagccccgacggacggcggcggcggttttccgtcgtttctcttcttgaagacgtcgttttggcatcccttagccgaagcctctcgatcggtgcaagcatgctctaggagttggctttgtgttggttctgagggtgttcttttgggcgatctcgtctgtattcctttgtcatctagcggcggttagtccggtgttagccttctcccgattatatgtcttggcgctgttggtgtgtgggtggcagtatatttttttctttttcctggttacgaccctccagggttgtaatcttataatttttttcctgctctatcaatacaacttcgcaccgtcttgtgcgagtcgttcaaaaaatcaaccaatcttttcttgtgaagaaattctggagattatttggaggcacgataagtgccgcttgctgattcttcctggaaaaggatgtggcagaattttgttcttgttgcattgccggggacaaataaaaaatacagaagttttcaataattgtaggacccccttaaatatatatgcaaaatggcgcagcgataaaaaagtactccctctatatcagttatatcaggttataacatgttataagtcgttttgactttggttaaagtaaaactactttaaatttgactaagtttatagacgaatttaataatatttataataccaaattactttaatcaatgattgaatatattttcataataaatttgtttgggttaaaaatgttactattttttttataaatttaaaatagtttgattttgaccaaagtcaaaacgacttataaacgtaaaacggacggagtacatgctaatgttcttctatatacgagaggagctgcctcggagctagatgtattaattgtttgattagatcgcattaaggatacacatataaaattaagttttactcacaaattaatttttatagttaataagccgttacggtttataggacacgctcaaaggtagcttgggatggacatttattcaccctatgtcggaaaaaggacttctccatacaaaggactatcaattaaaacatgctaattaaaatattgtgtgatgtgtgtaaagatcggatataaaaatatactctctctgtctcaaaataaatcaacttttaaaatttaaactttatcctaaaataaatcaacttatacattcttatctactttcggttcgcaaaccgaaaaattctattcctttgatatccattatccacctattcactgatactaatttgctatcaataagacgtgttttggactttatctatattgtttgaaatgaatgaactgttagttttttttaattattgagggaagcattattatacatgctgaaatcatctatagttgaagcgatgcaacagtggtggtaaatctgtcacccacaaactctcaataactaccctgaagtcatttaattagtataataaaatattgcttctagagttaatgtcttcttccttctctgcaatataagtttatcatactaaaattcgatggtgaagtcacatactcacatacatatgtagttcaaatgctattttaataattagagtacgtgcatagaattaaaaaaaatctaacagttcattcatttcaaacaatatagctcatgtagcagtgctcgtttttcgtagcaaagctcaaacatttagctagtgatgacgaaaagtatcaatgggagcttgatttgcatatatcagcattttttcattagcacgcacaatatcattcacattacacacacatttatataagggagaatttactatttgccatatataagaggtagctggtctgtgattactttgtacaacaaaagtttcatccttcagagaccagataatacatagaggattaattaaacatacatacataattaagagcagtctacttataaacaccaaacgcctaatatgtaattagtactacttgactgtacaatagttaagtccatctcttgagtccacaactccacaacagccaaagaccacctgaccgaagcctaattaagggcatgtttagctggaaaaagaaaatccctgatgtgatatatgcagacacatatttgaagtattaaacgtagtctaataataaaataaattacagattccaccagaaaactgcgagacgaatttattaagcccaattaatccgccattagcaaatgtttactgtagcaacacattttcaaatcatggtgtaattagacttgaaagattcgtcttgcaatttcctggcgaattgtgcaattggtttttttgtctacatt

SEQ ID NO: 18057 - DNA, 5000 bp, Oryza sativa
  unsure (1)..(5000): unsure at all n locations
tacttgttagacttgtacaagaaacaaatttttagagaacccggcaattgttccaaagtctccagctggggcctttctttgtccatctacctagctactactccatcaatcaatcttttcttgtgcagaaattctggagattatttgaagcatgataggtgatgcttattgattcttcttggaaaaggatgtgcaagaattttgtgcctgttgcattgccgggggcaagtcaaatttacaatagtttttgataattttaggacccccttctcaaatgtacatgcaaatgttctatgtatccgaggagctagttgtttgattaaattgctaagaacatgtatataaaagtttaatccaataatcttttctggagaatatttgaaagcgtgatggtgctgcttgctgattcttggaaaaggatgtggcagaattttgtgcttgttgcattgccggggacaaatcaaaattacaaattttgttttgatgatttgaggaacacccttctttcgcaaatagaaaccccttctcaaatgtacatgcaaatgttcttctatatccaagaagctatacataatattaattatttgattatatatgtgtgaaattgccggtaattggaaaaaaaatcctaatgtgaaattgtaaaaatagagagtaaaaagtacacgtattcagaaattcagataacataggatatgcatactatgagcttttgattagactctacccaattaccaatagttttgtcatcacttctacaagttgtaattgttttgaagatactagtactagtagtagtacgttttgaatacacaaatacaaacatatccatgcattgcttgaacaggactactgaaataatatattgtcaagtttaactaaggtctattgcgtcaaggaaagcttttccaccaataattcgaggcaggtgacattctccttgatagtgtcactattagttaattaagcactgaaagctctgactttgctagatgagcctatttataatgtccaaaatatttcacaaatggggggtttcattttctcaaatccagctagccctctgtaagtctgtatacatccaccattcaccatcaagcaataaagaacataaaactgctggtccctcaaaagaaaatcaaaagaaaaaggaacaaaaaaataattatcattgtgcccatatttctttttcttttaaaaaaattcctgttccatatcccacgtgtcaagcacccattggccaagatgacgaagtggagaaaagtcagaagaagaaaaaaaagacattagaaatggtattcactgtagcgcctttctgtgcaccctccaacaagatggcgcactagccctatggtacacacctttggtgtgtccttgtctgtggggcccacatggaaatcctggaggtggggcccacatgtaaaggtgtgggagcaaggcaggtcaaggcaagaaggcaacaactctggggtcaattccggagtgtgctttacaatgatgtgtgattagtgattactactacaacggcagcaggattgttgaagacgtcagcttctgtaattaaacatgcagatgcaggaggaggaaggatccatgcagtttcttgcgttttattattgcaatttgcaaccagttcaaggaggcatatggacaaaaataatgagaaacctcggcgtttggatgcgcatattcgtagccacacgctggtttatttttacataacaattcgttatctatcccacgctctagtactacgctatagtcctgcatcgtttttaacacgtgcgtttttcaaactgctaaatggtgtgttttttttaaaaaaattctatacgaaagttgcttaaaaaatcatattaattcattttttaaaaaaatagtaaatacttaattaatcacgcgctaatcgctactctgtttcccgtgccaccctcactcccgaacgcaaccctaatggttgattctaaataatgatcattttctcgtgcttttcaatgctagttttggttatattcttttacaattttgtacgggctatgtgctaacaaatatagtattgtgaaaaaaataattcgatgacaaaattactgagatttatgttgcgaatatctaatctagatggtttcaattaaatcaacggtcaaataataaaagagaaatgatatacattttttttcttatgaactctcttaaaaagttgatgtagtaaaatgtgattgcatcttggctttttttttcgcggggaacaagaactttgattactcagctaaattgtcctcccacacaaggtgagaaatggaattacaacttccatgcggccagagtccgtaagggactcacacctggctttattagctagagtatgaccagctaagaaatgtgattgcatcttggcttttaataactaaacaaaatggttaagaaatgtagtgcatatatagcactactcactatttcacttagggcctctttaaatcgcaggattgagaaaacgtaaaaataggaaaaacgtaggattttaattggaatgtaagtgtaaaacagaggattgcaaaacgcaggaaaaacacaggaatgaccgtttaattgaaccgcaagaaaaacgtaggaattggacgagagagatagactcaaaggaaaaataccaagaggttaaagctccgctaaatttcctccaaaatctctataggattgtccattccatagaaatttcaaaggattggatatgatcaaatcctttgttttaaagagcttcataggaaattttcctataggattgaaatcctccaaaattcctatgtttttctccaaattaaagagaaacaacataagaagtaggagtacataatcagctttacacgtgtttactatttcctaccgtttgcctttcttgatacagacaaattgtatgggttaattagcagaatatccatgaacctctattgatatatgcaaaacagaagaggaaaataaatcgttcaatcttggtgtacaagcacaaactgcgcgtggaaaagacgccaaccaaaaaaaaaacaatccagggagctgcatgaatgaatgaatggatggtcatggaagtagtatgatatgattccattggagtggaaaagagtggacaaatcatagaaaaagcaaacccaaaccaaagcaaaatcactgcctttttcgttcctcaattccgtagtcctccaactctactcgccttcacctagcacatcagataggtataggtgcgtgcgtgccacttggctgctgtacagtgttaacaatttttaccggtccggcatttcgaaccatgtcacgatcataaattgctccgtttttcgaccaagtctaaaaaaatgaaactaaaattttagttttttataagatttatctagatttcacccatttggatccnaacgaaatgangaatatncgtgaggggcggtttttctggtgtttcttcgtacacactaaaaatttatctattctgaatgtaaaacatgatagttattatagtatattaattaagtataagcttaaaaaaattaatatgatgtttttaagtaaatttttataaatttattttggaaaagtaatgtttaacagtttaaattaaggtcaacaaagagataggagcgaggtttacgttaccgctggtaaccgcgcggttaccgggcttaccgcggagtacagtaatataaatacgtggtaaccttcttagattcaaataaatttaaaaaataatttaaatgtttgataaattttacacggttttgtatgatttcacggttaccgtggtaatcgtgtctaccgctggggcgcggtagcctcggccccaggcggttttgggaaaccctggtaggagctgagaaggatgcgaaaccaacggtgctggctgctctgaacgctgttggttgctgctgccccgtggcgacgacacctcaccggaggcaacacaacgcaacgcatcgaaatcgaaccgcagcgatccagcgagcggttgagtgttgccgcatcaccgagtcaccgagacatttttccttttttctttttttgtaattgcagccgcctcgcgaagcttcgtgccaccttcctcccgtcgccactgcgtcaccttccctcttttcaactctctccctctcacacaccgcattgcagatttcatttgctgcaccgccctcccctcccctgcaaatactactagtagcacaagagccccgcatgccgttcacacctgcccaccaccaccactcgtagcccccaccgcaaccacccacacccacaccactctcgatccttcttccccgactccggccggcattggcggtggtggaggaggaggaggaggggaggactctgggctgtgtctctgtcttgcgcggcggcggcgcgagagggagagattggttgtgattttgggagtcccgacgtcgcacgcgcgcgcgtgtggagtggaggaagaagagatcgcgtctcttcgcccgaggatttctcgggatatttttatttgttagttagtatttataaagacgccgcggcggcgagggcgaggtccccgattcagtttggtttttcttctcgccgacgcgcagatcgatcgcgtcgtggactgggaattcttccccccgcattgttgtttgaggtgaggtggtggtggtggtgatcacgatgggcgaggccgggcaggacgcgccgccgccgccggagaagggcgtcgaggtggaggtgttcccggcgtgggcgcggggcgtggaggagtgcgaggcgcggctgggggtctcggcgtcgcggggcttgtcgtcgcgggaggcggcggcacggctgcgggcgcatggccccaacgagctcgccgagcacccgggacccacgctgctgcagctcgtcgcgcagcagttcgacgacacgctcgtccgcatcctcctcgccgccgccgccgtctccttcgcgctcgcgctctcctcctccgccggcgccgtcacgctctccgccttcgtcgagccgctcgtcatctt

SEQ ID NO: 18058 - DNA, 3091 bp, Oryza sativa
cgacatccaggccaaggagtgtatggtcttcgccggcaccaccgtcgtcaatggcagcgcaatctgcctcgtcgtgcacactgggatggccactgagatcggcaaaatccacgcgcagatccacgaggccgcgcaggaggacgacgacaccccgctcaagaagaagctcaacgaattcggcgaggcgctcaccaagatcatcggcctcatttgcgctttggtgtggctcatcaatgtcaagtacttcttgacgtttgagctcgatgggtggatgccgaggaacatccgcttctctttcgagaagtgcacatactacttcgagatcgctgtggcgctcgctgtcgctgccataccggaaggacttcctgccgtgatcaccacgtgccttgcacttggtacaaggaagatggccgccaagaatgctcttgtcaggaagcttccaagtgtggagaccttgggatgcaccaccgtgatttgctctgacaagaccgggacgctgacaacgaaccagatgtccgtggcgaaacttgtggcgatcggagatgctgaagggaaggtcaggagcttcaaggtcgatgggacgacatatgatccccgggatggtagaattcacgattggcctgcagggaggatggatgcaaaccttcagacgatcgcaaagatttctgctgtgtgcaatgatgccagtgtggcacattcttcacatcagtatactgcaactggaatgccgacagaggcagctttaaaggtgagaatcgataaactgtatgatattctcattctgttaaaatgctccagtttttggtccaagaatatggtgcatagtttgttaatccactagttgcacatttttcaatcatgatttgagcagtctaggaacattgcctactgaaagtaacgttctggcatgtgttggttctaattcagataatgctgcttgatgtttggaaacattctgttgtaaagctctgatataacttttctttattggtttcttctaggtcttggttgagaaaatgggaatacctgaaggaatgaacggattgtccttggatccatctgaaacattaggtaagctagaaatgccttttcggcttagcttagtattacctatcagtttcaactacgtgcttcttaattaggatattcttctaatcacgcactgagctgattatgaaattgtttgctaacaggctgctgccaatggtggagcaatgttgccaagaggattgctactcttgagtttgaccgtacaaggaaatcaatgggagtaattgttaagtccaaatcaggaaggaatgctctacttgtgaaggtgttaattctttatttcttgctatatagtcatctcttactgatctgctggacatgtattgttcactgcatctttttagtatgttccagtggttggcgttgtcattagtgcctgattttgtgttcttaataacagggagctgttgaaaacttgctggagaggagtagccacattcaactgcaggatggttcagttgtgccgttagatgaaaaatcaaggaaagctattttggaaaacctccatgaaatgtcaattaaagctctgcgctgccttggttttgcatacaaagaggatctagcagaatttgcaagttacgatggtgaaaaccaccccgctcacaagcttttgctggatccagtcaattatgcagcaattgagaccaatttgatattcactggtcttgctggcctaagggtaagatgatgcttctcatgatatgttttcaaccagattgtttccttttttttttaactccaatcaaggaaaattcctgtttcttcttggttcaacaaaatatgcatagtaagcacggttatggacttcaaggcatataaggtctaaataagatatacttgactaggagataacagaaaaggctaagcatgaattctgtatagctaggataagctaatccaaacaagtacagtcatcaattatacagaaagtgatttgctggggaccagtatttaagatcaatgatcatcttgtgtaattttcttttcttggcaacctatcttcttacagtattaatgtatctttctcattgatgttttaaatatgacaggatcctccaagggaagaggtttttgatgctattgaagattgcagagctgcaggcatccgtgttatggtgataacaggagacaacaaagaaactgctgaagcaatatgccgtgaaattggtgtgttttcacatgacgaggacattaccttaaagagtcttacaggaaaggagttcatggcacttgaggacaagaagacactgctgcgaaggaaaggtggcctactgttctctagggcagagcctaggcacaaacaagagattgtgagactgctcaaagaagatggtgaagttgttgctatgactggagatggagttaatgacgcccctgcgctaaagctggctgacattggagtagcaatgggtattacaggcactgaggtatgtacttatttcagcaccataggttgttttcagccagtgctttctttctttaatttcctgtgcagaaatatacaggccttaaaattttcatgacatttccctttcagtccttttttggttgttagccctttgtacttgtctgccaatatttcagctaatcatctatactgttctgagttaatttgaacaacattggttagagataacatgaatttataggtcttttattgtcccaaaagtactgatatctgtgacataatttgaattggtatctcacttatttttcttttgttcaggttgcaaaagaggcctctgacatggttcttgctgatgacaattttagtaccattgttgcggcagttggtgaaggaaggtctatttacaacaacatgaaagctttcatcaggttagtgatctcagagcctgtttttgttgttgttctcactttttgcttcaacacttgcttttgtcacttctattttggcagaaacaaacagactaatgctgcagtaaaacattgtttcatctacatttgcacctcatagttgtgcaagttatcgtgtttttttgtctgttctgaggattctagctgtctttcttcactgctgcag

SEQ ID NO: 18059 - DNA, 709 bp, Oryza sativa
cataataaggtaggcagaaatgtgtataatttgatctaaatatttcatctatatataataattcacagaagcaaaatgttgccaacagaacaatgctgctgcctgctggtttgctgtgagctcagtatagtaccatttaggacaaggaataaaagaacagcaaaggttatcaacttcccaaagagtgatgacctgttttgagaaaatctctttcctgaactttcttgtattggacatatttctattgaataaacatcatttggtgatcattgttacttgatcacaacaaattcagtgacttttgttactgatgagtctgaagaatcactgttagcattttactcgcccttctgcttcctggttcgcctcttggggcctgatgagcttgtacaccttccgacaaacttgagaacctcgtcgatgagcaccaccgggagtgcaacaagcaacaccagcagccactcgttcaagctgagcggcacgatgccaaacacttgcgcgaggaacggcacgtagaggatcaagaaatggagcccgaacgacactgacatggcgaggagcagccatgggtttacccaaggaggcatcctcaggaggctagtgtcttcggagagggcgttgagtgagttgaacatctcaatcgccaccaggacagacagcgagagcgttgtcgccttcactttgccaccatggaagtactcgcatggat

SEQ ID NO: 18060 - DNA, 700 bp, Oryza sativa
tcctgcagccctaactggaagagtgatctggccgagtggtgtagctgacaatcctgggataacaccgtggaagggtgcattactcggttttaattccgtgcgaggaatctgcatatcgtccagggtcttagcgaaaaggatgttgagtgcgctgccaccatcgatgagagtccgtcggagcttgacattgcgaaccactgggtctagtaccagggggtaccgccccgggtggaccacttggtcgggatgatccgagcggtcgaacttaagtgctatctctgaccaccgaagatattggggtgtgttaagctgaaccgcattgatctcccgttctgttagcttctgttttctcttagactcataagccaggggtccgccgaagatgtgattaagttctttgcgatgatcttgaaaaccagtcggggcatcgtcttcatcgtctttcttctttgatgtgccttgatctccgtctgaaggtttacgtgcgttcttgacgtattgctccgtgaactgtttgtagacgaagcaatctttggccacgtggttggagttgggatgatgcggacattgggagttcattatcttgtcgaaggtgttgacgcgggaacgttgtcgggaagatggagagatggtcgccacaagttcttcgggcttacgcttgcgatccttgtagttgttacttccactccctcctgcagtc

SEQ ID NO: 18061 - DNA, 10568 bp, Oryza sativa
aattgggctgggctctgggcctgctcggcccaccattcagtgactcggtgaacgttggtgtgaagcatagaaggcgtgaacgtgcacgtgccccgcgccgccgagaggaaacacgacaactcaaaccaatcctgtccgtccattcatcccgtagacaatctgacccgtccatccagatctgcgacgccgaataaatagccctcctcctcccacatcccgagctccgcccttctgacagccgccgcatccgcgccgcccccgacctaggatttcgccgccattctcctccaaggttcgagatcctcctccccgagctccggatttttttttctcaatttttctctcgctgttgttcgattccgttcctgcacgcgcgcgcgcgcgcgctcgccgtaggttcgtttgtttcatcgattatagcaacctagtgtggggaaggaagggataggagcgaaatcggaatcgaacatgtcagatttggaggccatcgaccatggctgccccatcgatcgccggcgcgggtttgtagagcttcgcgtcgcctgtgtgccgctcgcagagaggatttggtcatgttgcatctgattggatttacttttcgccgagggcaacaagtaacaagctctagataatttttgacctgaaatcagaaagctcaagtaaaaagggtaaagctgtgaagcctcttaaacccatatgtttaaacccccacccttgtgcttaaacccctcttatgtataggtttatgtgagtattaatgatagcatagactgttggtgacgcgctgctttctttgtaagtggacattgatgattctatcatatagtgcaagcgccccagtttttagtctctgctatgtgttaattagttcatgcaacctaagatgctacaattgctcatattgtgattctttgtagttacattgaattgtttgcaggcacgtcaagtagatttatttcatgttagtcctaagattacaggttcttataggggatgctatggctagacttgccttaactgattctttgtgaactttaatggctgcatctatgcctgttgatcttgtgtatgctgctctgggcggcaaggcctatctaatcatgccatagctcatcctctaatgtgattacttgctaggccccctaaatatgagtctattctgtagtgaaatggatgttgtaattatcaaaaacttctattccgttagtttttcctgcataaaaaagcatccactaactgtagatcttcatttgtaccagtattcatcctccttccaatcattcattagattttgaatagtactgatgtatttttgctgttgtcttcaggagatgccgcgctatgatgatcgttatggaagcacgcgcttgtatgttggtagactgtcttcccgcactcgttctcgtgacctagaataccatttcagcagatatggaaggtacggacagaaccatggtccttaagattttatttctctgaagcgcagattttttgcagaagtttatggattttttttctgttaaatttgtaataagctgcattttctgtgtataaatgtaaaacactattactatgataacacttgctaaacagttgatattacaacaacttggtacgttcaaatttcactgtagaaatttaattatttcccattaaaattgtaacctttccaaattgtgtgcgagtcttctgtgctgagcatagactagtaagcactggatccttcctaccctttccaatgggccagctcatagcagttgttgggttcagtggtaccactcttttttcagctactttgtggacgagttccttgaagccttttggtgtggcattttctattaattcttaaagtatgctgtagaagtacccccccgggtcttgtgtgtttgacttgaatgatcttgttgaaggtttttcggttttttacacaaaccgggaggtctgtgatggtctggtggaaggggtgcccttggtggaattggtggccattcttccaaagtttgtcgaggactttgttgaagggcgcccttggtgtaatgttattgactgttttagtggacgttgcaagtcggtgatgcatttgagtacttgaatcatgatggcttactgtttggcaaccattggtgcagaatacgtgaagtggagttgaagcgcgactacgcatttattgtatgtgaattattcttccctcatttttttctctcttttctaaattgtaccttttagttcacaagtccaacatttttcggatgtctcttttaccaaacaggagttcagtgatccccgtgatgctgaggaagcaaggtacaaccttgatggcagggatgttgatggaaaccccattcttggtgagtttgctaaaggggtatgctgttcttcggttgcttctctaagcacatcctgattctattttttttctttaatatgaagctgctgctgaattgatctgtattttttgttgactgatgctcttttcaacaaattgagcatgcaggttccacgtggtcctggtggttcacgtgaatatatggggagaggacctcctcctggaacaggtcggtgttttaactgtgggattgatggtcactgggcaagagactgcaaggctggtgactggaagaacaaatgttaccgctgtggggagagaggtcacatagaaagaaactgtcaaaacagcccaagaaatctcaggtattgattgataagttgatctgataaagagcagcacttgcaattgttccgaggtactgtatttgaataatttaacttagatttctccaatgcatacttctttttttttcaggcgtgagagaagttattcatgctctccatcgccacgccgtggacgtggtcgcagtcggagctatagccggagccggagccggagccgcagttacaggtatgcttcaaacgccacatgttcaaattataatacaccatgctgtctgtccaaatcacagatatgttatgttgacctcaccctgcttcttttacattctttatatcagccggtctaggtccagatccctgtctggatctcccagggcacgcagagagcttgaaagatcaaggagtcttagttacagcaggagtcccaggcgatccatctccccagcagcaaatgaaaagaagcgcagccccacccctgatggtagccgtagtccaaggagtccacaggaccaggtgagcccaccacccaaggataatgctgagcgtaatggctcagatcacggtgacagcccccggggcagggagaacagcaggagcccgtctgatggctaccgtagccctgcagctgccaacgggcgcagcccaagcccaaggaacaatggaagccctagcccaatggacaacggtagccgaagtcctagggatggaaatggtgacggtggtagccgtggtggctcacgctcacctagaccgagcgagtctcctgaagcctgaaatttaatcgcagtctatggcgttcgtcatgctatggttgtaatggttacattcccggtttaagacgagatgagtgtatttgctcttttctcaaaaacgacagcgtattttgttactttgtgaatgtcatgctatggttgtaatagtcacagtcctgttttaagacgagataagtgtatttggttcttttctcaaaacgacagcgtattttgctattggtgtacgatggatggtccgttgaacttccaaatcacattgtttttgcagatagatttgtatcttcagattgaaaattttgttgctttgcgcgctgaacgacgtcgatggcagttaccttttatctttgaagtgctaaatgttgttgtagacctcagaagctgctttggaagtttgtggtggctcaggtgttctcgacttctcgtcttcgtactctgaatctcatctcatgtcagctcgtggcaacaaatgtgtgcagctagtagctactgtaaacagctacatttgtcttgtactcttgtctcgtgtttctgttggtcagaaacatgcttggaattaatgcccataaagagagcataaggaaggattaccccagttactaacgctaacacgctttgcagctgtcaagattaccccagttaccccataaagagaccatcactaacacgctttgcagcgggcatttggagtagcacttaacaagcagagcctaaaagcagtaaagcacgcagtaatcggaataagggcatgtttggttggacaccagacgtaagcctgagaccagccgggaccttgtttggttggtgtcctgaccttagtttctccttccctggcctgagctcttttggagccttattagcctgagtcaggcgagctccagggcggcgcagctacgctcattaatcctaattaccgcttataataatgtagtataggtactgtaaattgtagaagcaaccgaccatacaaatatattttatttgtgctttcaaggagggatacaacacatccaaatattttatttttttgctaacactttataacaaccgtaataattaaaagcttaatcacgtttagttttcacaggcgcggaagaacaaccaaacagacaagtgagacaagtgttcaggctgcctgagcaggcaaaatttatcatcctatcaggtagctctcaggcacccaaatttttcaggcatgttggtgagggcatcaaccaaataggccctaagtgtgcgtacgactgcacctgttcgacctgcatatcactgtacataagctcaagttttaaatcgttttgacaggtccaagtgaatgcttatgaactccgtgattgattggttcagcgcagttgtatgagagttggatgtatagcactactccacagtaatatgaacgccagtggtcatatatggatgtatatatacgacgccagtgttcgactgatggccgacttcattacggcatcacctgcgcgtgtcagattctattacagaatgagacatttgccgtctgagcctttcattgtggctatggtcatactctcttcgtcccatttaatgtacaatcatgcttttccgtactaaattttgttcattcgttttatttattttttaaaaaaaatcatacctaaaatattatttatgttttatcatcccataacaataaaatactaattaaaaaaaattaaacaacatggacgatcaaatttaaacacgaaaatttatggttgcacttagaatagtatggaggacacaatagctggacaacaaggttgtaccggcacgtatatcattttcgccgtaatatagctctcttgtactactgacgtgccgaatcggtctcggtctatagagccccgaccgagccggactcgtccgaccgagtcggactccacctcggactaatcgatcccatttaaatcgccatcactccgcgcgctctcccatccatccatcatccaagtcaacaagacaagcccgagttttgtgccactctacacaacacacacatggcgatcctccccggcgactgcgtcgtgctcgacatcgacgacgccgccgcccaatccacgccggtgccgtacgccctcacgttcaccgacctctcctacaccgtcggcagccgccgcgccggcctgctgccgccgttgccgacggacgcgccgccggccaaggcgctgctcgacggcatctccggcgaggcgcgcgacggcgaggtcctggccgtcatgggcgccagcgggtccggaaagtcgacgctgctcgatgcgctcgccgggcgcatcgcgcgggggagcctccgcggcagggtggagctcaacggcgaggcgctccacggccgccgcgtccgggcgatctccgcgtacgtcatgcaggacgacgtgctgtacccgatgctcacggtgcgggagacgctgctgttcgccgccgagttccgcctcccgcgcgcgctctcgccggacaagaagcgcgcccgcgtcgacgcgctcatcgaccagctcggcctcgcgcgcgccgcggacaccatcatcggcgacgaggcccaccgcggcgtgtccggcggggagcgccgccgcgtgtccatcggcacggacatcgtccacgaccccatcctgctgttcctcgacgagcccacctccgggctggactcggcgagcgcgttcatggtggtgcaggtgctccgccgcatcgcgcagagcggcagcgtcgtcatcatgaccatccaccagcccagcgcgcgcatcctcaacatcctcgaccgcctcctcctcctctcccgcggccgcaccgtctacgccggcacgccggtggggctcaagcccttcttctccgagttcggcgaccccatcccggacaacgagaacccggccgagttcgcgctcgacaccatccgcgagctcgagcaccagcccgacggcgccgccccgctcgccgacttcaacgtcaagtggcagtccatgcacgccgcactcccggcagctgacagcaaggacagcaagcgatgcaccatgccactcgagctcgccatcacggagagcgtgtcgagggggaagctcgtcgccggcagcggctcggggacggcgtcgtcgacctcggtgccgacgttcgcgaacccgctgtccgtcgaggtgtgggtgctgatgaagcgatccttcacgaacacggggcgcatgccggagctgttcgtgatgcggctcggcacgatcatggtgacggggttcatcctcgccaccatcttctggcgcctcgacgacacgcccaagggagtccaggagcgtctcggcttcttcgccatggcgatgtccaccatgttctacgtctgcgccgacgcgctgccggtgttcgtccaggagcgccacatctacctccgagagacagcgcacaacgcgtaccggagactctcctacgtgttcgccaacgccgtcgtcgcgttcccgccgctggtgttcctgtcgctggcgttcgcggtgaccaccttcttcgccgtcggcctcgccggcggcggcggttcgttcctgttcttcgtgctgatcatcctggcgtcgttctgggcggggagcgggttcgtgacgttcctgtccgcggtggtgccgcacgtcatgctgggatacacggtggtcgtcgccatcctcgcctacttcctgctcttctccggcttcttcatcaaccgcgaccgcatcccgagctactggatctggttccactacctgtcgctcgtcaagtacccgtaccaggcggtgctccagaacgagttccgcgacgcggcgcggtgcttctcccgcggcgtcgagatgttcgacgggacgccgatcggcgccatgtccaaggccgtcaagctcaaggtgctcgacgccatcggcgccacgctcggcgcgccattgacggcggagacgtgcgtggtgaccggcgccgacgtgctggcgcagcaggctgtcacggacatcggcaggtggaagtgcttgctggtcaccgtggcgtttggtttctttttccggtttctgttctatatcgtgctgcactttggcagcaagaacaagaggcgctaagccctttggtatgtatgtgtcaagtgcatgtttgtaatacttcattttttaaaaattttgtattcatacttgaaagccatgtaaaattctttgatcagatttgatgataataaagaattgaggaaatgttcaattcatattaggtcttgtttggcacaattacagttctcatatccacattggatttgaagtttgtatgtttatttatagtggttcaaaattctatatttcacctaaaatgaaaataaaatgattaattcaaatgttatcaatttaattatagttccaggtccatggatagaggttgaaatacccagctctaagaaatcttggatctagagctatgccaaacactcctttaatatctgatatatgagttcaccaatatgcaagttcatattcggtctgcataagttctaaaaaaacaacaaattaaattttaactaagaacggcaaaacatacttttttttagaagaacgacggcataagttctgctggaatttaaattagggaaaaggccgaagcctagcaaagagtttacagggactgtaatagagatgaaatacagcttaagaagcaaagtaaatcagggggggcttaaaagctagtttgcgcaaatccaaatcttgcttgataagatgtgctacttcatttactgagaagtaaaaattttgaaaaaatcttctgtttctttcttgcaagatgttccaccaagtagtaagtagcgagcctctgataatccgtatttgagctttgcttcccacatggttggttccattccaccaagtttcaacgtcagggggatgggacgaggttataggggtcaggttttggaactggtagattagaactacaaaacatactatcgagggattaaaagagtttccctctaaactttgtaaacttgttctgttgtaaaggtgggtgacgatggttccgtcgtacgcatatgctatacttatgcagaaataatagtttgacccattcttacaacacaacaaaaaaaaagtataacaatcgaaaaggggattgaattaatttgaagcataaggttatgcaaattttcattaactttagattgagactcatcaatacgagtgcttcttaaataatgatgtatcttcttttgtgttggtgtgatttatgagtgggttatcagcatgccatttcatcttctgcctcttaccggctggtgcattgcttcgctcgatcgatgaatatgatcgagagggccagtcttcggtaatgaatggttacatttttatgcaaagttaaaatgatggaaagcacaggagtggaatatctaattctgaataagatgacaagatggaaacacaggaagctgctatcgtacaaatatggagtaagcggcagtaaaccagattttgctaccgttctcttgggtggacgatttccctctatcaactagtcaaagctgaaatcagaaagcaaaatggattaattaattaacgttgttcttttttttaagaaaaagaattgtatatctgtggagattatggttaccccatatctacatagcggttatattccagctggatatacggtaccaaatatagatagaatatctttatgaggactcgggttagattctaaacttgtatgtcaagaaaatacccgggatcctagtcggttacgattgtattttatctgtaatcccatattccgttaggatatggactgtactttgtaatacggatcccttcccctatataaggagaggtccgggttcctcttgggacgattcttttttctcccaatcatacaatcaataacacacttggcggaattatccccggacaggagtagggtattacttcttgaataagaaggcctgaacctgtataaaattccttatctctaaacccatccactttcctagcttgatagccacccccttttattattgccgaaatcttgtttcgacagttggcgcgccaggtaggggtccgtcaagttctcgccgactaagtgcgatgggtttcatttctggcatcgacgacttcgccttcccccccgggcaggcgtttcagttcggcagcctcaacttcatcaccaacgacttcggcaagatctctctccttgactcggattcaaaccagtcggggagagaccaggtccccgtgcccttcggtattccgaactcggccgaggcctactccaagatcatctctcccgagtcggcttcaaaccactcgggcgagatccaatctactcttccgcgaccagatcaagacgatgggtcctatccctcaatcctgatgaaacttcctgatgatttggccgctgtcttcactgccaagacatctcccattcgaagatctaggcgagctccggcttcggccccgatccaatctagatccagagaggttggcgttatactccaacctcttgggacagtctcgacgaaagagttggatggttaccttagctcccccggcgttagttctcgactaaccgagatcctcgactacgacgatttcggctaccactacgaccacggcgacctcgacaacttcgacgacagctatgaggataactacatgcccctcttcttcggcgtattcatggctgacaatgaaacggaggaacaacgccaagcccgagaagtagaccaagatcgtgcacgccaagaagctgaacgtcgccgactggaggaagagcgacagcgacaggagcgagaacgactacaacgtgagcagcaagatcacgaacggattgcaaaggaggctgaagatcgacggcaacgcgccttggaatctgggcgccgagcgagagaactcattgggcaacaagacgtcgatggaacagcggtctttcgcaccccccagcagaacgtggttgcagcaatcactctcctcgacaccctcctcaaggaagacgcactcaaccaagctgatcatgttgtcaacatcttgaaccagacgaagaccatgatcgctgcctcggttccagccaactccgcaagcacccgcaccctgactggtagccgaatccttcacttccgatctcatgattattatcagccaagcctcagcatcaccggcacaggttctagtcgca

SEQ ID NO: 18062 - DNA, 2141 bp, Oryza sativa
cccacgagactactctcgcccgcgaagagatccgactggctgcgaccacggcaagcgaaggagaagtgcctgcaaccaagctgacgaagaccgaagaaagtgatgccaagacgaaaaagattcccttagatccctccgatcctgataagactgctgtaataggcgctgagttagattgtaaataggaaagcgcgctcatcacctttcttcagaataataaagacatttttgcgtagaaaccatccgatatgcctggtatccccagagaggtgattgagcactctttacatgttaaggaagacgccaaacccatcaagcaatgactccgccgttttgcacaggacaggaaggatgcgatcaaggaggaattaaccaagctattagcagcaggcttcattaaggaagtccttcatcccgactggctggctaacccagtcctggttcggaaaaagacggggcaatggcgcatgtgtgtcgattataccgacctcaacaaatcttgtcccaaagacccttttcggttacctcgcattgaccaggtggtcgattcaacggccggctgtgagttactcagcttcttggactgttactcgggatatcatcagatccgactaaaagaatccgactgcttgaagacttcgtttattacgccctttggggcctactgctacatcaccatgccctttggattgaagaacgcaggagcaacctatcaacgcatgattcaaagatgtttttcaactcagatcggtcgcaatgttgaagcctatgttgatgatgtagttgtcaagaccaagcagaaggatgacctgattgcggatttagaagaaacttttacaagcattcgtgctttcaagatgaactaaacccggaaaagtgcatcttcggagtaccgtcagggaagttgctcggatttatggtatctcaaagaggcatacaggccaacccggagaaaatcaacgccatcctcaacatgaaaccgccaagctcccaaaaagacgtccaaaagctgactggttgcatggcggcgctcagccggttcgtctcacgactcggcgagcgggggatgctcttcttcaagctgctgaagaaaactgacaatttccagtggggacccgaagcacaaaaagcctttgaagacttcaagagacttctcactactccaccagttttggcctcgccgcatccacaagagccgctactgttatatgtgtcagcgacctctcaggttgtgagcacggtcctggttgttgagcgtgaagaggaaggccatattcaaaaagtccaatgaccaatttattttgttagcgaggttttagccgactccaagaccagatatcctcaggttcaaaagttattatatggtgtcttaaataccgtcaggaaattatctcactactttcaaagtcactcggtcacggtggtcacatcatttccactcggagatatacttcataatcgcgaagcaaatggacggattgcgaagtgggccttatagttgatgtctttggacatatcattcaagccacgaacttcgatcaagtctcaagctttagctgatttccttgccgagtggaccgagtgccaagaaaacatgctagagaaaaagatggaatattggactatgcattttgatgggtcaaagaggcttacaggcactggagctggggtcgtcttgatttccccgactggagaaagattgagctacgtattgtggatacatttttctgcgtcccataacgtggcggaatatgaggcgctacttcatggactaaggattgcattatctctaggtattcgccgactaatcgtccgtggagactctcagttggttgtcaatcaagtcatgaaagagtggtcatgcctagatgataatatgaccgcttatcgacaagaggtacacaagttggaaaataaatttgatggacttgagctcacccatgttctccgacataataatgaagcagccgacagactggccaattttggttcaaaacgggaagcagctccttcaaatgtgtttgtcgaacacctttacgaaccaaccgtgcccagaaaagagacagtcgaagccatggatactcaaggcataagcatgatcgaagccgactagagagaaccgtttataaagggctgcagga

SEQ ID NO: 18063 - DNA, 1664 bp, Oryza sativa
tttttggtttattgtgcagaagcaatgttgccgagtgaagtggaatttgaatcactacgatttcggaacttcaacgaggagggctatgaagagggccgagtagacgacatcaatcgactagaagaagctcgagaagcagctttaattcagtcgactcgatatttgtaagggttgcgccgttatcataatcagaatgttcgatcgcgagcctttttagtcggcgacctggttctgaggaaaattcaaacaacacaggatcggcataaattatctcccttatgggaaggaccgttcataattgctgaagttactcggccaggttcttatcgactcaagcgcgaagacggtactctcatcaacaattcttggaatattgaacaccttcgtcgattttatgcttaggcatttcgtttgtatctttcctctttgactgctaacttcaagttttttccttgaagttttcagtcagggggctactatgataataatggagtgtgatttttatgaattcaatttgcttacttgatgtatcattgccctgtttgatttcttggcttagtcaatgaggactgaaagttttttaacaacttttgcgggttttaggctcaacaaggtttgacaaaaacttttaagaaatcaggaactaagttaagatatcaagcacaacataaattcatcagtattgtacaaattgtgcctccatcatcattattcatcaaaatcattggtacattagttagtcagtcttttcatcatcagaattatcaggaccagtcggtcgatgatcggtgtcctagaatctctcaactacatcagcagcaatcttgtcagtggctttctgcgcatcgctgatgaggtcaagagcagcttcttcgctcgtcccatctgcaaagccatcaatggcatcaacgtcaaccctcggataaagagatttggtcattgccaacgctagacttgctcctatacttccagcttctttgatgttcttgaaatatatatccggagcaactctcagcttgtcgaaaatttcagaagcatcaagtgcactcgggccgttgttattgaagaacatcgcttgaacaattggggcagcagcgttagcaacctcatcccaggctccttcaagttttttgatcttgccaaccaggacgtcgaattgagcttgagacttgatcttgcggtctgcatcaacagattcacattcataagtcagcatatggaggataatggcttttgaagtattgattgtcgataccttcaacttcctttaaagccaagtctttttgtcttgccagttctgccttgtcattttccagaatttgaatctgcttctccaactgagatatcttggcagcttgcactacattaaccccggttaatcatgattacaaagacaacggcacaagttagttgggcagagtttgtgcgtaccttttgatgagccactcagttcaaaattggattcctgaagctcagcaattcgatccctcagatcatgctcatttttcctggcaagctcttttgtttcgtacagctgactcctggtggcttcgagggtcccgagatgagggactagcctctctaaggttgccgttttagcttcgttcctaagatgaatcctctgcaagacagtttaattagcgcctagattaaatagcaaacga

SEQ ID NO: 18064 - DNA, 1986 bp, Oryza sativa
ctagtctcatgtgtcgccgtcacgacaggtatttgaccacagatatatgtacatacatgtcgtgtacaagaaaactacggttgcatttcagctgccttatactataacattttttttaaaaaaagattaaaactcagcctctacatccaaagtggatcgatgtatacagtcgaatctgccaatagtacttaactattacttctgggttaacaatcttatgaaacatttttgggtttttcttactgtcagaaaaggtgtctgaaacatgtacatccataatccattgcatgatttcagcaacatggaactccatggtaagtttcttgaattagtaatgcatgttcaacttgacaagacagatgtttctactagcacaagagccctagtatttggcaaagttgagaagttaagtttgcaccaacctgcttcagaagaaaaaggaagtttggaaatacaagtctctgaagacagtgtaacagctggttgtacacatgtaccatatcagaagaatttgagctgaagtgtctgaaactttaagccgccatttcatactgaccaaataagctagtaggacagacgtctccctctgacccatctgctgacctgaacctgaagattgagcaagtaaatcatgtgtggtgcaaccttttcaatactacaaatttaaactgtttggcagaactaaccatccgaatgatgatagaaaaccatgcctttttggcagcaccaattcaacaaaaggatcaatgcaaccgaacatcttttaatttcagtttccttgaggaaacccaaatgtgcaacaacttgttgcatccttgtcattatcatttagccaggagcaaggcaccagctaaaaacagatagaggaaggaaatatatgattattaaaacagagttaggtagcatacgtcaaatggtacaaaattcagtataccatgcctttttttttttacttttgatattttcaatgctgcccatcttcttaactgtgtgacatatttattgttgataataactattaactaataacagtgtaactctcagttgtacacaacatatacaactgcacatttctttatcgtagctgtgaaatatagtttcttactattgaacatatactgttacagaacatatagttttgcacatttgttcaaaaagagctactcattttttaacatctgtttatcattgatcaactctcttcttctatagtgaaatgcaggagctccttgccgttcccttgaaaaaataataatagtagaaggcataaaaataaaatcagagagagcctcagaacagaagggtcattgagaaacagtatatcaacatgtaattctgtatgttttagtgtataacagccagtaaaactgaacacattcacatacatgaactgcatcttcaacaaaatgagaaaattacacaaacaaatacactactagcatatcacacatttcttgctgtcattaattcagacatcatatcagctgaacatgatcggcccctctctctctacctcctcttgttcttgctgccgacgagcaagacgacgtagaagagagcccggaagaagaacccccacgccacggtgaccagcaggcacttccacttgccaatgtcagtgacggcctgctgcgccagcacgtcggcgccggtggtgacgcaggtgttcgccgtcatgttggtgccgagcgtcttgctgatggcatcgagcaccttgagcttgacggccctggacatggcgccgatcggcgtcccgtcgaacatctcgacgccgcgggagaagcaccgcgtcgcgtcgcggaactcgttctggagcaccgcctggtacgggtacttgacgagcgacaggtagtggaaccagatccagtagctcgggatgcggtcgcggttgatgaagaagccggagaagagcaggaagtaggcgaggatggcgacgaccaccgtgtatcccagcatgacgtgcggcaccaccgcggacaggaacgt

SEQ ID NO: 18065 - DNA, 1585 bp, Oryza sativa
atgaaccccgtcaccatgatcgtgccgagccgcatcacgaacagctccggcatgcgcctcgtgttggtgaacgccctcttcatcagcacccacacctccacgtaccacgggttcgcgtacgtcggcaccgacgtcgatgacaatgtccccgagccgctgccggcgacgagcttccccctcgacacgctctccgcgatggcgagctcgagcggcatggtgcatcgctgactgcggtccttgtcgtccttggtgtccaggagagcgccgagcgatgattgccatcttgagctgaacttgacgagcatggcggcgccgtcgggctggtgctcgagctcgcggatggtgtcgagtgcgaactcgacgaggttctcgttgtccgggatggggtagccgaacacggagaagaagggcttgagccccgacggcgagccggcgtagacggtgcggccgcgggagaggaggaggaggcggtcgaggatgttgaggatgcgcgcgctgggctggtggatggtcatgacgatgacgctgccgctctgcgcgatgcggcggagcacctgcaccaccatgaacgcgctcgccgagtccagcccggaggtgggctcgtcgaggaacagcaggatggggtcgtggacgatgtccgtgccgatggagacgcggcggcgctcgccgccggacacgccgcggtgggcctcgtcgccgacgatggtgtccgcggcgcgcgcgaggccgagctggtcgatgagcgcgtcgacgcgggcgcgcttcttgtccggcgagagcgcgcgcgggaggcggaactcggcggcgaacagcagcgtctcccgcacggtgagcatcgggtacagcaggtcgtcctgcatgacgtacgcggagatggcgcggaggcggcgcccatggagcggctcgccgttgagctcgacggcgccgcggaggctctcccgcgcgatgcggccggcgagcgcgtcgaccagcgtggacttgccggacccgctggcccccatgacggcgaacagctcgccgtcccgcgcctcgccggagatgccgtcgagcagcgccttggtgggcgcgtcgggcggcgccggcgcgtccgcggacgccaggcggttgctgtggcggcggcggcggctcgacggcaggcacgacaggaccccgccgccgcccttcctgacgctgtacgagaggtcggtgaaggacagcaggtacggcaccggcgggccggccgccgcggtcgccgcgccgccgccggagtcgacgtcgagcaccgtgtgggcggaggtcgccatgcagaacggatcacttgcagaatggatcacaccgcggtgttagtttgcggtgcggtgcgtgttggtcgcggcctttatataggagcgtgtttggttggctcgatttgggttcagacttgaagactcgtgtcaggctaaacaatcgactgtgcaaatttatttactcatcacgataaagtcagcaatgtgtaatcaagaatgtaaggtatggatcaagtgcgcaatcaattgcttttcttacaactgttctatatacggagaattacggaaattatagtgtgagattttaaatttgtagcgta

SEQ ID NO: 18066 - DNA, 788 bp, Oryza sativa
ccgcaggcacaccgaacacacacttatcggggttcagctttatgcgggcggagcggagactttcgaaagtttccgctagatccgagagtaaggtctcttggttgcgcgtcttcacaaccaagtcatcaacataggcctcaacattgcgtcctatctggctacctaaagaaattcgagtagtacgttgaaaagtaggacctgcattctttaacccgaagggcattgtggtgtaacaataagttcctatgggagtaatgaatgcagttttttcctcatcctccctagccatgcgaatctgatgataaccagagtatgcatctagaaaacacaaaaggtcgcaccccgcggtggagtcgacaatctgatctatgcgtggcagggggtaagggtccttaggacatgccttgttaaggtcggtgtagtcgatgcacatccgaagcttgccgttcgccttgggaacgacgaccgggttcgccagccactccggatggatgacctcacggatgaatccggcctccagaagtcgcgccacctcctcgcggatgaaggcttgacgttccggggcctgtcgccgcactttctgccggaccggccttgcgcccggccgcacggcgagacggtgctcaatcagccaaacttttgaccgcgcggcagtccgcgaggtcgtggagggaggtgttgtgcacggtacaccacttgccggttgggcgctccctgctgggagcgccggcctccttctttgtgtcgctcgcaggcctcccctttcggggggcccgcgaagcgccctc

SEQ ID NO: 18067 - DNA, 610 bp, Oryza sativa
tcaggtcttggttctaataaacctgatcatatcttatgtttgatgctatttgtacctggagttgtagttggagtgatttcaggtagtcgatcgcttcatccagcatcgaaactttgtcggtctgaagaaacaagaagattagaagttcagaactgaatggctctacaagatcgagatatgtatgaccaaagatgcaccacatattgcataccttggtgcaatttggaagtagctcttgcagcgccttcagcttctcattgatcctatcccttctcctctacaggtatccagatcaaagataagaaacaccaagtgcttataaaccagcaattctgatcgatttgcatgataacaacctaccctttctgaaaaattgtggaactcagcagatctgcttctcctggtaggggtaggccttcttgcttccatcggatcttttcaagaatatattcaccttcctggaaacaagatgtgcaataacagatctaacatttaaagataacatacaaacaagaacaatggtaaaactgtctgaaacgtatgaactactcctaagatcatcagcagagataggatcatgttcttccttgtcatgcatacctgagttttg

SEQ ID NO: 18068 - DNA, 649 bp, Oryza sativa
  unsure (1)..(649): unsure at all n locations
ccgcgggccgcccgaatcctcaaaccccaactccggttcaccgttcacctcccgccagccaaggtantactccttcaccccccccaccctctcctccctcgcttatcttgcgcccgcctttcaaacccacactgttcatgtcttcttgttcttgccacagccaacagcatgtcgagagccgtggcgcgccgatcgttgccgccgttcttgaggctgcgctccgcggtgtgcgacgacggatactggatcggtaggttggaccacaaggattggctttcccccaacgaattgctcaagatcttcgcgaacatcagggatcctagccttattaccagttccttcaagagagcttgtgatagaagggattacaagcccaatgaggcactctatagcatgatgatcgacaggctagcatcctgcaggaggttcagtgatgtggaggagttgctggccagggcaagagctgagaggttcaggttttctgatgagttcttctacaggctgatcaagatgtacggcaatgtggcgaaccatcccgagaaagcaatcgagactctctttgcgatgcccgggtataactgttggccgtgaccaagacttttaactatgttcttcacatgcttgtgtgtaagaggcagtacgaagttgt

SEQ ID NO: 18069 - DNA, 15087 bp, Oryza sativa
aggataagtaacctgaaacatccatacatgaaactgaagtgaacctctagatccccaaggtcatatcttcacttactaatgcttctgtagttgtgctgctactactacaagtttgcagcgtaaaatattccatctcgactttttgttctaccacaagtatgaaattctattgccataagctactaaccaattcttacaactcttccaaaggataacaacacatcgaatgctaaaaactagttcttctgtaacatccaccatggacaaacctgagacaccagccacctgaactggtgagcggcgacaacggcgtgctctttgggcggcttctccttgccaatttcctcatcctccgtgtccacgcacgtggccttcacaacatccttcagcggcggcaccacctccggcatcatccccaccaccatctcccctacatcgccccagccgcccgccgccgccatctcctccaccgcggcggcggcagcgtcagagagcgccacgggaacccagtgcagcgcggggtactccggggaggccgcgcgcgcggcggcgcagaagaggaggaggcccgcggcctccttgctgcgggccccgccgccgccagccggagcctggggatgggacgaggggaggagggaagagaggagggacttggtggaggtggaggagccctccggaggcgcgtagggcgccgcggcgagggagtcccggagcggcgccgcgatgcggaggagggcgtcgcgggggatcgccgcgccggcggcgggaggggccatcggcggcggacgccggactggacagttcgagcaacccacctgcacagtgaaagcccagctaataaatgtttgtgtcgttgtgattgtttcgtgggccggcttgggccagcgttgacgcacaagctggacgaggtcgtctgcggacgcagcgtgtccttgattaggtggggcccacacgtcagtggcccatatttctctgacgtatgtcaaaggagcctcatcctcagtccgcatctgccttatgtttttgctataaatttgttgacaaatttgctcattgactttataggaaaaggtctgtatatactaaattttgtcttagtaagctcttaccatgtgtcacgatgagtatatatagattttctataagtttcatctatttaaatcaaaaggttgagatttataagagttttgcaacgctacagacgcatgacccaatggctcatgtcgtcgaccgtgcatagatggcatatgcatagtagacataggaggcatatgcaaagccgtatatgtcctagtttcttgtttgatggcatgtatggattgaaacaccaccaagtgatgaaaaatagtcttgcatgcatcttttccatgtttcactgcacaatgggcaggagaaaatcccacaaactatattccacatgagccgtgacacgtttttacgataatcacctgtagattataccaaataagttatgatcctaaactatcttacaattagacctatacggccatatctatatgaagagggcaatattatcaaggctagctttgtagtatttagttttaacccctttatatcatatgacgatcaatactttagtacaaccccttaatcccgagatagctagaatagattgatgttgatggcgccactctagttctcgaggaagcccctggtggcagcgctcaaagtctcaaggaaattcccaatggtggcactcacagactcaaggaagcccaccctcaaccgctattaaaagctcgatggcagtggtttggagcttggggcgtcgtgatttcctctccctctcatcttcagtgaggggctctagtgcctgttttcgtagcaaacatgagtttacatcatcaaatgaatcaaaaggatttaaattcttgtaattttacaattgtcacatcaatctttggtgtttatagctgtagctattggatgctatattgttgtcataggggtaggctaaggccctgtttgtttcagcttatgattattataatctagattattaaaccagattactataagttgtattataataaactgacatagaataagctatgagttgtttgtttgtctggattattggaggcatggatcattgggtttgaaaggctaaagtctataatgccctcagctatctgttcggttgatggcataggtgggtaatctttctcaagtatgtaggggtagtgggtttttagccactcaataatctgaaaaaagctcatctagagcagcttattagattataataatctggcttatagattataataatctgctttaataatctacttgtttgtttcagcttactcctaataagctagattataataatcctaagctgaattaaacagggcctaaatctacgaccatgatttttttttcttttgatgcattcattctaaatctaaatgcttatttgtttcaagtggactaacatatcgttagagggatttgtttcaagtgaactaatatattgctagagggaaagggctaaaaggggaggttgtgatgtgaagttatttgttcatagtagtatattaagctacaattttaattatagggacaaactatggtttagaaaagaaagtacaacaattgagattgtctagcaagaatgtcaccaagaagacagtggcaatgtcgaggaggcgagccacgcctatggtgtggagaaggaagacaaaaggttgcataaaggcagggaccggttgcagatttgattattgtttttaagtattctaatgtcgatcctattgtttagaaattaatggtcgaatgtgagtgtacccctcaaaaatggttaaagtctcttttaagaatatagacaagactcaacatcacatgacatccagaaagaagaaaaatattaaaaggatgggatattatttattgacctttgtgatatagggcaaacaaatatttttagataaactacaaatcatatatttagtgttgtggagttatactcttttataaaaaaaaagttttattgatttcaaccgttgtcgaactttttatacgcaactttcattgcatatattttactttttctaaaatataagttccatcaatcgttttagctatcgtcataagtagtagttgttgtacagtacttttgctagaaaacttgttttatttatagctataacctttagagcaatgctacacgtactaaatttttcttactaaacttttactaacaatcatctcaaccgtttgatttaagtagatggaagttacaaaaaatctagatgcactcatagcatgacacatcagtgttagtaagaatttagtaaaaaaaagttagtatgtatagacttttcctaaccttataatgtaccaccaaatgttcttgtgtacaatgacaaatcataacgaaagtctcattaatatataccatttattatgaaaaagttttcatttgtcatcaattctattacctataggaaaggtatgaccatgctgtgttgtacacccagcgaggtaccagcacaaaggaacaggctcaccaccggccacggcggttccggtgggcattctcatctggtgtccgtgggggagagcaaccaacttcgatccgtgctccggaaaccgccgatctccaccgtccacgtaccccggccgaccaaatccaacggcgcggatcgaccgcactggacctcgtccagtgcacggcaaggtcggtttcccgtccactcgttgggttttttcacctcttcctctccagcgacagcagcagcaaacccaagcccgaacccaccacctccgcccatttccgcctcctctcgaaacctcctcctcctcttctcctcttctctcatccaatcgcgagccaccaaaccctaatccccaacacgcacacgcacacgcacacgcgcgcggtcgcgcagcagcgcgccatgggatgagccgcggcggcgcgggagctcggatccggagctagggtttcgggccgcgagtttgcccatggagtgggacagcgagtcggacggcgccggcagcatcggcgccggcgaggaggaggaggaggaggaagaggaggaggagggtggttttgggggaggaggtggtggtgggggcggcggcggagggatgttctcgttcgcgattgaagggatgctgcgcgcttcggggccgtgcgggctcgtcgtcaccgacgcgctcgagcccgactgccccatcatctacgtcaactgcgggttcgaggaggccacgggataccgcgcggaggaggtgctcggcaggaactggttggttcatatcaatctcgcatatgtctcagttattggttcgacttgtttgatttgggcgttcgaattggtggcacttaggatcgaatataatttgcattttatatgatttaatcacgccgtgagcatgatcttttgaattaaatgacaaacggtgcagccctttcgtcatttttagtattcccagcgattacttgtgtccattttgtctataaaaaaaataagaactagtatgttttttttttcactagtatagcttacggatagctgatggcactaatggaccagataaaatagaaattagcacttagcaccatagggtatcatgacctgttgcatcctgatctgggtgaagtttggcttaggatcgattgactttgtagattagacttagtgaactgcatcttgaggcaatactagttttaagaacatgatgcttgatttgtgttgcttggctcagaaattttctttctaatgctaccagtaaatatgacttaattttgttgctagtttcttttatctgactctaggcttgtttaatagcatgctatattttgtgttcaccaacacgctaactgctagacctttgtttcaagaaaagaaataaagaggaaaaaacactaagagcattttaggctgcaaacatgtgcctagttagtgattaggtggtctgaggcagtataaattggctgggtggccctagggaggagggtgcttcttagcacataggtaggctagtcaggcaatttttagaacattgattatgttgttatatccttaaggaagaatagctattgcttgttggtagttggaacttatgctacttataccataaaatgaaaataaattattcaatggaatgatctctatgtaaagaaaatgatggaactgattcagttaacgaagtatctgaaataagacttccctaaaggttgtgaaaagttattttgagattgttagcctgaactgaatgaaaggaggtccataggtctaacacattaacacaaggtagaacaaagaaaagtattaaatggaaatggatattgtggccccaattcctggcttccccttggtcccccatctttgttagcgatcaaaccccaaaaaataggatatccgtggacataggaaatgataaaaccgtgacatgttataatatattgcagcaatgttctttttgcctttttggtcaacaccttggatcttgaagttcatataccagaaacctctaagcttttcccccctgatattacctccaaggagagaggattttttccatgcatatctaaatgctatattaaaaaataagtctactttgatctatggttcttactagaacatgttaatatcaaatttcaactataggtttgattgataagatacataggaaagcaaatcaagtgggtactactttatgtgatggaacaaatataccactgcaacaattgtttgtctaagtttacaaagattgatcatgtaagcgtgtgtagtttttgcatattttgattatctgttgtttttcatcttcactaactttctagtggagtcgaagtgctgtgaagttattttgttattaggcacatggtttgacaacatgcttgtgccaaaaaaaaaatctcccttttttgaagagtattattcagatacctcaccaggattaacttgcttggttcactttacacgtttagggatcaaaatgcaactcccaaggtcaaggagccatgtgatacacccatgcaagtctaggggactactggcctatgatgcacttctattaatcatttatcttatcctacattcgtggtagcagtttagcacttacctctccactattactatcacaattattcaatacaagtatacaacacactggctaaacatttagcatcaagtatcagttgggatgaagtttatggtgtgaagtcaaattcagatgtggttattagccatccaactcatgcacatgttctttcttattaattcagaaacctgcccaagatatttttactctacgccctatgaatatgagtgaaaattttcacattgttcgcatatgaagggtcaaatttttggtggcatcagaaaaaagttttggaaagaacatattctgttgctgaatttttctacatcgttgttcacatcaaaaagatcatgaaaactgagctaacacagcatctagtaccaatgtgcttttgtgagaagggagactgagtggtgcttacaacactttgaatttcctcggagacttgtgctcaaaagtagttggaaatggcactcgccaactgaaagtagcataggatttttgcaagtgtggttcacatttttttcactcatatttcttaaattgttctatgtgttttacttagtacacacttacttgttctttatgtacttttcttgacattcttacacactgatgtttctttcccactttcagccgattcctgcaatgcagaggaccctttgcgcaaaggagacatcccctagttgatgccatggtggtttctgagattcgcaaatgcatagacaatggtaccgaattccgtggtgatttgctaaatttcaggaaagatggctctccattgatgaacaagttacacctgacccctatatatggagatgatgagaccataactcattacatgggcattcagttcttcaccaatgctaatgttgatttgggaccattgcctggctcattgacgaaggaacctgtcagatctacaagatttactccagataactttttccggcccatatccactggaccagggcagagcaacttctgccgggaatattctagcctgttccagttgactgatgaagtactctgccagagtatcctgtcaaggttgtcaccaagagatatagcatctgttagctctgtgtgtaggcggttgtatctcttgacaagaaatgaagatctttggagaatggtttgtcagaatgcatggggcagtgagactactcgagctcttgagactgtccctgcggcaaaaagattaggctggggtcgattggcaagagagctgaccacactggaagctgttgcttggaggaagttgacagttgggggtgccgtggagccatctcgatgtaacttcagtgcctgtgctgtagggaatcgtgttgttctctttggtggggaaggtgttaacatgcaaccaatgaatgacacatttgtgttggatttgaatgctagcaatccagaatggaggcatgtcaatgtaagctcagctcctcctggccgttggggccataccctatcatgcctaaatggatcgctgttagttgtgtttggtggatgtggaagacagggcctgcttaatgacgtgttcacattggatttggatgcaaaacagccgacctggcgcgagattcctggagttgcaccaccagttccacgttcatggcacagctcctgcactttagatgggacgaagttggtggtttctggtggctgtgcagactcaggtgtactactcagtgatacatatcttcttgatgtaacgatggacaaacctgtgtggagggaggtacctgcatcttggacgccaccttcgagattgggccactcaatgtctgtctatggtggcaggaaaattttgatgtttggtggtcttgctaagagtggtccactgcgactccggtcaagtgatgtgttcacaatggacttaagtgaagaggaaccctgctggcggtgcctcaccggtagtggaatgcctggggcaggaaatccagccggagctggtccacctcctcgccttgatcatgttgctgtcagcttacctggggggagagttttgatatttggtggatcagtggcaggtcttcattcagcgtcacagctttatctcttggatccaactgaagaaaagcctacctggaggatactgaatgttcctgggcgacccccacggtttgcctggggccacagcacctgtgttgttggaggaacaaaagcaatagtgcttggaggacaaactggagaagagtggatgttaaccgaaatccatgagctttctttggctagcagcacagtttgaggttcgaagtttattttttatgtttcagcgagcttccttcagaacaatcatgattattcatgtgtggcctgaaacttttcttcactggcaggactggaacactggatgagtatactgaatcttttggcaacgacttgtatttacttggaagaggtggtttgccttgagtagatcaaaacctacatttggggttgcttgctttatgtagtcaaggtgtagtgatatgttctttttcttgttgtttgttttgtcttttaccagaaaatataattcataagctactcttgtgaaatgagtaccaattttatgtattctcagacgcttctgacatgcattatgttagggaaaacagaacaacgttgtatagctgaatcatttgtgatgtactatgcttcttgagcatcttgctgccatctctggcctctgggacacaatttgacgcttatgtgatgtatgcgagaaaaattttgatcgatcctctttattgtaaatcatgtaacatgatgtagctgctttgtcaggtgaactaagctctctatgtttcggcgtgaccatcagacacttccaatgcagctgttgcctgagaactgtgtttaattatcttcgcggtgtcctttgtttttatcctggataatatacttcatgatgatttattgtaacttattgaaagactgcctgtattttccgcatgtgattggttacttggatgtgtacagccatatataatacagtacagcgattggatgaaattgtctagcagaagtatatataaagaatggacactacaaaaaggcactccattatctcgaggactaaacagaatgagttactctgcattttgcattacaatttacaaatgtacatgtacaagaatatttgaaagaccatcacttccacaaactctcgcctacccggcaaagccggtgccataatcaccacaagggatagcggcgaagctcgccagcggcggcggctcctgcctcggggacgccgccggctgaccgatcttcgtctcatcagctgctgctatgccgtcgacggtggcgttgaaccacggaagccgaagcgcctccgccgccgacagccgcgcgtcggggttgcaggtgaggaggccgttcaagacctcgaacccgtcgcgcgacaggcgctcctccgggaacaggtcgcgcagccggtttcagtcccagctccggcaaatcggcaccgcgccgaagagcggcagcgacgggtagctcggccatgtctggcggcacggcgcgccgagcaggcggaagattctcagcagctcgtcggtctcgctgtgcccccggaacagcggcacgccggcgaggagctcgcccatcacgcagccggccgaccaggcgtccacgagctcgccgtagtccggcttcccgaggagcatctccggcgccttgtacccgggcgatccggccttctggtacggcggcttccgcgccgccgtgtccatggccagcccgaggtcgcacagcttcacgacgccgccgtcgccgacgaggatgttcccgggcttgatgtcccggtggacgacgtggcggtcgtggagcctctgcaccccgctcagcagctgccgcatgacgcggcgcacctcctcctccgtgaacggcggcccgccgccgccgccgtggcgctcgcgcaggacgctgctcaggctagggccgacgtgctccatgacgaggccccacatcccggagcgcggctcgagcgcgaggccgtggtagtggacgatggaggggtggtggctgcagcgcgcgaggtagagcgcctcccgcagcagcgcgtcctcgccgacggccttaccacccatgccgcagcggtggcggcggaggaacttgatcgcgacgtccctgcccgtcgcgcggtggcgcgccctgatgacggcgccgaacgcgcccttcctgagccagcacgtgacctcgtaattgtcggtgctctcgatgcagctccgcttgccgccgccgccgccgccggcgtgctcgtcggcgtcggcgatgccactatccgcagcagatcgcttctcgcccatggagaccaagagaagatggtgtcaagcttagccgaggtgagtaaatggaggccaaggctggacgtgggcgagtttaaatagtcacctttcgcgccatgaatccgcgtcgaactcgaactcatgcctccgtttcgcattcggtttctcgaattcgaatccgaatcagcgctcgcctcggctgcgcgccacaaaatacgaatcggactccgtctcgtgtggcgatataaggtggccagcgacgccatgagagcgtgtctccactctcgcattcctcctcctctcaattgatcgcgcgcgcgatcgattcccctcttgtcgagcggcgaccaaaccctagtgcccgatcgccatggcggagcaaggcgttctccggcggtggaagcgcttcttcccggcgttcgcctccatccacgccgccatcgaggccgccgagccgggcatctcccgcagggagttccgcgacgcgacagacaaggtggtggcgatgctctgcaacgcgacggacgacgaggcggtggcggaggagctccgcgtcgtgctcgacgggatgatggtcgaggcgctcctcacgctggagctggttccggcgatgcccaagatgctggcctccaccgacctcgcgcaggacgtcggcgcgctgaggaatcacccgtcggagcgagtccgcagcctcgccatcggcatcgtccgcgggtggagggcctccgtcaaggacgagctcctcaaggccgcagccgccatggagaagctctcccaggcgatggagcccgacgaggccgacgaccatcacgccaagatccttcagccatcgccgcccaagaagacggcaaacacctcacggtcacagccgcctttccccaagaagcagagtgctcgtccggtggtcggcggcagccgtgtcaccacgatggccaagatcgatccgccaccggagaaggcgccggcggcggctgcggctcgaagctcccaccaccgcgagagcgtcgtgccgtgctgtaccgacgagaaggccatgaacgccgcgaagaggaagctccgggaagggtaccaagaagcagaggaggcgaagcggcggcgcacgatccaggtgatccaggcgccggacaggcagcggaagatgcaggcgatcacgcggccgcgaagccgaccgagcttcgtcgccgccgcctccacggcgaagaagagctctggattctcatcgcttcggaggttttagctagggttcttgttctcctccggtgtaacagtgatgtgtccatgatcaactgatcatccccaaagtgtattgcgtcaaaaaaaaaacaaagaaaatccccaaagtgtatgtatgtaattggttatcgagtttatcctgctcgtcctggattactcgcgtgtttaatctatcaaatcaatgatatatttttgtgaaaattgagcaaatttctttatgtgattgtagtatgtgtcaatctgatcgcgatcggcttgaggggcgagagcactgtttctgctcggagtgaagcttcggcttgtttgtcccgaataccaggcttctacatgggcctgaggcttagtagtcgtgggctggaagcccgttataagcatgggccagcgacgcccgtgacaaatgggaatatctgggccggcccatcaagccagctttggtctccgtctcttccgggcccatcacggaagagtcttctcgaaatcgcagccgttcgaccacgatttgacggtcgcgatagatcgccgccgtcgaaacgtagcagcgctagcctttgcgcacaaatgtcgcaacgaaactacgaaagcaacatgtataaaatggaaatgaagccccgacacgattgccatgctcttcaataatacaaagcatcacatcaggatgaaacatgcatcgtacatggcatcgaatcgtgctattattcgcatttagaattgaaaccttgaaggagattggtaggatcaacacgggagattccaagaagattgtaattagctgtcctgctcgtgtcaacacgtcttactgtaagggactcctaaacaaatataaaccacaacacactgcatattatagatcgatcagagattgctggtttggtttgcttttgggtgccttcaacacgcaagtacatcagcaaacgctatcatcacaagcaaagaacaacttttcttcagtaatcagcacagcactctttccagacgcttgcctgatgcgtcgtgagctcaaagctgccagccactgtggctgttcacgggtcaagcagcagaaatcttgtaactgttgtggctaaggccgttttgagcaattgaccagtggcagtggcagtggcagttgcagttttcagttgtacaactgaaaactgtaactgtctactcatcgaaacagaagcaactccaggcaaaccactgggaatgaactcaatcttgttctgggaatgtcctatgaagtctgctacatccaagcagcatttttccagcattttccaaaaacagaagttttcaccaacatcgctatagagatgggtgctggatatatacaaaatgaaactagaatcatgaaacctgttgcgaacgatcaatggagagttctgttgctaatttatatgcacaggaagtttaggctggggggcagggcagcacctagcaacgatagaggtcgaaaagaaatgtaaatgagcagaggtacaatgttctcatgatcgctgcatcacataaagactatgctcctttttaatagctggtcctacaagtacaccatttatcgtccatatcttgtatccctggatccatcaagagaacatcatatatcaactcgtcagaaatgaaacaaggacagcgtcatgctttagagttttaaatttaaagaaaaacatgaactatattatttacatctcatgctgaatttggaaggtagtatcaaattgttttctccacaatgaaatcaaaattttagggtaggtagcctcatgttttcagtattgtactgcacatgcatgtctcaggcactaaaatcctctcctgaaactttactaaccccacctaaacataccaaaagtcttaacacctagcgcataaatatgcaatagatcggttaaaaggagctacctcaaagatgctttcactatgcataatgccatcaagaagaaaacagggaacatgacaaagagtaaaaaatgtaaacggctgtattttctatgcataacatggcagctcaagtaggtactgtaaaagtaagtgcatcaggaacaagaagattccaaaagtgcggtatgtttgtattccatattctctacaacctgaatattttttcattggactagcatgtgttctttgttcttacaaaaatgatagatatagctccaataactaaggaagattaacagtagactgtttctacagacctgtaatggaaactagccattcttccaggtgttgcaatactaggtatggcccctgtgactatgtattcatcatcaatttcatcaaatctgatttctctcaagtcaacagattgtgtgggaacctcgaggttaaagctttcgagatgtgcctgattgctgttcctccttccactgcctcttctttcccttgcccttgctcttcttcgtcttcttgaagatctagagaatcccctgaaaaacataaaagaccaccagtgccttctgacccgcctgaaaacttcatattcttctccagtttcatcatccccatactcaatgacataatctcccagaacaattccattaggaacttgtgcatgaatcgtgctcagcacatcaacaatatcagaagattgctggaagttctcccaatcaacttgcctagcaggatcaatttccgaagggcgtgagtctggatgcttttgttgtgtgtgcttctgaagttcattgaagttgccaacgaatgaacaacaatcctcttcacagcatcttttcttctggttaagatgtagacgagcctcaccgataacaatccatccaatgacatctcctctacacaatgggcagcttgggcggttgttcacattaggagccacaatatggatactatcaagaggagccaccgcaatggttgaaactttcatattggcagggagctcatatgcacctttaaacctctcaagacagtttgagcgggtttgatctgtatcacagacaaatggcctgcaacctttctcataagatgtacatcttagcaggacagcattgtgagggtaatcaagacagattgggcaagtaacatcctctgtccaacttttatcaagctgtatgtcgaaatcaaaagagctgggcctcaccaccttcttcatcatcaggtttcctgaccccatgttagattttctaacaaaactagtagctttaacaagtgctacttttcattaaaacctgcatgacatcaagatgaaaatagattagtttgagactcatcatttctaaacatagtatatttccaatacacaacaaagtttagcatttccatcgatccaacatgagtttaacggtatcacagaatcatgtcaatggatatttggttccaactggttgttttgaactgcacaaactagaatctctcctacatcaacccatatgattgccaaaaggttgaattagtaagccttctcccaacaaattcaactactcagcgttcatatcatcttccctaaatcccccaaaactacaatacccacctggtcaaatccaccaaaaaccagtctcctccaggatgcaacacaagcgaaagc

SEQ ID NO: 18070 - DNA, 2937 bp, Oryza sativa
tatacatgatttattccttattctaaaattgaaataaaaaattaatttgtttattttattattttttatcagaagaagtagactaattttgtattccagtgatcgctcctaaccgttctacgagagataaattaaggttaaattccctagacaaaccgaacttccatgcgccgatcgttaaaatctgtattctaatgatcacttcaaatcatccattgaaagatcaatcaaggccaaattccatggacaaaccgaactcatcttcacatatggtcttctcaaatctcaacgcgaagactattataaagggaaagggactcccatcgttggaaaaaagatgtgaaaaggacgggcatgaatcatgagtgacgcgtggaggacgagagcacggcatatggaggaaactcgtttgcagcttcagcgctgcatacttgtaagttgtaacaatcatctgatgtgaaatgaacaagttgcatttgccgtggaaaattggcttctgctatgcaaaatagagtccatactagtttagatacaagttgtgaaagtcgggcctattgaaattccgatcctacagttaaattttgatatgtagtttgaccattcattttatttttttttaaaaaatacaagtattaactattttttgtaacttatatataaatactttaatcataatctatctatatttacatatttgtattgtttttaaaaacaaatgaccaaacattatgttgaggcctaactctatattaacttgggcacagatggactgggctaggcacgacaaggccatggcattaaatgggccacttttgggctagcccaaatctgaattgcacacggctgtgccggttgcttcaagtttgctgaggagcacctcaacaaagtcaaatatatctccaattttgacgggttgaacttcagttttgtgttctaacatgactaaatatcctggttattgttggaacatgttttggctgtcctattgttctgtcagttttcaattttcaatatgctcttgttgtcattctgaatcccgtaactgctctgactggatggagtagtctctgtttgcttgatcaattttgagcccctgcagaacagcaaagtttcttgcacatgacttttttttgttgcaatgcagcttcaagcttacaaaatgggatatcttatcttctaattgggtcatccacatctcaatttcttagcaactcgattaccaaaaagggtaaaaatatcttcagtacgttgcagcctcgcttggacaatagaagagagtgaaaaatcacagtatagaaacaactcaaacatgtaatagtatatagaaacaagcatgatatgatactcttattccaggagcaacttcaacaacataaagatctgtgtccactttaacagttattacagaacttgacagtaaggttctattattcgattattattgcttctgtgccatgactaacagaagcacagaaagaacacccatggccacaagcacaaaggtgatgctgtaagcctgtactggagctccagggactcttctctcacaaccagagtggaatggcctagtatgggcagttcttgggcagcttgcggatcacattgttcttcattccaatcttggtacgcatgttctccacagtcttgttcattgctcggagagatttcagccttgcagctttctccttcgactgaagagtcaccaaacgcattcccttgtagctgaaaataagagaatcaggacatgagaaataataacaacactgggcttcaagagttctactgatcttatcgatgtagcatagcactgcaaataaccaaatggatgggaataatagaaaagaaagaaagaaaagaagaaaggtttcggacctggaagccagggaaagtggaagaacacgatccgttgcaacaggaatatgtggtttcaggcgatcttcgtaagagaatccccaacaagaacgaagagccctgacataagctgcaagattttgcttagtatcaaaagactcgagatgatgctcagcccaaccgctttccatctcaactaactcattatcctcttcttttatccgcttacaccctgtttggtaaatggcaaatgggttatggaggttggattggtagatggaaatgagtgagtgaacagttaggattaactggaggtgtaaaagaatggatgctaggattgaatcttacaccttggttggtattcccaaaggccaatgttaagccagcactgaaagtcctcatcctctatatcagcaaaactgcaatgacaatatcagaaaccattggccgttagatctacgaagactccacttccactcaccacaaaatgtaaattgtgatctcgaaccttggcctgtagtgcgcttcttcgcccatgagtttcctcatggcctctttggaaaagctggtatctatcattgcagtataaaatcacgcttcacctgtaggtagaacaaccaaaacaacctcattattgaaaaaaaggagttaatttactcaaaaagcaaccccatagatgataaaactcgatccggaaactgatcggaagcaggcccaattcctaaccagctcttctcatatccacatggaaccaggacacccaaatacatccaccagctatggaaaggagatcaggagagcgcctcaaaattactaacacaggagtataactccaaagctaaaaccctgagcttggtaagaactagccagaccgaaacggaggaaacaacccaaaattaaattgatcaaaaactcaatccagaaatcatattctgcgacgacaagaacctaaatcaaaccatgaataacaatctaatctcaaacgggccgccgtcgatcgccaggatcccaggaaaaaagtacttcctccgtttcacaatgtaagtcattctagcattttccacattcatattaatgttaatgaat

SEQ ID NO: 18071 - DNA, 23399 bp, Oryza sativa
cctcatctaacagctaggattaggattgctaaataaccattttacaggctgaaaaaactgcaaatctttctttatctctcctaaagcaggcagggcgaggcctgggggaaatctcatctaagaatcaggattaggattgctaaataaccattgtgcaggatgaaaaactgcaaatctcttttatctctcctaaagcaggcaggcaggcgaggcctgggggaaatctcatctaagaatcaggattaggattgctaaataaccattttacaggctgaaagactgcaaatctctcctgctaagtcataggtgacgtcatgcatgttaatattattacttcagcacgtcataggtgatgtcatatatgttaatattacttcagcattatcttgttggtgtatttactccatatataccacttatgcttccctagtttcttggattattttgtgacataaaaaaaaacgaatgcaaacatgagacgagtatgcatgttcaaaatcacagaaggtgatgtgtttaccgaagtcataactcttataccggatacagtcttgtttccagtaagcatgatactctcatttgaggtgcaaattaaacaatataaagatctattgtttttgcgaatatcacaagctctctgccatggctagcagatgcacaaaaaacagccattgccacaaagatgatgctggagctccaagggctttgatcctgcaacaggtggcatcgactaatatgggcagttcttggggagattgcggatcacgttgctcttcattccaatcttggttcgcatggtctccacacctgtcttgttcattgcgcggagaactttcagccttacaacttgctcctttgactgaactgtcaccagacccatgctcttgtagctgatgaggagaagcagaaatcgtgaataacagcatcaaactaaggagttgctaagattttattgatgtaacatggcagataaccaaatggaggaaaagtggacaataggttcagacctggaagccagagaaagcgcaagagcacgatctgttgcaacagaaggacgtggtttctggcgatagtagcgaataaattcccgagaaccaagagttctgacacgagttcctttctcactcttgttcgttattacaagctcagccccaccacttcccagttcaatgttatccttgtcatctgcagcaaccaactccttaccctccacatcagcataactgcaacgagaatatcagagaccattggccgttagatctacaatgattccatgcattcaaccaaataaagaaattttgatctccagtgctaaccatagtacctacaactagggctctgttcaacatgattatgatacataacggaggaagaactagtatacccactatctatatcatcccttatggaggaagaattttgatctaccacatgatttttcaattaaatctatagtgctaggattgttctattataaaagtctcactaccagtctgagaatataattcagtcatggaacataagggtcaaaactcaacagacaatagcaaaaactattcagtcatcaacagcagatgctcggggtctctattatttgtaaaacatgtcaaacagtagcatggcacacaaaatgttagtgagtaaaccaaggtacccgaaacccacagtgcaattcatttatgtttaactcaacattcaaacataataatgaaaacaagcaatattgaactattgtaagaggaaactcttaatagaaacctgctgctgtaatcatagaaatcttcaaggtcagcatcttcatcatccccaccatctccatatcgtactttgcagtgtccttttgcatccatatgctttctcacagcctctagactttggaaaggctggcatctgtcattgcagtataggcatataaaatcacgcttcacctgcatacgataatcaaagcaaccttatgattaagattatagtacccaagaaaagtaaaagagaagactttacacaaatgaacaatgcctaccttcagaccaacatatataagaagaccatttggatctttcaagtattcgctatcaggtatgaaaaacccatgctttttgtgcatgtggaccatgcaattctcaatggtgtcatgctcaagatcacacatgaagcagaatgtgggatccaactcttcaaactcatctatctcatcatctgatttggaggaatgctcatctacttgcatttccgaagtcgactctaactcacttgggtccacttcaacccactcttcctcctcatcttcatcttcatcctcttctactgcagatggagccctgcgttgaactcgctcaggacgaggcttgactatggtaattccagcaatggatgcattaggctcctgagaagctttcatgagatgtgatcgtgaattaagatgttgggcatgagcttttgagctcctgtactcctttccacaaagagcacaactgtagagcattggagtgctatcagagttgctcccctctgctaaagcagtttgtctagccaaaaacagagcctcagtcactccaggaactccagccacctgacacagaaataaatgtctcggtcttagtctcacagaagttcaattaataattctctagaagcatgttttccaatcataatgctcaagatagacaaatttctagcaagtatgcttctacaacataatgtcacacatcgacttgcatctatgttgctccctaagaatttacccaacaggaagcatgctttgcaaggataatcataatgagtaaaatagtttgtctaaaacaaaagatgtaaatctacatcaactatcccatataggtttttgtaacaacatgcgggatatttctactgggaacacgacaatgcttttttaaagggcatctcatgcatgaacaaattcaccaaaccacagccactcaatgaaatctctgccagcgccaagaggccaacagagatgctcgtgtaagtgtaacacatatagaaagctctcctctcgagttaatcaaagcattagagcctccagttcaaatttcggccaccataattttaccactaatattgccttaatagccataggaaaatattcatcctgaaattctccaaaatccaggactgaccaatttcaggtggaaaaacaaactatttccaaatttccaaacttttaacaggcgacttcaaaacaagagcaaaattccatcactgaagagttcgcatgggcttttcctacactcaaagtttcaaattcggtccatatacgcgcaacacaccaaagtgcctaactaaagaacgaatcatctcctacatgaacggaaaaaaaaaaccctaaaaacaaaacacgctccctaatcgacctaaaaccccgagaggtcgatacagataggaaggcggccaggccaccccacggtggaaggtaaacgatagtaccttgcgcttgaggttgtagcggtgccactcggagcggtagtggaggcgctgctgctcctcgtcatcgaaccccgcgttgcacgcgttgcaggtcaccgtcggcatctctcccttcccccctcttcttccttccccctcgctcttggcctcgattggctttggctttccttgccggaggcggaggcggtgaagctcttcctctcctagtctccttcgggtttgcctctccgcggcggcgcagtgagttgcgggagaaaaatcgaggagtggcggcggcggcggcgggtttgattgggagaagtagaagagaggagaggagaggtcgaggcgaacacgctctgtgctgacgtcggcgcttcggtgaggcctccaccgcctttgggtttaggcccattggtatcagatccaggcctttctaaatgggccctcaatttggactggtaaggttacggcccagtatcctggttaccgaagagaaaagaaaaaaaatctgaaggttctcctccctcccccaaagtgggaaaatgaaatgaaagggaaaaaaaggagtattaaaaaaaactaacgtaagtttttttttgttaaaaaactttcaaatgcaactatagtatagttgaagtgtaattgcattgtaactgtactataactatattgtaaccatgatataacttatataaaacttacattcaactatggtttagttaacttatataaaaaacttatgaaagttttctagcaaatccgaaggaaagagagtactcacgacaacgcagcatctctaaataattacagcacacaaggatagtgactgaataaaaagtgaacatagaaggccaccatatgatgattttctttcttacggatctgtatggctatatgaaacctatgaaattcccttgattcagaaccaaatcacatcgacagtagtggaaaatgagcattgtttctccccaggtggaaaatatttggattttttttaaggaagggcaaaagctttgacacttttgtaaagtttgggaatatttgattatgtgaacccaaaacagagaaaacatgttgctgttctattattgaaaaacaaaggaaaaatgccgctgcgcaatttgcagcctagaacggttaaaaagagaaaagggaaaaagaaggaaagaagagaaagcctcaacgagtataaatcatagaacactgtcactgctactccattgtagtcagttccatctaaagtttggaaataatgaaccagaaataaacaatcaaacaagtgccttaggtgtctgtcagtctgatatgaatctcaagttctctcaatcttaaagcaactttttttttaaaccgtatcttacagcaactagcaggtatagcaacaagctttgcggcccatagctcaacgggcaccgggcagctagcaggtttcaagcaccgaatccaacaattgaagaataattttgaatcgcatggctacaatatgaccaaatattctgttacaaaggcatgaaaggtaaaaatgttgctaagaattcttatatcctaaaaaaacaacatgtgttatagcaacatacatacttacaggcatgcattatactattcttcgtcgtcactgctttgctcaatcctagccttcttcacttgtatttgcatggcagtttctggtcttctcttagcacgatggacccgagaaggtaatcgaatcgttgacaatggcaccatgactggctcagcatcgggtgtccctgtaactcttacaagacagagtcccctgtgatcggcttgtctcaatacaaatgctcgtttccatttctgatcaattttcacttcaataggcacccagggtggcatggcatatgcaccagagaccagcctccttgggccatgacccatttgagcactcggttccctacacacaagttattttgcatcaaatcatttgatacaattacacttacaaaataattgtacaaatctgccatatcatgttcatgcaaatatggtaggaactaccataaacacttattgttatgcgtgatcctacgaggcaatactaacaacggacttatggacatagtgcaagcacaaacatataagaataaaacaaatgcaaacagccaaacattataatctgtaaaagtgcaaaaacttctggaatgaatgaaaaataaaactaatatcagagcttcaggaaagcaatgcaccatggtaggagacaaggagtcacatcccggcaaaaaggagaagtggtaacgatctaactgcaggagtatttgcgacttcaattttttttaacgcaggattgatataataaaagggtaacaattaataactcctataattatcacctataccttgtaataaaggaaactatgcttcgactgttcagaaaatacagcagatggatcttcacgcattgatcacaaggttgtttgaacagttgttaaattaaaaaataaaacggtccatgaggattctttagtatatcgcatgaacttgttccactcatcacttgggagagaacattcagggatgatattcttgtggagaacttttttttaaccaattgtaactatgtaaaaaaaaattcaatcctacattcttatcgcagttttcatcactgaagccaatgctctagaattcggccatagacgcacgcctattaggcgttaggctgcaggcatccactgcgatcaggcattagatggctaacctgccttgggtgcccttgggcaatatgcttgctaattgcttggaattcactagtcgagttggtcctaggtggtagatgccaacactgtagatgtttagtgtctggcgtgttcatgaaccatgattcaaacaatggagcaacatcacttcttatggtgtcactgcacgatttgtcagatagtatctatttccttgcaaacatatctgttaccacatatttctaatattcaacagcagtctaaagcagcccaccggaaccattaaattgccaaaaaaaaagtcaggggcgggaggccaggaagcaccaaaagccatgcacccaagcagttaggagaatatgaggtaaaaaaataaaaatcaccaccacttttgtaggagggaggatttgaacacgggtgggctagcacaccaaccattaactaacaaatccatactgttgcaaatttcagatcgaataactgcagtatcattaggtgcataaatggtaacatgagtagttcaggttgctcatatatataatcattccaggaatggaagagagcatcaataaagctgctcctatggctgctcgcatataagcagcagacatcgtttcattaatcacagtatcacaatcaccttatgcctcaacggcacaacacagaatttccttaatagggaaaaccaaatttcaaatgtgttgtctgactatgcacagacacttgtaatagcttagacctgacactttaaaacacaaggagtagtggagtaccagcattgccaactaggtacaggaggcaattctgtgctcctccttatgttgatttctactgaatcttaaatcagaattggaacatgggcactacctgttttgatacccctacaactctagtcctaggatgaagtatacaagcactccagcacaggcctcgatttagccatgcaatgcgaatcgcaggctcacagcagcaacacaaagcagaactgcagtgacttttgtggcgttccgcacacaacaagactcgtacctagtgagatcctacaggccctcccaaattgactttcaccacaaaccaaatcccagaaccagataagcatctcgagcaaatcggagattcgcaccacggatccatccaattcttttgaactcaaactgcgcaatccccattgaattgagtacaacatactcacgaagtaccatttcacacaaatcgcaattcatggattaattaacaagaggtcctatcatcatattatgagatgggaggaagagagggatgataccgagacccgccggcgaggaccgaaagagcgccgccgccgacgacgaccgcacggagctgcagcggcgaggcggcgagcctcctcttcgcgcgccggataagctctccttgagcgcggcggcggggcgaactcttgtattccttctcgaaagcggctttccctctttccatgctgcgtttccgccttccagttcaggacgcgcccagaagggtgggaattcgaacccgcctctctgacacggaggccccacctgcgggtgacagctgcaattttccccatcccccacgccacgtcatttttctcacgcggctccgatttttttatttttcccgctcaaacaaactccgcctcgtctcgtctcctccgaaaccgccgcgctccgacgccgccggcgaaatggccgcggccgcgtcctacttctccggcacggcgctcatgccatcgcagcgcagcggggcccccgcgccggagtactccgccgccggcaccggcgccgccgccgctccttccccttccaaggttcgtgatcttccgtttcgtcgtaaccctatctccgtctcgttctcccccgaaccctaacgccgtcgaggtttccttgtcagccgcgcgacccccgcttctccggatgcgtccccgccaccgtgctccacatttcccggtccttcgccgccgcgctcgccgcggacggtgggggcgaccccgtcttctccatcgacggcgtcgagaccaccaacgtaggctactcggcacctccacagcttccctcaatttattttccgtggccccgcgtaatctgtttttttttgggtgccgttgatggttttaggttagggttttggggagggtggtgagcgtggtgagcagggatactgacgtgtgcttcactctcgatgacagcaccgggaagatcccactcgttcggtggtgagttgcaattttgtttcccctttcgcattgaatgctgttgcgatgcagtacatgtgacatttttttttctgggattgtaggatcactgatcagtcggatactcgagacacgtcttacattcagtatgtgatgtgtattagtgtataggctctgagatgtgcttattttagtttcagcgattttatattctgttatttatatttcctgtacatatgaagggagggagtgtatgtgaaggttcaagtgaacctcatgggatttcaagctaagaagcagggtcttgctcgatctatcaggtaaggtacttgaattccttttgtattgatgtggtggtactctgttaattcacctagaaagcttctgctcatttgaatgaagtactactatgttttttaaaagttttacctctgaaattcatagttctactggagttacattaattttcaatagcaattatgcacgctctgaagtttgcatacaatgctggcaatctttgttgtgcacttgcacccaaatgtcttggccgtttgctttgtttgaagatcatgggctcacaaagtattattttgtggataatacttgaactctgttcttacagtaagttttcttgaaatatattatatcatttgaatggagtgctaatcttggatgacttgattagatacatggtggatgcaaatttagaagtgttttgaagaaagtatggggatgtttgagataaaggttttattgtatgtgtagcggctatctttcgttttcttttctttttgtatgtttgtgtgtgtgtttgattcttaacactatcctctttcagagtagttttctctgttcatctaagttcaacctgggtatgtcttttggaacttgttgctgattttttttcagatagtaccatcattagctgttctaatttattagatctttgcataaaatgtgctgatttttccttcgttgcacactacctttttcttctatttcttcacctcaggtgttttggaaccttttctttaacttgttcagttggtggacatgttaaatctgttgcactgttattgattgatgtgtattgtatgtacttccttaattgcactcttttttgtcatgtattgcataaccatgttgctatcgtgtatctgtattctatctctgttataccttttctgaagtgtactgttggatgaactactgatcctacgaacaagctggaaactgaattaatcaatccttgcttcgctgacttaattcagtacatttctaatacaagtgaagtaaatggtctgtagaaatactagctcactattgtagtgttagtttatgagtacttgaggaaactatatatatttgctcatttctctgttatttactaagagtacttctattctattaagcttcaaattgtgattcgtgtatttgcaggcctattaacaatttcaacgaagtggtgctacatttcattgagtgtatgcatgtgcatttggaaagtgttcaatcgaaggtacataaagcaagtaattcaatattatggcaattctattactaatttgacaatgctagaagtcattaatgatcgctacctttccattttgaagatgcaaaggcaactccctccttcagtccaaaccaatgaatacactcatgtgccctcatctggtggagtgagggattaccaagttcatttcactcctcaagtaaaccaaggactaccccctgcagttcaaacaaatacatctacttatgtgcctcttttgggtggagttagagatcatcaagctcattttgctcaagtaaaccaagggcagttttctccggcagttcaagcaaacacatctacccatttgcctttttctggtggagttggagaacatcaaattcattttactcctaaagtaaaccaagggcaatttcctccatcagttcaaacaaacacatctgctcatgtgccttattctggtggatttagagaacatcaagttcattttacacctcctgtaaaccaagggcaatttcctccagcagttcaaacaaacctgtataatcatgcggcttcttctggtggagtgagagaacaagttcatcttactcaagcaaaccaagtatgaaattttacatatcgttttgagaattgcttgcttataaaaaatataacatattaatagtatatgatttagttggtatatctgagaactgagatttggttttatttgataatttgtgtcagtattatggaattgagatttttattgccttttccctagcatagtttttagtgccttccgtttaattcaccaacatgcattctttaaggccctctttcttgttacatgttcactcttacctgatcttgttagatcttttatttcccggcccagttttcagcttactcaagcactggtggactacagcatgacccacaaagaatggttttggaagctctgcagcaaccagatatactgtaagtgtattgtcttaggcactgttaaccgatgatagcttattttggatatttggactgactttttatttccacagtgctctcgaacatggagcacacgttgatgaattggttagaagaactggaatgcccaaagcaaacattatgtactctctctctctctctctctctctctcttatgtatatttttttttcttgtgtgttactagtattattattttttaattgcacatgaatgatgataagctcgaccgtttacaatgcaggggggttgtcaagcatctggctgcagcaggcttcgtctattggaccattgatgacaatcatgtcaagtctatgtgtaatggttgatcaatgcaatcatcctcaagactagtatagcagtgtgagattaagtgccctgcggatactaaaacttcgtggcacatgctgtaagtaactcatatagggtgtgactcagtcagtctttcctttcaataatcaagtagatcaagtagggatattatggcccttttgcactcggaaactgtgattgctgaatggatctgtttattactgcatacaaaggtcactggcttcttcaatatacaatttacacttttcatacttaggtttgctaagcttggttgtctgcatatatacttattatatgttatatcactttcttactatgtcaatgattcttttcatgcttatgggattttaattcttattttaaaataatctgctgctttaaccagatatagacttcggtaaattctgattcctcagcacaagtggctacttaggttttgataaaagaaaaaccttttgcctggtggtttgcggttgtccttgcttatcaaatacattgtttatgtcttgtccaattcattgcaccatgagaatggaataagaaacagtaggaatgatagataggggtttgcttatcaatgtcaggtcaactactatttgtttttactgttcattgtgcaatgcattttgtaagttttagttatctttactctttataggttgtcttctcaaaagtatgcttatcttctttgggcattgtataagagctttagtgtacttttctgaggtgcatttcttaattgctatctagtgatcataaaggtacacgtgctatcctaaagtttgtgcaccaaggattcttaatttatccatctaactaacactagtttgctaatacgtgcactagcactggaaccccctacatcttattcttatcctagatcattcggtattacatttattctgaagattacatacaatagctatgataaattgactataaaacgtgtagaaagaagtcaatatcttgtttgagatggttctaaaacacccttggattaggtacactgttcgattctctgtcgtgacctgttttaccacgaatatgcaaaagattggcgctgtgcatcacttcaactttgtatttcgaaaaaccaaaatacaacgttttacatgagaaaccttggcctgaaaaaagcatctaaggctactactctgaaataaagttgcggttctgctgttttgaataatcacgtgtccatttttcccctgtatttcactcacatcggtaaagaaatatctcaaggctgcacataacatgatgcatttctgtcaggtccatttggtcttgttttccctgtaactctttttagttttcttttgaaatgaaagtagtttcttttctgcattcttatcagcagatttcctttagttgtccatgcataaatatgttacgatgctcaacatactgaaaccattatggagatgaaagcaatatggcactagttcttaaatgcacaggaacgtccttaccagcttattttcttctggtggtgcattatgtggtttctgataatatattaagaaagatataaggatgaaggagtagcaaccaactggacatgtttatctggatctttctattgatagacaactctctttaatattctttaatcatgtcacaaacatttatacattcatcttacaccttactggccagcattatcaatgtgtggtccttaccatgtctagatgccttcctacaatccagcatcgtcaaactataccacgggaaaaatgggctgatgcattataaaaagtgtagtcttgcatttatctttgtgagggaattttaccatgatacattaataaataaattaggttaatgagaacttttttccactaagtgctaatcttaataattctagctatatttcagagaaacttatggtattgttgaacatcgcattcttccattcctgtctaacatttgctggtggactgtcagccactgggtcaacagtttttgtcaggcatttagttgctatagctttgcaagtgattacaacttacaagaaagagatggacaaattgctcatttcaatgtattaggtccatgctgaagttaatcttatgatagctgagattcgttttcctactgatcatgcaaatgttgctggtaattacaaagtatttatattgtcgttttcataggattctttttcctgccttgcatttttttttgttgctggaaaatgggaatgtttgccttgtggttttttcagggcatttcatctccaggttgctcactgaaccttctgtttgtcttagtttaggtaagcactgggaactgtcccactctggtttgatcagttgatcttttgagtatctcatatctgctagccacggtaggtttgactgtgctctaattctgaacccctcacttctcatttcttggaaccaagcccttgtttctttctccaacgagtcagatttggtcagaccttgcacgcttggataagcgttagctaagccatgtgtatgtaggtatttggttctaggatacctaaaagtcttgagggccaattattgagagctgatatattacatgcatcaattctttcatgtaccaccggtttctcctttttgctggattcttttcttgggacttctctcacaggtgtagaaaccacctcaatctgtcagagaactatttcagaccaaatcatttggcacaacactgaagcaagcacaaaggtttcaggttttgagtgtaactgttcatagtgtagtaccattagacttaaggaacacgcacaaactttgcccaaaaacaagcacattattagtaaaccatacgcttggaaaccaatgtattgtattcccacctttaagcttttggaccaaaatctctctttctcaaggatgtttttcttgttaagttctaggcacacgcctagacatgctcaacaacttccagagtctagagaagataaaaacacacctgctgcacttcacaagttcacaattcacctcaacaactgccacaaccattaggattcatatctgaaggagcatccagcagcaggcaatttaggtcaggatggggtccaagagtcgtacaaatggatgcagcaccagcacgtaccctggctttaagggggtacagctcaacctgttccaaactgccatgccacggcattgcactggccttgagaaattggcacagcaaaacaaagcctacttggccacgaacccaactgcccgccttataaattagtgccacgctgtgtcgccttcatacacctgtaacccagctgaggttgcaggtagccttgactggtactctttcttcaaagggggggggggggggggggctctatcatcaaggtttaggtcagcctgtggccgacaaaatctcagtttgcttgctactattccgctgccgaattgatacattcatcaacacacttcccccccgtattttatgcgtgaaagtacactatcttttgatgttcatgtcaagatcaattggactggtactctggtattggtactacttgcttttcatagcctgttggatgatgataagatgaaaatcctttctatttacaagtgggcccagtggagagtaactatcaaaaatttcatcttgtaacaacatcacaagcttactcacaatcttagatactattactaactactaattgctcaaagatgatgagcaagaagatggggatgcagtgttgaactcctcttcatcttcgtcatcttcgtcatccaggtcatcgaatctccatagctcctcgtcgtcgtcgtcctccactgcctcgggcatcgtccaccgttcttgccggatctcgacgccttccagcagctccagcacctgctaccacaaccaatttatggcctacattactagtagtgctgttgcaaattacttgtgttgttacacgtaaaccaagcaacatcatcaaaggagtagtttgtgggttactgctacatggagacatgtgcttggggggcaccctgtcatgaatctctgccctaaattatgactgtttacatggaaatgctaaccatgctgatgaaaaaaatatttgcaagtaggtaaagcaatgtagtgttccatcgcagcaatcctacttgagaaatgggcaagcgttcgttgccttctgatcaaggaacagagtgtgaccaatcatgtttgttacctcggtcatggatggcctccacttcgccgacgagcggatgcacagcgacgccacgaacgccagccgccgcgcctcctcgccgtcgtagtcgccgccgatcctcggatccaccagcgactcgatcctcccctcgttcaggaacggcctcgcctgcaagtgcagggtcacaattcagtgacagtttcagaatttttcagtgatcaaacagtagttatactgatcgcgaatgctgaattacccagctgagcaagctcttgtggctgccatccaccggctttctcccggtcatgatctccaggaggaagacgccgaacgcgaacacgtccgtcttctcgtcgacgatgccatgcgtgtagtactccggtgccaaacacctggaagaaaccatgtcatttcagccaaaattcaccgtcaaacccagcaagaattcgactcgaccatgagcacagaaatctttacccgaatgttccttcgatcggggcgatcgcccggtgcgtccactccgacggcagccacttggcgagcccgaaatcggaaatctgtgataatacgatcagttcatgtcaattgaaacagaggaggtgaggaaaaaatggaaatgtggtggatgagatgcgcctttttttttttgaacggaaccagcacaagattgtgcttattcattaaatatagcatgagaaaaatacagctcctaaaaaaatttggattatttctccatttgtgcgtgtcatccttgcgtagtggccatgctaatctttgttgtatcgttccaattttatcggatgtctccgaagagactgacctgaggctggaagtcgtcggtgagaagcacgttggatgccttgatgtccctgtggatgatcctcctctggcaccccttgtgcaggtactccagccccctcgccgtgccgacggcaatggcgcgccgcaccgcccaccccatcgccggcgccttcttctcgtctgcgatgcagcaatcaaatcaaatcaagaaacgtcaaaacgccattaatggcggcgcgttcgtgctgttgctgttaggtgtcgcgttcgtgtcgctggtaccgtggaggttggcggagacggagccgcggccggagaagtggaagacgaggtagaggtcgcggtcgacgcagcagccgaggagggcgcacacgttggggtggcgcgcgtgccccaccgtgccgagctccgccaggaagtcgcgctcccgccgctcgcacgcccacgcgcccatcagccgcttcaccgccacggcccgcccgtcggggagctcgccgcggtacacctccgacgacccgcccttccccaccaggttgccctcgtggaacgcgttcgtggcgcggtggatctcctcgtaggagaagcaccgccacgccggcttccgcggcgactccggcgccgccgcggcggcggcgggcgtgtatctctccttggcggcggcgtcgccattgccgttcttggcgccgcggtggctgatggagaggagcagcttcttgaagctgccgctgctgcgcaggtacagaggcctcatctctcccctcgacgacacaatgccctgcggtgcggtggcgatcgcggcgtcgccggcgagcgaggtgatcagaggaggcgaagcggaggagggagacgagacggcgagctggtggtggtggcggaggaggaggaggagggaggcattgatgggtactaacgccgaggtgctctcgcgagtgccgcgcgagccgtgagcaaatatgaacgcgacgaggcgtttcgcggggatacgcacgcgctggtcacgcgtggacacggtcctccaaggaccgcctctgcataatgctatagcagattagcagagcaaacattctcctgaatttgacactggattttggtaatctgtgtgagatttgagaaattcttgtactgaaatcttgattctgtccgatgcatatgatcaacagttcatatacaacatgtgctcaacagtgttaaggccttcagggtcgttgataataatagcgaagttggtgatccatgaccatgttgcgcaacatgtttataggttgtaccaacacaaataagagcgtcatgaccttcttgaagcatcatcttcaagatcttgtttttccattgtcatgcgcttctctcagtttggttttcatcgttttgtcagttaccgttattgggttgtcgtgagcgacgagtagatattttctctgtgaggataattggagcccactgtatatcttctgttttagcgcttgtgttgggtgaggcgtttatgaccattataggttagcggcgttcgatcacacatagcagtgatcggtatggtgctagtttttttttctctaggaatgtatttggagctgctagcatgtgatggcgttgtgttcgtcataatcttgtatttttcatcgtgatttgctttgttaagaaaaaaaaaacatctggaccactctgctttccctggtctgacggagtgtgcacatacacaggtcacaggtggtgccgtggaacatgtctagatgggagtgtgacgacggggacaggcggcagcgtggaacggcagttgcttataaacaagggaaggaagcgttttcagcagcaggggaagggaacggaagggtgcacctcctctctctcttctgtccgtcttctctgtccttttttgctagtaccggttccactgtgcaaagggaacctgtctcgtgccatctagtactagtgaacaacacaacactcgccacctatgtgcctacgtgcacagtaacaaaaaaacgtaccgacggtgcgtaaaaaaaatgaccaggcatgtgagctagtagaatcagctagtagtaggagtatagtcacagtagtaataagcatcgtcacagatgtcaaacgtgtccttgtaatctcgcccgtgctgacactgtcgcgaagaaagaaaattttgtgctttgtacatgttagatttaattgggtaattaatccatttaaatcaattaaattaaataaattccaatgctcattatgctaggaattcatgtgaattcattcttctatgggatatcaatgggatgaagagttttgagaattaatccatttgattaaggaattggtaacttatatcaattagtcctaattgatggatggttgatggttgtgtagtggaggatggttcatggttagttgatgacaattagttgctctattcctcttcctattccattggtaacttacatcaattactcttaattgattgttggttgatggttgtgtagtggaggatggttcatggctagttgatgacaattagttgctccattcctcttcctattccatgactcttactcttcatcttccattcctcttataaaatgggaatggatttgatctcccgcgaaaaaaagaagacacactttcatccattttccaaagctgttgttgctacggtaatcccatcccgacgagtgtgtgcacacgcgttgggagagtaggcctccgaaaccacgcgttgctgcgacgtttgcacagacgggcgggcgatcaggtttttggggagcgcaaggcgcgactactcactgttcgtcaacatctacttcatcttcaccaacatgtcgaacactggagacaaggagaaggagactcccgtcaacaccaacggaggcaatactgcctcaaactccagcggaggactattcttggggtataaccttattacattatttcaattagaagttttactgttaatgttcatcgcaatgtcaacattgtgtcattatgtgattgttgatgcttattcaacgttaagcatgctcatgttgattacattcaccactatcactggatcaaatcctattgtaaatatcatgtttattatcttgttattttggattaaaatatgccgaattatgaccaaatttccaacaatccaaaaacctgataggtcattttcggtagttggctttgctgctgcactgaaaccacatgcctttgatggttcaaactataagagatggaaagcacgtgcactattgtggttgacagcgatgcagtgcttctatgtttcacggggcaaacgaagtgaaccacctctttctcctgaggaagaggctaagttcgaggcttcggattgcctgttccgtggagcattgatcagtgtactcgctgacaacatagtggacgtgtacatgcacatgccttctgggaaggacatgtgggatgcacttgaggccaagttcggagtttctgacgccggcagtgagctgtatgttatggagcagttctatgactacaagatggtcgatgaccgttctgtagttgaacaagctcatgagattcagatgctggctaaggaacttgagaacaacaactgtgagttgccggacaagtttgtggcaggtggcattattgccaaactaccaccttcttggtcggactttgccacttctctaaagcacaagagacaagagttcagtgttcctgatctcattggctctttgggtgttgaggagaaggcgagggcaaaggacgtccggggcaaaaaggttgagggaggttctagtgccaatatggtacagaagaagaaccctcatgcatcccacaacaacaagaaagtcaagcctgatgtcaaacccaaggctgcaaccaattttaagaagaaaagcaagggaaaggcaaagggagactgctttgtgtgtggcaagtctgggcattgggccaaggactgtcctaagcgcaaagacaggaagtctgccaacatgatcattagcgagggcggaggaacatcggggtacggtaaaatattacctacagttctctctgtttttcattcacctgattggtgggtggacactggtgctaatattcatgtatgtgctgacatttctctattttcttcttatcaggtcgggagaggttcctccttgttgatgggaaacgggtcgcttgcggctgttcatggtgttggtacggtcgatctgaagtttacttcgggaaagaccgtgcagctgaagaacgtgcagcatgtcccttcaataaagaagaatctagttagcggctctctattgtgtagagaaggttttagacttgtgtttgagtccaataaatgtgtcgtatctaaatatgggacttttgttggaaaaggttatgacagcggaggcttgttccgcttttctttgaatgacatgtgtaataatcataatgctgtgaaccatattagcgagaatgatgagtctaatgtgtggcattcgcgactctgtcatgtgaatttcggttgtatgacgcgcttagctaacatgagtttaattccaaaattcactttggtaaaaggttccaagtgccatacttgtgttcaatcgaaacaacctcgcaagcctcacaaggcatctgaggcgaggaatttggcacctctagaacttgttcattccgatttgtgcgaaatgaacggcgtgttgactaaagggggaaagaaatatttcatgacactgatagatgattgcactagattttgctatgtgtatctattgaaaacaaaggatgaggcattgcatttctttaaaatctataaagctgaggtagaaaaccaacttgaaaggaaaatcaaacggttgaggtctgatagaggtggggagtatttttccaatgagtttgcatccttttgcgaagagtttggaattattcatgagatgacgcctccctattcaccccaatcaaatggggtggccgaaagaaagaaccgtactctaactgagatggtgaatgccatgttagacactgcggggctttccaaggaatggtggggtgaggcagttttaactgcgtgtcatgtcctgaataaaattccaatgaagcataaggaagtaacaccattcgaggaatgggaaaggaagaaattaaatctctcatacctacgaacatggggctgtttggccaaggtaaatgtacctatagccaaaaagcggaaacttggaccaaaaactgttgattgtgtgtttcttggttatgctatccacagtgtgggttatagattcttaatagtaaactctggagtacccgacatgcatgttggtataattcttgagtccagagatgctacattctttgagaatgaatttcctatgaaatatacacctatcacttctagtaaagaaactgtcatgccccatgagcactttgcaccgatagaacacaatgatcaaacgcctgaggaaaatcctgaggaggacaacattgtagatactcgcaagagtaagagacaaagggttgcaaaatcctttggagatgactacattgtatacctcgtggatgacaccccaagaaccatagaagaggcatattcatctcctgacgctgactactggaaggaagcagtacgcagtgaaatggactcgattatgtctaatggtacttgggaagtcgttgagcgtccatatgggtgcaagcccgtaggatgcaaatgggttttcaagaaaaagcttaggcctgatggtacaatcgaaaagtacaaggcaaggcttgtggccaagggttatacccaaaaggaaggcgaggacttcttcgacacatactcaccagttgctcgcttgaccacgattcgagtactacttgctctggcagcctctcatggtcttctcgttcatcagatggacgttaagacagctttcctaaacggagagctggaggagtagatctatatggatcaaccagacgggtatgtactagaaggtcaggagggaatggtgtgtaaactattgaaatccttgtatggcctcaagcaagcacctaagcaatggcatgagaagtttgacaccacgcttacatctgcaggctttgttgtgaacgaagctgacaaatgtgtatactatcgctatggtgggggagaaggggtgatcttgtgcttatatgtcgatgacatactgatctttgggaccagccttaatgtgattgaggaggtcaaagactatctgtccaagagttttgaaatgaaagatttgggagaggctgatgttattcttaacatcaaactacaaagaggagatgagggtgggattacacttgtgcaatcccactatgtggacaaggttttgagtcgctttggatatagtgactgcaagccagctcctactccttatgatcccagcgtgctattaaggaaaaaccgaagaatagcaagggatcagctgagatactctcaaatcattggttcattgatgtacttggctagcgcaacgaggcctgacatctcatttgctgtaagcaagctgagccggtttgtctcaaatccgggagatgatcattggcaggctctggaaagagtaatgcgctatctaaagggtactatgagctatggaattcactataccgggtatccaaaagtactagaagggtatagtgactcaaactggatatctgatgctgatgagataaaagccacaagtggatatgtgttcacacttggaggtggcgctgtttcctggaagtcttgcaagcagaccatcttaacgaggtcaacaatggaagcagaacttacagcactagatactgcgacagttgaggccgagtggcttcgtgaactcctgatggatttgccggtggttgaaaaaccagtgccagctatcctaatgaactgcgataatcaaacagtgattattaaagtgaacagttcaaaggacaacatgaagtcatctagacacatcaagagaagactgaaatctgtcagaaagcagaaaaactccggagtgatagcattggactatgtccaaacggctagaaatctggcagatcagtttaccaaggggctaccacgtaatgtgatagacagtgcatcgagggaaatgggcttgatacccacctaaggttgcataatagtggaaacctgtccattatgatcggagatcccgtgaatttggatggtgaaacaaactattgtgtgactgagagaagagacccttgaaaagggctcattttcatgatgtgcttctcttctttcctgcatggtaggatggcttatgtcttaatgtgatccgagtggcttttccaagcagagatgttgacctgcagaacatcttagaaggaacacacctatatgagttcgactgctagtcacagtctatgagatttgggtgatctctagatactca

SEQ ID NO: 18072 - DNA, 23405 bp, Oryza sativa
cttattacattatttcaattagaagttttactgttaatgttcatcgcaatgtcaacattgtgtcattatgtgattgttgatgcttattcaacgttaagcatgctcatgttgattacattcaccactatcactggatcaaatcctattgtaaatatcatgtttattatcttgttattttggattaaaatatgccgaattatgaccaaatttccaacagtacatgactcgtgtcgcttgtcagtgtcctagcttatgctgcgtctcatttcagcatttatgctcttgtcttgggctgtatcagagcctgggccatgagcccacgatgttgagaaggccaaggcccgtttgacgcacactcctcgattggacttgggcatcctaccttttgaatttgggtggatgtgacccctatcatcctaaacaccatcctaatactatgaatctaaaccaatatattatatttatctaaagttctttatattttaggacagtgagtactacgtagtactactaactagtactaaaagcttgttcactttgctaccatttttaacattatcaagttttggcagtgctaaattttagtaaggttacttaaaattttggtaaggttatcaaattttggcaagatttcatatgtggttacttcctccggttccatattaattgacgttttggacaaggttgaggtcaaacttttataactttgaccatcaataactttaaaaatatttagtttaaaggaactagaacaacatatatagatttgtcttttaaagtgctataataaagtaaacatgtatttatttattatatatattataataaaaaaataaggtcaaaatatatcttatagaccgtgtattgttaaaaacgtcaattaaaatgaaaccggaggggtactaaaatttgacaaccaatcgtttttttataactttgctaaaacttaataatgttgaaaatggtagcaaagtaaacaagtcctaataaactgagtcgttttagatctatgcttctcgtagctgctttgcctatccttgcagctgtcaaccgctagccactatctctgctatctttcacattagttgttttacggggtgtttagatccagggtataatattttgacgcgtcacatcgaatattatatatggtattgcatggggtgttttgatactaatgaaaaaactaattacagaatccgtcagtaaaccgcgagacgaatatattaagcctaattaatccgtcattagcaaatgtttaatgtagcatcacattatcaaatcatagagcaattagtcttaaaagatttgtctcgcaaattagtcgcaatctgtacaattagttattttttagcctatatttaatacttcgtataggtgttcaaatgttcgatgtgacagggtgtaaaattttagggtgggatctaaacatgctagtaggctggtaaaattttagcctatatttagtttgtctgttcttttttctccaactgtgatagactggtagttgctttaatttagtttgcctaggttctaaatgacttctccatggtaaagcatgtgaagtctgtatattcaaaagaactaatagtgcttaaaattattactctcctcgttccaaaatataacaatttttaactatcattttagacataaccttatctagattcgtagctgaaagttgttatattttgcgacgaagataataagaaattttttgtcaacgcatgaaaaatgtttgttcactgtgaatatcagatgatcatgctaagcatggcaaccaaagagatgttacctactgttagacattgtcttcgtatctttcttaataaaaaatggtgggacccacctaggagatgggagagagaaggaagaagaggaggggtgagtgacatgcggagcacacgtcggccccaccatttttattaatttgtgtaaaactgacatgtgggtcctatgaggtttattatttttttaaatcgaattgacatgcaagcgctacgtcaattgcacatcaaatgaatatcaagttaaattagctacgtagtcactacgtcagccaaaaccgctgtccaaactgccgagggaccttatctacactggttttgataattgagggacctattatatctggttttttggtggaaggataaaaatcagattcgttcacaagttaaaggatctcatataaacttattccaggtctaaaagagcttgtgaccgatcagccactgcccagtgcccactggaattgcaggagtactaaggcccctgttcttttctccaataaaaactagataaacttttagataaaagtggcattttttcaaacggttaaaaaactttcatataaagttttttaaaaaatataagattaatcaatttttaagtttgtaataattaaaacttaattaatcacatgttattaccacctcgttttacgtgaaacacttaatctttatttttattttcatcttcagaagatttaaacacaatctaaatgagtacattgaatttcttgggcaggaaagtggcaacggctctgcggccactcgccacttcgccagccagtctgccggcgtagcagcatcgccagtcgtcggttctaacgctagcagaatgtttgggccgtaatcggttgcacacgtctcacgaatgggcctagttgtatcatttgggccggtcgacttggcaaacaaccgggctgaatgggcctactctggtgaaacacgatgcgtctaacagcccaaggagaacgaaagccttcagcttcctcctctccccctgactcctggtctgtttctttctcctccccaatccttcgttcccagactcttccctaacaaatcctccatcaaatccccccaaaatccctagcggcctgtttggttggagggagttattaggagggattgggagtttagagggatgaggctattaagagttttgtttggttgggatacatgggaattttggtaggatggggatggggaattgaggaaggaactccctccttttcaatacctgggtagaggcaggtaattgggagggaattactcatttattttttctaagcaaatctcagccatctatttttattaatgacataatctccaactaaactccctatcaatttctatcacctctaccaaacaagatattgggattaaaaatcaaattcccatcttaatctcatcatcaattccctcatgcaaactcccaatccccttctctcgagttaccaaataagccgtagaagttttgtatcaggtgatgaagcaacctgacgctctgccttcctgcagcgaggatccgacagattttcgatggctgatgcggttcgtttctttcttcttagtaagcccgtggttactggttaccatgtgttcatggcttagtttttgcatgattccaatccaggagcattagcttatggtgtgccatggtcgtgcctaggtgccggcagtgaaggcgagcatgctgactgtcactcaaaatgccggtgcagctgtggctagcttcagggaacttgccttgtttcttgttcttgttcatttcgaccgttgtgccaccggaatcaccgaatggtttttgtccttctcaccgtcccattttaccatcttggaatcgttgcatctctcagactctcacagaaaaatggagaagaaatgttggtgctcactcaacatcaacaacttggagacttgtttacattttggaaaatggcatggagtcgctgcgtcctggtacagtatagaggagcccgcttgccagaggaatttggagaagatattttgttcacgcgccggcgaaaggtctatatatatgctgccaaccatgttcttatccttaaccttatgtattatgggaccaaaaaaagctgatatgtgagctctgaagcgaatgttgagcccctcggctgtgaaggtgagatcactaccttgtttttgaagtcctttacttttatactgttgcatatctgtaagattatgtctgtctacttgcgtacaattgttctagttggatgaatcggatccagaattcacttgatagttcattgactaaatttcttgctattacgcatgtaaccagtagagttttacatctaccgttcctatagctatttttcgtggtccttgcagtgatcagctgctagctattttagataatggattagattaaacccggcctctacaagctattatctctgctctcttatatttgtccaactgtggtagacaaagatattggttttagtttctttacgttccaaacgactttgctctttcacactcctggacgtggagaatatatttctaaaattgttaagaaaaaaaattccacgtcataaaaatgttcttccactgtcaatatgaaatgggcatgccaagcatggcatcaaagaaacgtatctactgttgtacattgccttgaatctgttggttacggagtatttttgtagtacccacaagcagggtttgaaattttggtaatttcgtcccccaccggcaagctcacatctcgcccgaaattttcgttttttttcattttttttgtgaatttggtcaaaattttattcaaaatcaatcaaaatttcaaataatttcggcaaaagaattcgaaattttcaaaatttcgcaccccccaacgcaaaaatactaattttgaaattgaaaaccctgcccacaggtacactatggcagaggtgagtatatcgagctttgcaatcaccgttcttgaaaaagctgcgtcttttggcactgactgggctgttagtgagataaagtcagcttggaacgtcaagaaagaactagagaagttggaaacatcactgagatccatatgtgctgttcttagagatgccgaatgcaagcagtctacttcccactcccttcaagagtggttggacaatttgaaggatgcagtctatgacatagacgatgttctggacgatgtttctaccgaagccctagagcaagaagttcggaatagtttcatccatagaacaaggaacatgcttacttatccattcaaattgagtcaaaaaataaaagaagttcgcaaaaaacttgatgagatagcagccaatagagcacagtttggactaactgagcatgtaattgatgtccatacatctgggagcagcaacagggaaacacattctttcataactgaaccagaaattattggaagagatgaagctaaacgtaagattgttgagacgatttgtacagctacagaatcaaatcctttgtctgtgcttcctattgttggtttaggaggcataggaaaaactgcactggcacagctgatttacaacgatgtacaaattaccgagacatttcagaagaagttatgggtatgtgtctctaatgtatttgatcttaagaagatcctggatgacataatgcagtcaggcacaggtaaaagcaacaaacatttaaacctagagatgctacagagtaaggtgcgtgggtttttatgtgaaaagagatatctgctagtattggatgacatgtggaatgacaaagttaatgaatgggacgagctaaaatgcctactatccagtggaggaagtggaagtgtgattatagtcaccacacgcaatatgagtgttgcatcgatagtgaagaccctagaaccatatgatgtggcaaaactaactgatgataagtgcatgcaagtattcatgcattatgcatttagaggtggcgggccacatgaccctaagttattggaaattggaaaatccattgttgagaaatgttgtggtattcccttggcagcaaagacattgggttccctattgtgcactagtcatgatgttggagaatggcggcgcgtcatggaggataaaatttggaatactgaggcaaaagtatatggtctaatccctgcattaaaactgagttatgatgcacttcctccccatctgcgagcatgcttttcttgtttatccattttcccaaaagaccatcagttgttttattctactacagtcatgttatggatggcattggggatgttgaatacaggcaaggaaagcaaacaaatgatatctgctggaagtaagtgctttcatgatctcctaggaagatcgttgttccaagaccaaattattgtttatgatgaaaccattcaaagctgtaaaatgcatgatcttattcatgatctagcacaattcgtttcagaaaatgagcatgctgttatcagttgtgaaaagactgctttctctaaaagggttaagcatctagtgtgagattgcaaggacttctcaggagagcacgaatttcctaagcagttgaaaaaggcatgtaaggtgagaacattttcaagcatatacaattatggtaccgtgagcaaaccttttcttgaggtcctcttctcaacgttcacgcttctgcgtgtattgattttttccgaaactcactttgaagagctgccaagttccatcagaaatttgaagcacctacggtacttagatctacaatggaaccgaaaaatcaaacgcctaccaaattctttatgtaggttggtgaatctgcaaacggttcatcttgctcagtgcgaccaactagagggcctaccaagagacgtgcatcaacttgtcagccttacatatttgagcctcacgtcaaagcagaagtatctactaaaaagtggattttgtggttggcctagcctgacgtttctatatttgcatcactgcgttgagttaacatcactgacagagggattcggcagcctcgctgccctgcgggagctgcgcatcttcaactgtccgaagttggcttctctcccctctgcaatgaagcagctctcctcacttgagaaattggtgcttaataactgcaatgagttggatttgatggaaccaggggaagccttgagcggcctgggcagtcttcgtgcgctcaaccttgtggggcttccgaagctggtgggtttctcagcgagcttccaatctgctgcgtcctctcttcaatatttttgtatcggcgattgccaagggctggagaagctgccagatttcatccaaagtttcacttgtcttaagataattgggattcgtgactgccccgagttgagcaggagatgcacggctgaatccggcgaggattttcatctcatccaccacgttctgcggatttacatcgacaataaaatctgggaaaaggtaagtccgccagctccaaaacgcttattgcgtgttgatctactcaggattttactactgtatgaaagggagttagtttttgtttgtctgcacttttgtgcattgatatgtgattatctcctgaacatgagcttacctctttatccgtctcattttcttgcactagaatcgtacgtgatgcccccctgacgccaggcctgtagagaaccggctggtttcaagactttccgctcaaagaaaattgcattcgaatatttggttggagtggccttccaggctgggcgtccatactctgatactcctcgtgtattgaaggcttgaagcgcatcatgtctgtgtcatttgtgctgcaccctattgtgtacgcatacatgttcgttccatgcatgcatactttgtgtgtaataattgggtacatttgctaattgctacatatttgtgcaactttcatgtgtaacaaacggcacaaacgtactatgtacggatgtttgaactggatactcatgtttgtaactttgtatttctaatatcacatcatttattttgctggtaacaatgtgttttctcctctctgaacgagtgagcttcagaggagttactggtaacaaatgtatactcgtgttttcatgggccaaaagagctggatcgtgtttgacagagctggatgggcctgtttgatgggacggatgcagtcataggcccaaaatgaagatggagagaggaataagtttacttgagatccctcaagttttcgccgaatttgtccctgaaccgaaataggcaggaataactcatctcccaaatcacaataccatgataactttatcactcgacagtacagtggccgatcaactttatcccttggctggtcggttttgtctgatgtgacgagtaagacccacgtaggctcatatgtcatcggccaactcttcttctcctcctctccctctccctctttcctctctcttccccatctctctagggcagtgcgtggcgcctccggaggttttgcgtgttgggtgctgccatgcgcgccgtcggctcgcggacgccgaggacatgtgcgaggactatgtgtccgcgacagcgtcgtcgttcgggaaggcgctcctgtcgtgatctcgtggatgaggcgaagcgagctcaacgctgcctccgtagcccgccacccgctctcgacggttgggagcagcagcaaggcaaccttccatcctcatcccgcttctcctcctcttcctcctcaccgtttcgacacgactagttctctcctgccgccatgcctcgccggctcgtcgccactgagatgctcgacattgtcgcgtctctgtctcgggtgtaggccttagtgtccacggagaccgtgttgctccaccagtccactgtcgtgtccacagaggttgtgagggagcatgaggagggactagctctgtggctccactcccgggccttcttgtcgaggagcaaggatgacaccagagtccagagctacaggtccctcgtgttagtccgcctccgccgtgactcggcatgcaccgtggcgatggtgccggagccggacgggcgaacagggtgaccaggttcaacctgatgccgatgaacgtcatggctttcgaggcattggcgactaggcggtggagatacccgatgacgatagagttgtattgatgttgtacaacaatggttgatgaccctgtctatgattcgtagcaaagcagttggcggtttgatccgattggatttttgatggcagatgccagtttggagtggtcaaattggaccatctactgggcaatatatgttaagtttgatgaccattattgtttagactaggttttggacaacttccactccctcgtttttcacgtgcacactttccaaactactaaaaattttatataggaaagttatttaaaaatatatatattaatctatttaaatttttttagctaatacttaattagtcatgcgctaattcaccactcagttttgcattaagggatgaaggattttcaacctctaccatcgaacgcttgattaaaatagcagcctgtatcgcgggcttgtggcctacaagcccacaaggagatgagctcttcgatcttgtgggctctaacatgtgataattagtcaaaaaaattattgtttttcgtttttcatatcatctaattagtctctactattataaaagttgaagatgtttccctcgaaattttgatacgtcatccgtatttgaattggttttaattttatgtttcggttttaattttaattcgagaaatttaataaaaaatttgtaaggcttgctttttttttctccgtccgaatgtttttcgtcgttgtttttccttcgtggtttttttattttccggttcttgtatggtccggattatttttttgttgccattttcttccgtcgcggttttttttattttccggttttcccgccgctgtttgttgcgttgcgttttttctctcgaaatcagcgaaatcaggcatccatactacgggacctaaattacacggttttatataatttaggggcgaagattttagtattgaagataaaggatatcaaacaaactcgacgtaaagttaagggacagcaagtgaacttattccccatcgatttccacgtgggggtctaacgaaatcacggtccggttcattagcacatcacgaaatctgtgggccattgttgttgtgtagttcggcctaatcagatggagctgacttattagctagcgatggccgggttgctgagctgagtaaaataatcagctttgtgttgaatggcagcgtcacacaccatacatagtggatagctctgatcactctcaggagcacaatctacattacttgcagtattgcatcaccaaggcacgccaatatggacgactcaacaaaacaactcttttgtaccacgatctctatctacagcaggtgtttttccacctcaaatcaaatttctgggtcaacaatgatgcgaactctggtggacaccggagctgaacttgtgatggttatgtctatcgtcttgctcgactggccaatatatgtcgatggcctgtcagtactagcacctccatcagttagctcagttggcttctttggatctgataatagtatgctttgagagttcagaactctagtaacatctgtcattgtgggccgttctgttggatcttcttgagcacaaagaagcgccacctgagtgcatcgcattatcacagggctttcatattcatcacacaatgctgggtctacaagctcatgcaaccttccatctctccacatatgccatgcctgaaatatgttacagttagtcaggtgcccaacacaaatactatttgctagaagaagaccattaaaacaaatactcacgtctcgaatgagattgccaacggtatccccttgtttctccattatgaaattctttcgtccactaatgatttctagaaccacgacgccaaagctaaacacgtctgtcttaagcgaataacggccttccgatgcatactccggagctatgtaaccactggaaatggatagcagaggtaggcatgagaaaactggaacatatatgttgcactgcaccattctttatattttgttcagctcatacctggttcccacgactctccttgtacactcttctgctacatctgaaaccagtgttactgcagatccaaaatcagcaatctttgggttcatgtcatggtctaagaggatattatttggtttcaaatccctatgtacaatcaaacagtgcttgtgcaggtaaagaagcccctcagctagccctttaattatctgaagtcgcttagaccaatttagcaatgcgcccttccttttgtctgtagaatgattgcaaaagaaatgtactttagagaacatagtaattgcttacatactgttctttatcaaatcaacatagttttggaatcagacttttgtgtgtgtgcatgtgtgtgaaaggtgtttcaaatgtgttgttatcagaagcataataactgctttagtatgtgcacatttattaggaattggattaagcccgtctcgcaaaacgtattaaaaagagactgtttaaaacttacggaagataatattgtctaaactgcctttctgcatgaactcatacacaagaatcttttctttttcatgaatgcaccatcccaataacctaattaggttggtatgctgaagccttacaagctgcaattcacttttgaaatcaaatattgctgcatccacaacaaatcttttgatagcaactgtatgtccatcaagtagctggccctgcaatagaattcatgtagcattctattataacaaatcatattttgggtagacaaggagtatctaacattcatcaccttgtaaacagtaccgaatccaccaattccgacatttctgttctctgaaaaaccatctgtagcatccacaagctgaaagaaaccaaacttcctaaatcctggatagttctcttcagtttggatacaaagtctcattattgcctccatgtccattattttctgttcttgcaggtccactgttactggatgagtggtaaatgaccccatgtcaccaacgcaatttggacaaaagttcaataactaaaaatgagaaatgctcgacttctttgtacaataattagtgacttcatgatgtgcaaaagatatattacttatgtgagcaaaagatatattcatggtgtgcgaaagataaaacttgatgagaacaaatgattttcatcatgcactttatctacttcacctagtgtaaaaaatgtagaggttttttactgtccttggggttgtgcagtaccaaatcctaaccgttgatctggcatcatctaacgatcagaaatcgttcatatctcatggtactgcacctccttattaaagcggtatcatgggtggaagggtacttctgtactttcgcgtggggcatctctttctttcgcgtttcgcttccttcacgagagggaaaaatcgtcggggaagagcagcgagagatggcggcgagggcacgggcacattcccggcggcggcctcgatgcgcgacggcagcagcgcggcggccttgatgcgcgatggcagcagctgtgggctcgaggcggcagcggcctcgatgctcggcggcagcggcgagctcgatgcgcggcggcggaggcggcggcaacggcggcctctctcttcctcctttctgctgtgaatattgttgacggccgcggcagcgacggcctctctcttcctcctttttgctgtgaattttgttgttgagtttgctgaaccaaatgtaaatggctaaatggttgattaccagcttactgttgaattgcaagtttcgtattgatgaactaaaaaacaaggttcagaaattggatctgctgtaaataatatcgattcaagtctggtgtactttgagttacgcattgtttttcctcctgattccttcctctattcagattaaagttgcacttatgggacattatttttcctcctcctgtatttctctgttcagattaaatcagcagactcaaattgggtgtctccgagcaaggcagcctcgatgtgcgactgcagtggcgcagcggcctagatgcgcggcggccttgatgcgcggcggcacggcggcctcgatgcgcggcggcacggcagcaggctcaggggctgtttggtttacagggacttattccaagtccctgtcacatcggatgtttggacactaatttagagtattaaacatatactaattacaaaactcattccataatcttggactaattcgcgagacgaatcttttgagtctaattacgccatgattttgacaatgtgatgctacagtaaacttttgataattatggattaattaggctttaaaaaatcgtctcgcggattagctctcatttatgaaattagtttttttattagtctatgtttaatactctaaattagcgtccaaacatccgatgtgacatgagctaaaaagttttaatcccatctaaacaccccctcaatgcgcgacggcctcgatgcaacggtgtctctccattcctcttttttttttgttagcccgatcatacccctactaaatcaacggttagattagattggtacctcgtagtacctcgtacctcatgataactcctaaaggatgggaaagatgctcagaaatatatgatatctttagcatctttacgcttcttctcgctgaaattctgctttttgatagatgaagctaatgttgcacattagctgctattcttgttcaaactgtgcttagtcatttttaactacattgcagtgctatgatgtgatccaaatagccaacacttggccacaagtcatgatgctatgatggatgactaaaattttttcgagggaatgggcaggagctctgccatttcaattatagaaggagaaaaacagaatggtttggttcagcgatggatgactaaaatggagtggggattttctctgttccaacgcattttctaagcatcagcggtacactgttacatttataaaataaagtacactgttactgcgacaaatgcaacaataagattatgttcttgatgatgagaacatttattgcaatgtggttttcaattcataattaacaactgcaggaaactcataaaagtagtcaccttctaatgatttccccctgatttccctaggtttggtggctccttgaacatgtatttcagtgaacgccaatattcttcttggaaacctaagattggtcaaatatactcattatatgctagaatcatgaaaagagggttctcatttcagccctaacaaaatggtagtcataacaactgagttttgaatataaataaatatagaccatatatggggtgtgtttagttcctgaaaaaagttgaaagtttggggaaagttggaagtttggaaaaaaaattgagagtttatgtgtgtaggaaagttttagatgtgatgtgatgtgatgaaaagttggaagtttggggtagttgggggtgaactaaacacggccatggtcaatgattctctggttccagcatgaaaatattcaatatcggcgatagttcgccttcaatgttgacagttttttttccccaaaaaccgtgataaggacatcagctcccggatttgatatggaaagaaacattaagtaatcagttatggggtactgaaacaatatctaaccttgtgtgatgatctgaataacttgggactacactgggcaccccctcggttgcctgctagacaactgcagatatcattcacatgaaattggcttgcacacaaagtggacttttggaactaacagtgcacaagtaaggaaaatcttatgactccagaactaacagttagtacatgtcaagttgtttgactaaaagttgaaatggctatgtaccccaattcaggtacaagtgcacagcagaaacattgacaggaaggatcacttgagcatatcacttcgatcagatgaatcatcataaaaagagatcagcaatttctcctccatctcgatacgccataatcttcagttttaagatgaaccacccaaattatcttattactagaaaaaggatgaaacaagggcttaccgtgacacgacgattattgttgctgctgtcgactagagagatgagagggatgaggcgtatgtacatgtcaatctcgtgctgcgcggcgcggagctcgtcggccatccgagcgccgaggagcaggcggtggaggtagccgcagtcatcctggcacgccctgacgagtgcgtagcaccgccgcagcgcgccttggagccgctcgaggggccgcctggtggcctcccgccgcatcagctcggcgagctctagctcccgcagcaggccgccgacgaggtccacgtgctgccccagccgccggcacgcgtcccggtggcggcgcgccgccagcgccgcctgcaccaccatggagaccagccccagcgcgtccacgccgaccagctgcgccacgctcgacgcctgcccgagcgcgccccacaggccgctcgccatggccgatccccgccgggaaagctgcttcgcccgttgccgccaccgccatggacgggtataggcgtcgcgactcgcgagtgtgaacgtgtcgtggacggcgactttgaccaagcgcgctgctgtaaattgtggtcgttcgtctacatggactcaaaaggcccgtctccgtcgagatggcgtagggggccgaactaaatcacggcccggcccagaaagaccatcgcgaaatttatatgggccttgtctagatcattgtagtgtacagtgtcagggagcattcaggtgtaccgagcacaggtggcaaatcagacgtgatgagatctgcagtgaaaataaatacagagcccagaggttttgcactgcattattactgacatttttttgtactagctttatacaggcgtacagctcgtacctggttcgatcccataactcttcttttgtgctctttttttaacacctaaaagatttcccggcgaaaagaaaaagaaaaaaagagaaacatctgtaagactgaaaccaacgttatagctgatccaaattcgttcatgatctgaaggatgtgattcggtttcaggtcccgatgttgcataaaattttcacaggagaacactatcagatgagtaggagtacatcttcttttcacgtttatgtgtactaacgagtaacgaatgatcttacaaatgcatttcctacttgcagtgggcatgatcacggatgagaggagggatcctagactcctggtccatatggaccacgcacaagaactgagcagagggcagaggccatcacactccgtgctgtttgcattgaatccaattcaattagctcgcgttactcctactcctctgtgcttcgcatgaacacacagctacaacactagtaaagaagaacagtagcaaagtagcaggccagcagcagcggcgtactactcctggtccctgatttcgcgcgttagagaatcctctaacttattttcatctaattttgaaatgtaaatctattgtataaagaatccatatatcaactttagggcactagcaatgcaaccctcaatttgccatgcctaggctgccaaatagactgaggaacctcgaaggacatatgattcacagcacgcgcgggaaggaacgtgaggggcgagagcactcggggaggaacgaggccgaagccactcgttccacaagaccacaagacggctgcaccgcgctctccctaccacacgcgctttcgttgtcgccggaaattggggagccttctttggacacgcgtgcttagttttggtaggcccagttaataacgtgatgtcaaaattccattccgcgccgacgttggatggtgaggtcaaatgccatgccatcacacctaggggcggatagcgagccggctcggctcggctcggtctagctcgttaggataacctaatgagctagaaacctagctcggctcagcttgtttgaaagctcgagctagctcgttaggctcgcgagccaatcaacaagacgaggaccaaggaggagggacctgcgactctacacgtgcgagtgcgacctgcgccttcttgcaggaagtgcggcggcgacagcgttggggaagtgtgatggcggagggccctagcggcttgcggcggcggcggcgcgagcgcctggcgacggcgtcggcgcggtctcgtgcggcggagccagagagagatgcggatgtgcggtctcgagtctctcgacgtctcgtctcgtactctcgtgtggtgcggcactgcggcggatgaggaactgagtgaggagactaggagaggataggattttgcacttttgctgttgtattgggcttgggcctttgctattgtattgggttgagcctttgcgtctgtctgatgaagtactgtctcattaagactcgcgagcggctcgcgagctagctcgagctggctcgttatccctaacgagctaaaatgccagctcagctcgttaggaaaatcaaacgagccgagctgagcctgtcatgagccgagcgagctaacgagccacgagctttctgtccacccctaatcacacaccgcacaatgaaggccgttatgttagagaaaaataaataagaggatctcaatccgactacgcgccattgatggtgcaggagctcgacctggctggctggcactgagccaactggcctagtgacctgggcatggataaggaaggaaaaaaaaacggctcagcttttcatggccggcgaggccaacgggaagacgcaacgaaagcgcgtcgcctctcctcctcccggcgaggaagaaaagctgccgctgctcggcggagatcccgatcctgctaaagccatcgcccaggtggcgtagcaggggcgtcacctacctaggaagtttcatccttcatgtgccacgcaatgacagttttaattcctcatcagatcaagatgattaagtttttcttaattcttttttagctgaaggtgattagtagtagtaagattcaagatggcagcaacggcatgctaggaccatattttagtgctggtcatctgctacaggctggagtaccttaaatccaaaacggatgcaattggtgctgatattttcggaggcagtacagcacagtaccacctaggattagtgtagtactggtactttattttagctgacataggattagtactacccccagtgacatcattaaacgctcataaatcgagcactgtgtgaccaccaaccttgtcatttaagcgcacaccaacataaaccatactcccattctcctactggagtagtaccataataaacataaaacacaacaacccacataagtagagtactaatccaaaatagtactacctccgttcattttaaacgcagtcgtgggttattatgttcagcgttttaacgtccgtcttatttaatttttttatgattaatatttttattgttattgatgataattttaaataaaatactctattcgtctcaaaatataagtaatatctccgtttcaagttataagactttctagcattgcccacattcatatagatgttaatgaatctaggcacacatatatgtctagattcattaacatatacattgtggacaatgctagaaaatcttgtaatatgaaacggaggaagtatttttaaacttcgactaagtcttcgagatggtactattatcaacaatatctataaaaatatgttttaaataaaaagtgttgcatattatgatagttgtttaatgataaatctagtagcatcaatttacatgatttatctttttatttttatgttataatagttaaaatttaaaaatatttgacttgatattattcttaaaatgtttatattttgagacggagaaagtaagacgaacggttaaatattgaaaaaaaaactcacacctgcattttaatctgcacttaaaatggatcggggagtactagcagcaaagccagcaatgcgtttctcctctactgaaactgcaactaactgacacgatgatgatgtaggtgtatctgcctgcccctcgtcgccggcggtccactccacacgacgagtataggagcagctcaccaactccaccaaaatctcgcacgctttcactccctcccctgtggctgttgggcctctgctccctctcccgctgagcagcgggccccacatggcacgcgcgcagcgagcgcacacccaacaagatttgactaattgctcgcccttttttagctagagtggggtggttttgcctttgctgcctcccctcctcgccaatgtcgcgccggaatgattgttgcagcgcagcaacacaggctagcaagcagctctagtcatggcggccatcatcaccaactcctctctactctagtctctggcctctttcctctggatcctggcattttgcattgtcgtttgccgtgttagtttagtgagcagattgtactttgggggtggttaaagaatccgggggtatttgtggtgtggtggatgctgtggtgcgtccgcgcggaggacgcattggccgccgctgcagccgtggccgtggcgtccgacaagatgcgctccgtgaccctgtcagtctcctgctgcttaatttacctgcttctcatggatgtttgctgttggcccgtctcctcaaggtttggttctttcctcgctgtgcgcgcgtgtgtgtgtgtgtgcaggggcggttcgatccagagggtgatgcggaggattggcggcggcggtggtggccggagatcggccgggtcgaggggcgcgccgcagcgggcggaatgcctgggggcggggagcggcgacgcgtcggcgagctgctccggggttggtttttgtctttgatcaaattaaaacccacttctttcttgttgccaagcatttgtgcaatggaagtgcaatttcttggttcctcctgcgaagattgtttgttctgaaaacccgaaaatgtggtgtttttgggtgcatcctgggcactgggcagcttcagacaagctagctgtgttcgcgtgccaaatttgaggggcccagatgagatgaagtgtcactttcccctctctgttcttcgcatttctagtgtaatagatgcagaggttttgactgcttgtttgctgcattctgaactaaatttcttttggatggattctgtcccggcaggtgtcctagactggggattttgtttgtttcctgtttttttggacagtttcaggtgatatgtgaacctgattgctctcttatctttcctctgtaggatgatagtagcaatggcactggcaagagggatggaagcagaagggtaaggatgcggcggtacagatcggagctcgagcaagaagtgagtgcttttcttggtgtaattctgctcgtgtttgagttctgacgacttttgttcctgttgttcaatgaaagttggtactgatggggttagctagtataggctgtggcattatccaatgcttcattgaaaatttattcatagagtggtcctcaaatgaagtctaatatttgctacctaatgtttgctaaaaatttagttactctgacggaactatatttgcatttcaactgagtaaggactaagagctaatattttcagatgttatacatgtttcaggtaaagaaactgcagaggcaactggaagaagagattgacttgcagttggcattaacagatgccatcacaaataatgctacactgatacttgagccctctgcaaagcttccaaacaaggtacggattgcattttagtggatattttgcatgtgtatctaggtagccactctttaatatattttctacttcaatatttcacgtgcaggcacaggagctaataattagcatagcctccttggagaatactgtctcaaaacttgaaaaagacctaaatgacttatgttaccaactgtgtcatttaaggaacaatacgcgacttgcagaaaataattccagatacttagaaactctagctgaagaaaataattccagaggtctactgtctacatcattacagtaccaaccaccgtcaacttgtaaatgtacaggggaggaagtaagtctttattatagaaatggtctcattttatagtgcttcttttggcattcaaataccaaccgttttttttcccttttctgaacttttgaaggacatttcaacactaagagatataaagctcggagaatctgaatcaatgcaagaaaatttattccctgggcttgaggaccaacagaacattcaaaaagagagtgaagggagagagatagtatctcaagatgggcttctcgaagagcatcaagatgttccttcaaatagattgttggaaaaacactggaacgaagaggtttatatttatcagtattaggcaaacatgaatttatgctttatcaaaatattttaagttatcaaaaagtaaattttagcttgtttcttggcagatgcaagagtcctatcctatggaaaatggaggcagagaatatcagataatagatgcgttatcatttgaccaatctcatcagaggaaaagcagcatcaatggtaatgtgtggaatggcaatccaaataagctctctgaagaaatggtgcgctgtatgagagatatcttccttcgtttatctgactcatcatccgagatatcaccaaaagggtcttctgttaattcaatttcatcaacagaacgtctatctggctgtacattgacatctgtatcagattcatccttgatggcatcagtgatgcaaagcccttcagttgattcaaaccatgacagtattgatgaagttagatacttcgatccctacaacgttaatggcaaggaagttcgaagagacattgggaactattgttcagtagctgaggtgtcttggatgtatgttggcaaggaacagcttgcatatgcatctgaagctctaaaaaatttcaggtttccttattaaactctatctgtagctatcaacactaatggatttcatttcatgtctaaataaatagcctagaccaatttacagaagcaaaagtataacaataattaagcatgcgagaaaaatgctacagcggaagattcagttataacaaaaaattcttcagtgtttgtttctaccttgtagtgcaaagtagcactgcttggtattacgtttatgaataaatgatggacattatattatacatgactttgatacgattgctattaattgtttaagttactctcgtctgcaggaatctcgtggagcaactatcaaaggttgaccctacatgtatgacctgtgctgagcggttagcattttggattaacctgtacaatacgttgataatgcatgtaagtatctgttcaaataaaaatgcatgcaagtattatccgctagatttcatggaaatatgatgttataattagttattagcaaaacaatgtgcctttttttttatgaagtgacaattttgaaggcagtgttgtgtagtatatgccaccgtggtattctgttgtaatttcagtttcttagtgtatgctaccgtggtgatttctcattgaaatagcagttcctgttctttgtttgcactgttctttattttgggccatgcagtacacattctcatgtgttgtgcatattctattggagtttaccaggcatatttggcctatggggttccagaaaacgatatcaagctcttctcactaatgcaaaaggtttgtcatctttggctcttatttaaagataccattggctttataatcatggttctttaataagatgttaaccaacttggtattgcaggcctgttacattgttggtgggcagtccttcagcgcagcagaaatagagtttgtgattctgaagatgaagactccagtacaccggccacaacttgtatatgcactctgctcttcattgtcatctcctttcttccttttcggcatgcaagtcgcagtgaagcttattgttttctcgtttttcagtcgttgatgttggcccttcacaagttcagagttaccgaggagcacaagaaatattcgatcgatgatgcagagccccttgtgttgtttggccttagctgtggaatgttctcatcacctgctgtaagtatatttaccttttatcttggtttgtcatctcaacactatttaccttttatcttggtttgtcatctcaacactatttaccttttatcttggtttgtcatctcaacatgtatacacggacggtcttttaaagaagctaaaagtcaccagtatgtttcaggattaccttataatgttttacgccactgaatatattcactcttaagcctgaaacacttctaaatcatcttttatgttccagtatttataacaaaaaaaaactgtcattttcatgcctatcctcatttccaaaatgaaatgtgcgtttgctgtcaaacaggtcaggattttctcagccgggaatgttcggcaggagcttcaggaatcaatgagagactacatccgagcatcggttggtatcaacgacagcgggaagctcatcgtcccaaagctgcttcagagctatgccaagggcaccgtggaggactctctgctcgccgactggatctgccgtcacctcacaccaaaccaggtcgcagctgtccaagacacttcgtcgtcgcggaaacagcggcttcttggtgtgcgcagcttcagcgtcgttccatttgactcaaaattccggtatctgttcttgcctgacaacagtagctcccagcactgaac

SEQ ID NO: 18073 - DNA, 639 bp, Oryza sativa
tatataaaagctgctatggaatagagagcattctcatgagccttgaaatttgtggggattgttagatttaattgggtaattaatccatttaaatcaattaaattaaataaattccaatgctcattatgctaggaattcatgtgaattcattcttctatgggatatcaatgggatgaagagttttgagaattaatccatttgattaaggaattggtaacttatatcaattagtcctaattgatggatggttgatggttgtgtagtggaggatggttcatggttagttgatgacaattagttgctctattcctcttcctattccattggtaacttacatcaattactcttaattgattgttggttgatggttgtgtagtggaggatggttcatggctagttgatgacaattagttgctccattcctcttcctattccatgactcttactcttcatcttccattcctcttataaaatgggaatggatttgatctcccgcgaaaaaaagaagacacactttcatccattttccaaagctgttgttgctacggtaatcccatcccgacgagtgtgtgcacacgcgttgggagagtaggcctccgaaaccacgcgttgctgcgacgtttgcacagacgggcgggc

SEQ ID NO: 18074 - DNA, 926 bp, Oryza sativa
tgttgagtagaggcaacacaaacagaatcgagagattttcaattttagtactatgttcatagtagtatttcgtaaagtacattctcgtaacatacagctcactctgtaagtagtcgtctgtaccagtaattggagacggtcatgtttgcatatgcatgttattcaacattgatacgaataactagctagctagagtgaccatgtcgatcatcaacacaaggttgctcgacatgatcaagggtgcgagatgagatcgagccagggtttgaaatttcggaagtaagatttctgccgcaggtgggcgaaagaactgaaatttccaaaatttcggatttttttcatacgatttttttttgaaattttgactgattttaaataaattagaataaattttgaccaaaattcataaaaagttataaaaaaccgaaaatttcggacgagatgtgagtatttcggtggggggcaaaatttccgaaatttcaaattctggatcgagctcgatcgctagttagctatactaagaataagatcaggtacggttggagcctgcagcaggacggccggtgacgacgacgtccttcgcagtcgacgacgacttggcctttggctttgcgacgccgccgtagcacgacacgcggacgctgtcgacgtcgccgtcgtcgctgttgtgctggtcgacgttccggcggccgttctgcctgggcggcgtttggtcgtcgtcgtcgaacaagaagttagctcgccgagacttctccatcacgtcctgcatatacatcataaccattaattaattactttctctttaagatgatataattaatccgccctctacatccaatacttcagatgtatcgggcggccccagcagtatcgatcatgcatgatcatatatatatatatatatatatatacacgtatatatatat

SEQ ID NO: 18075 - DNA, 8528 bp, Oryza sativa
ccttttcatttttacgcgtggaattgaagcttgatcgaatgaaggaagggatcgaaacagagcaaaagtccaacatgatcgacatatgctttttgatgaaatttccccaaaaagcaggttgtcgtgtggcataatatgcattatattcaagctaagtaaagcgcaagtgcatatattccttggcgtattccactctagctataactcaatcttttcctctcttttcgcgatgatcaaaattcagcgcgtctgatggtgttggcagaaacgaatacagccgcacgatcgatttacgggtacaattaattgtcccccttgcaagtggagcaaacgcctgaaatgaatcgactattggtggtgctaagcttctttcaaaaacactattggtggtagcggttgcactactagagaaatgatctttgctgggtcaacccaaaaccacaatagtcccggttacaaaaagaaccgaaactaaaaatgatttttagtcccgattgaaaaccccacagccattttatcatctttagtcccagttggcaatcgggactaaagatctcccggttcatcctttgtcagtggcctgttagggggccgagaatctttagtcccgttcgtaaagatgatctttaatcccggatggtaatcctaaccaggactaaagatcaatagactaaaatttaatacgtagtatattatccctctcacttatcctctcctccacaatcgcaccactcacagatcccttcctcttccccttcctcgtacttatcctcttcacagatccctctcctcatccccttcctcctcccctcccctctcctccccctcctcccttcccatccagcggttggcggggccgcagcggcggcgaccggcggggccgcacccggcggcggcaggcaggcggccagcggcgccgtgcacagctacgggcaggcggccggcgatgccgcgcgccctctcgtatgccggccagcatcctctcttttttttggataatttgtgattaattgagatgtataattttgtgattcattgcatggatctgagatgtataatctgtgatgtatttaatttgtgtgttattttttaggatttttgatgtatctgatttgtgcgtatttttttaggatttgtgatgtatttgatttgtgtgtatatgtaacttaagatttgggatgttactttgaatcgggggatttggggattgatttggggatatacatggcactagattcgggagaaaatatagggattaactttagccaaagaaacaataaaaatgaaaaaaaaaagaaaaggggaccatctgactgccgctatccatcttttgtcctgagtatttgaaccgggactaaagatcactatctttagtcccagatttttactctcggttgaaaaaccggaactatagggggttatcaactgggagtactatagggggttatcaactgggagtaaaaagggtttctccaccagtgtcggtttcgcggccacaatagcggtatcgatcgggaccacgacgaggagatggtgcaaaatggaggccaggctggaatactgcggccacgacagtgacctcataaatgaaatagcgatagttagaaccaccacgaaaatcgacaccatcgaatttaggaaaggtcacgtttttttagtggtattaatagcggccgctgtttttgcacaaaagtctggtgccgttgtgaatgtaaatttgtgaggcatgcggttttgactgcgctatccaaacacgagtcacgcacacatatatcttttacgcacgctagctttatgaaatattttagaattttgtaagtagtaacgtgcgcacaatttttcaaagtcgtaacatatataatgtatacaattttaaattcataaaataaaaactgattagggtgtcatacacattagcttgctgttttgtcgtatattactaataggcgagaccaaattcgggttacacttatatgtgtgtgtatatgttgtttcctccactgtagcttcctgtccgctaaaaaaacatatttctaaacttcaagaaaggtcttaaaaatgcattactcacgccactttgtgtgactaacttttcacttgaaaagtagaaagaatatattgagcgtgcatcactaagatttcaaaagctatagctctccctcaattgacatacagctcaaagtttttttctgagcatatattccttgacgacattatatctccttttgcgttcaattcaactgccaatgccgtactccggagaatcgaaggtactactccacttgtcaaaaccacctcacgattaccgagccatgtcgatccacaggtggatatatatatatatatatatatatatatatatatatatatatatatatatatatatgtgggtgcaattaatttccttgattggagcggtatatatatatatatatatatatgtgtgtgtgtgtgtgtgtgtgtgtgttagatgataaaacatgattaatactttatgcgtgacttatctttttttttttcatattttcttcaaataagacggacggtcaaacattggacacggaaacccagggttgtctttttttggacggagggagtactcaatactactggccacaaattaagatgatgggtgtggaagaatttatttttaaggtgattttcaaatcaccactgcaagaacagtttcataagtactccccgtcccacaatataagtatttttaaacttcgacatagtttttgatatgttattttgaccaacaatatctatgaagttaagatgctttaaacaaaaatagttgtatattatgatagtttgtttaattataaatatagtaatatcaattttacatgatcgatcaattctattttttggatattaataatcaaagttaaaaatatttgacttagcactgttctaaaaatgtttatattttaagtattttgggactgggggagtaaatatcaagattgttaatttggagcggtacgatacggcgcccactcgttgcataccctttttgctggcgaaattgtacgtactggccattccggccttgagacatttctaaaatcataatgaatacttgtgtaacgtggtcgagacatttttgaaggaggtttgtagccaaaggtgtttttagaaatatgtgcagcatggttagagactttttcttctctaattaattaagggcattctcttgagatgtttttaatttgccccatctaaagtcatttttaataggttagtttttattaaatatctaaatataaaagatgatgtgtcactggtggagaaaccctttgtagtcccggttcgtaacccccctttagtcccggtttccaaaccgggagtaccaatccgggactaaagatcgctatctttagtcccgggtgaaataaccgggagtaaagatcgatctttagtcccggttggtaacaccaaccgggactaaagatcgagctgatctttttttttttttgcatggccctgttgctgcatggtatatatatatatatatatatatatataaaccatgcatatatatgtttcaatacatatatatgcatacatatatatatgtatatatatatatatattatattatattatattatatgtatatacatgcataatatatatgtatttatacatatatatgttatgcaaatgcatatgtatatagatatatatatgaccaaaatatatttacattatagaaaatgtgtacacatgcatatagaaacatatgtagtcatgtattaattacaatccattatatgtcctagctagctacgatttcgacgtagtagtactcgctgctagctcagaagctaaggaccggtgaattgtgtttccgtcgtagtagaattcacccttgggatcaaggatttcttcgttgatgaatcccatgagttgttcttgaaccgccgtgataaattccttatgtgtggtcaggttatccctcatacgaataaactatatgaatgtatgaaattgattagtaattaaacaagaaatcgctacgtaatgaaattttgaatttatttgtacgtacatcgagctctcttgtggtgatgatttggtttgcaaggcagtggcaatactcgcacacgtaatagccgcacaagttagttccctgcttttgctttgcgcactacaaataaatgacaaacaacgagagatctaattaatatacacttgtatgtatttgaatcggagaaatataaatgtagagcatgtgtactcacaggaaatttgaacttccgcctaagtctttctctccatttgccgcggaccaaatgacggaaccgataccaagccctacatggagtttaaagctatgattcgtagtagcaattaacataacaagattttcttaattaacaaaggaacttatgacggtacctgtctataagttcgaaaaccttgtcaaacgtagactcttttttatccattgagtcatatacgttgacggtgcaggcctccaagtcgaagagtaaaagcacccagtggaatctgcaatgtgcgtgggatgcattacatatgaaacacttagcaagttcgtacgggaatgaaatttggcatgtaggaagacagtaaaattaaactaactctgtgttgtatggcaacagtatgaacgtcttgtaatgctgcgccttcaggagatggatgagattgtcctctgtttcttgtggatattggtcgagcattgcgacgtttactttccgagggtcgatgaatccagtatcgaaaaccctccgccgtcgggccctttgaatctccattctacaacgataaaagggagtatattattttctatagtctacttatatacaaggacctaattaattaaaggagacgtatagtaagaaatctaactgaacgatatacttacaaaatccagcaactcataatagagacgtcgagggcgtccaactggtatagttcgtagattcccctgaaattgatccagagaatgtcatctccttgcaagaagtccgtgtccctgatcctcgctccgatcatctctctaccggtggcgctcatctccatgtacagctgatggaacttgtacatttgtgtgggtagggactgcagcagctcaggcttgacaagcggtttaccgagttcgtacatgtatttcacttccgccttttcgattggtgcgactcctagcaattgatccgtagttagaccggtgtcagtaataaattgttctatcgtcatttctttaccggtcaccaacggctcgatctcctggtttggttgctctccaagctgagggactggtttggactttccagaagatgctttcttcagcgttcgctcatagtccgatagcttgatggcctccttgacaggtgcagacatacccctgaagaagttcctgacactggggtctataggaatcttcttttctggacttcgaggcttgaattgtctcttgacttctgatgcaacgtaagcgtcaagctcctcttgcgtgcaatcgtaccccgggtccttgttcttggcggcgtcaactttcgccttcttcgttgcccttgtgtgggcaggcggtggagctgggggggcccttgactttgaaggtgccggaagaggagcttgcgggggagtaggtgtaggagcacgaggaggagtcggtgcaggatcctgaggaggagtcgatgctggagcctgaggtggagacggtgctggcggagcatgaggaggagacggtgcaggatcctgaggaggagatggcagagccggaggagatggtgcacgagacgccgcttgtcgcccagggaggatgatgtaccgcctgcgccatagaataatggcatggcttgtgtctcgtagatgcgtctcaccgtctcctccagggtaatccagctcgaggtcctcgtacgcgccttcgaccaactcaacttcgaccttcgagtatcctgctggaatcggcctgcagtggtaagtacctgaagggtccgttgggatggccatgcccgacgccaccttcatgttgtgagagattatttattagtaatcaacatatataagcagcaactagcggaatggctaaatcttacctttattgataagttcttgaaaggaatatgcagctcacatggtgtccgttgagtgatgtcatcaacgggacaggtcgattcgtcctgtgtttgcatggcgtccatgctctgtgatcctacctgccccgttgaggcgcagctgctacggtttcctgacgggctcaccattgcaggaggaatggtcggctggggatcatgggaccgatgtgcggccatgcgttcatcaaccttccttgccacctcctcttgcatgttgagttcgtagctcgatacccggaactctaggtctgcaatcttcgcctcggtatctctcttgctcctcatccgactcctgtacgtgtggatgtcctccttgaaaccaatcttccaaggaatcacccctttccctcgtgttcgtcctggatgctctgaagtctgcagggcgagtgtcagctcgtccctatctctgtctggtcggaacgtgccctgagaggaggcttccactgcatctgttagtcgtcgcgcagcctctcgtatctgatcgccgaagaccagtgagccatcagctgggttgagcgttccaccgtgagcatagtaccagaacttcgatcgttccggccaattggctgttgccagttcgatacccctctcaatcaagctagcctccatctgctcccacttcggcatcgcgacgctatagcctcctgaccccaagtggtgatggtacttcttcttggcggcattttctttgtttctttccatcatcgcctgcccttgttcacctgtcttatatgcaacgaactcgtcccagtgatcccttagctttgggaatgtgtcgaagttcggtgtctgccccttcagtatatacttctggtacagatctcccttgaagctctgaaactgttctgccattttcttcagagtccaccttttcactttgtcctctgtacccgcaggaagggtgaatgtctcgagcattgtggtccacagcatctctttctccgaatctgggacaaagctctcatgatctccgcgtgcccttgttcttcgccagtacaccgtactgacaggcatgttatcccgcacaacccaaccgctgtgacgtacatagttcttggcggcttcggccggggcactaggacgtccatcttcttgcacttccgttatgatgtgccgactctcaagcttcttcgctgcacctcgttgcccgcgtgccctcttctgtccaacggagggttgactaccactagcctcctcctcctggttcccctccacatccctttccatgtgcccctgctggttcccctccgcatccctctccacgtttccttcctcgttcaagtactggtttggatcctcgttcccctcttcttcattccagtactggctgcttccctccgcgattgtatcgtacaatatctgttcctcatcgcggtcagccatctgttgatacaagaaacatctgctaagtcacgagacatttatgttttaacaatctaagtcatgtatgctaagtgtaaatgtcgtacattagaaccctacacaaccttacgtgctaagtctaattacaaatcgtgatataagctaagtctaggtgacgtatattatacaaccctagctagtaaataattatatactaagtctaattacaaataaaataatcttatattaaaactcaaataatattacatgctaagactacaatagtcatgtatatgctaagtgtttcgtgcgtatatgctaagtctaattaagactacaatagtcaattgctacttgtcgcaccaattccgtagtcaataattacatactaagtctaattacaaataaagtaatcttatattaaaactcaaataatattacatgctaagactaaaatagtcatgtatatgctaagtgtttcgtgcgtatatgctaagtctaattaagactacaatagtcaattgctacttgtcgcaccaattccgtagtcaataattacatactaagtctaattacaaataaagtaatcttatattaaaactcaaataatattacatgctaagactaaaatagtcatctatgctaagtgtttcgtgcgtatatgctaagtctaattaagactacaatagtcaattgctacttgtcgcaccaattccgtagtcaataattatacatactaagtcaaattacaaataaagtaatcttatattaaaactcaaataatattagaacactacacaatcttatatgataagtccaattacaggtctaataatcttaattaattgcattacaaatataacaatcatttatattattacgtcacttgcctgctccaattccttctagggctagctcttccactcaggcttgacggacgactccgacaacacgtcttttctgcaagatacaaaaagatgtattaggataaatacgaagtaacatatatatatatattgcatttcacgttaacgttcgtcctcgttcgttcgc

SEQ ID NO: 18076 - DNA, 1728 bp, Oryza sativa
aagacgagggcgcaccgggaatatatatacccccggatctttactcccggttgttgagaacaaccgggactaaatctttagtcccggttgttgagaacaaccgggactaaagatgatctttagtcccggttggtattaccaaccgggagtaaatatcttttcccgctatttcgaaattctttttaaacccggttagggttaagaaccgggactaaagattatagcactgcatatgattttcgcttacatatgtgtttataaaatagaagttaatgcattaacattatttaaagtacaaagattaatgacaattacttcgaaaaattatttttgtctgtaataaattaagtggataaatcgtaataagcaaatatatgacttataattaataaaaattccaatatatatatatatatatatatatatacttagcatatatatgaatgatattattatattggtaaaaactctaattaagatatgtatgtacatattgcatgatttaaaattaataaaaattgtaatcatcatatatacttagcgtaggaattatattaaattaaatgctaaaaactctaattaacatatgtaaatgccacatgcatgatttaaatcttttaaaaattcgaatagtcttatataagtagcatatgaaagatagtaaattaaattgtgaaaaactctaatatatgaatgatagttttaaaaatatattaaatttaatacttttaaaaattctccagtcaattataatttgcatatgaatgatagtaaattaaatgttaaaaactctaattaacatatgaaattgccacttgcgtgatttaaaacttttaaaaatcctctagtcaattataattagcatatgaatgctagtaaattaaatgttaaaaactctaattaacatacatatgaaattgccacctgtgtgatttaaaacttttaaaaattgtaagtatcacatataactagcatatacatgatttaaacttgttgaaacctctaataatcgtgcgtaattaacatatgccatacatcaattgatttatatggataatcaatacatccaaaatagtttacatcgtgtacacaataattacggcattacatcggcggtgacggttgaccgcacgtactttctcctcactattgttccctccttgtgatcgctgcgtgagtaaggggtgtcttcatttcataggaggatgctagggtcaatcgtcaccgtgaaagggggttgcccatccaactgatcgtaatcctcgtcagtcttgtcctcaactccgacgatttttcttttgcctgggagaaccacttgacgcttaggctcatcaggccctctgcccttctttcctttgctagacatgtccttcacgaaaaagacttgcgttacatcattggcaaggacaaaaggttcgtccgagtatccaaccttgttaaggtcaacagttgtcatcccactgtcatcaatcattacgcctccaccagtcaacctaacccattggcaccggaacagaggaaccttgagaggaccatagtcaagttcccatatgtcctcgatggcaccgtaatacgtggcagttgttccatcgtgtcccatggcatcgacacgaacagcgctgttttagttcgtgctcttcatgtcttgggctctcgtgtagaatgtgtacccattgatctcatatccctggaatgtcgtgatcgacccagacggtccactcgccagga

SEQ ID NO: 18077 - DNA, 1403 bp, Oryza sativa
tttccccgtagtctcccttcatggcgtgattcaggtaccccgattgggcgaaggtcttcgataaattctacgcaaaattcgatgacctcctctgttccataacccttggcgatgcttgcctctggacgagcacggttacgaacatacttcttcagaacgcccatgtacctctcgaaaggaaacatgttgtgtaggtacataggcccgagaatacggatctctttcacaaggtgacaaagcagatgcgtcattatattgaaaaatgaaggtggaaatatcaactcaaaactgacgagacattgcaccacttcattctgaagggcttctaatctatccggatcgatgaccttctgcgaaattgcgttcatgaatgcacatagctttgttattgttgcccggacattgtctggaaggataccccttattacaactggtagcagttgtgtcatcaacacgtgacagtcatgagactttaggtttgtgaacttcttctccttcgtgcttattattcgcttgatattcgtggagtatccagacggtacctttatgctctccaagcattcaaacatactttccttctctgccttgctaagagtgtagctggctggactcaagtaatggcttcctttctcctttggttccgggtgaaggtcgccgcgttgttccatatgcttcagatcattacgtgcttccagtgtatctttcgactttccgtatacacctaggaagccaagaaggtttacgcaaaggctcttagtgaggtgcatcacgtcgattgcgtggcgtacgtccaagaattcccaatatggtaactcccaaaatatagagttctttttccacatcgccgcgtgaccatcttcgctctctatatgctggcttccaggcccctttccgaacactactttaagatctttaaccatagcaaacactgttttcccgctgcgatgtttaggcttcgtacggtggtcggccttatgttcgaagtgcttgcctttcttccgtaccgggtggtttgctgcaaggaatcgacgatgacccatgtatacaaccttcctacagtgcttaagatacgtactttctgtttcatccatacagtgagtgcaagccttgtaccccttgttggactgtccggataggttgctaagtgcaggccaatcgttgatggttacgaacagcagcgctcgtaggttaaactcctcctgtttgtcctcgtcccacacggggacaccttccttcttccacaactgtttaagatcttctaccagtggtcttaggtacacgtcgatgtcgttaccaggttgcttggggccttgaataataatcggcatcattatgtacttcctcttcatgcatagccaggggggaggttgtagatacacatcgtaccgggcccagtgctatgg

SEQ ID NO: 18078 - DNA, 9159 bp, Oryza sativa
cccggttggtgttcccaaccgggactaaagatcccgggggggcctgacaggccttgacagcattcgaaccgggactaaagatgatctttagtcccggttggtaacacaaaccgggactaaagatcaaatatgcccgttacccttttgaaccgggactaaagatcatctttagccccggtttttattgcatccgggactattgtggaaatcggccgaccgacgaaagatggtttctccaccagtgtgtgcatcttgactcttgacaattatagggttagtttcagatactacgagaattagtttattaaagataaattgtacttcaaagagtcatgaattcaattaggtctacttgaaaggcacattcttactactgggctgttcggcatcgcttcttcggcgcttgctgcggctgcgttgtagtaagaaaccttaggaccataatatataatatatagggttatgtacgtaccatatacggtttgtgaaacttgggccataatagatggagttttgaaatttactcgaaataataataaaataaagctagtatacaatcgtttttgcaattccaaaatgatggtatagcaccccgattgaacaatacatacattactctggtccataatgtttgttcagtacttactccccgtggacaaattattttcagcgtgatcatcgatgaacacagtagtctagctctaattcattctatgagcagagtatatatgtaggatacaacaataaaatctacacatcaagacttgctcctagagtctttcatgcaaagttagactaactataaagcataacttgtgctactccgatgagatctacacatcaaacaatgctagccagcagcacaccaaagaatgctaccctccaaagccattgttgggatttttttttttgtggatttgctcttaatccatgaacttgatatttgagtggtttttatatacaattcaatacatcatctattctgagctgagaagttgacttgagggcatccaccaaaaataaatttctaaataaattgaaagccattggctttaatattatctgccctataaggtcattcctataagaatgttttgtaaatttgatgtatctgatgcctattgcggtgagatttggtggcatcatcaagcatggccacatccagtgcgaggatagccatccaaaggcaagaggagatggaaatggtgaagaggaggcagcaatcgagtgggtggtggactgttggcggcggtggggaagagggaggaggatgacttggcacattagttttgcattttgactctcccctttcacttatttagatgtttgaaattaaactcttgagaaaacttccatacttgacctaaaccttttctctctaacacaaactgccagcccttattagcttcatgcactggtagagaaatgttctttattcccggttgagaaccccctatagtcccggttttctaacggggagtaacaatccggaactaaagatcgctatctttagtcccggttcaaatacccgggactaaagatcgatcttaccaaccgggactaaagggttagtcctagtttttttttttcattgttcttttgaatattgatttcacaccaatctctccaaaatcataaaatcaatcgcaaattccaaatcgaaattgagatgctccctacatccccagatcaaatagcaacatcacaaatcataatattcacatcacaaattgtcagaaaaaaatcacaaattctaaaagaaaaattacatcacaatcaaaatcacagatacatcacagatcacaaatacattacagatcaaataacacagatccagatccagatccaatgaatcacaagttattaaaaaggaaaaaaaaagaaaaatctggccgccgagggcggccgccgccacctcctcctgccgcggacggccgccaccgcctcccagcacgggccgccgaccgcgcccgggtccccgccgccgcactccgggtaagctcctcgccggctaagtgttgagagagaagaatagaaagagactgagaagaggataaggataagtgtgagagagaggaggaataggaaatagaaatttttgaggatagcagcaagggattatatacggtatatttgatttttagtcctggttgggaacaacaaccggactaaagttaggattttagtcccggttggtaccatcaaccgggactaaagatctctagggactagcagcctctgacacgacatgaacggggactaaagatcatctttagtcctggactaaagatgatttttagtctcggttgataacacgaaccgggattaaagatgatatagtccccttacagttataaaccgggactaaaaatgtttttttagtcccggtttttaatggaaccgagactattgtggatttgggtggaccgaccaaagatggtttctccaccagtgatgggctctggtccaagcaatgttgcggatcatacatgggccatgtatgggcttcttggcccattccttgcactcgagatgggatgcttggctttggaaaaagtatgaagactcctctttaatccagatgtcaaaattggggtgaattggagctccctgtcaagtctcatgcccaaactccaacaattgagtgattattggcaataggaatgcacatctttagtaataaaacatatcacaacaaaaaaataatatttatatactttttaattgaaaaaaaagatcaaatgtcatataaaaagtcaatacacaactcgttgctacaaggacaagtagaatgaagcagttggagatttatcttggggaacaaagcatcaccgaagattcaattctttgcctggttcctagcgaaagagcggctaccaactagacacaacctcacgaagaattgcatcgtcgacactgccacttgcgagctctgcaaaatggccgatgaaaatgctgcccacctctgcctccactgcccaatggcaatgcacttctggcaggccattggaattcggccgagcatcatcgctacatgccaccttgcagccttcaccctacagataggatctcgacctgcttctggaatcatcgacataatgttgtgtttggaaatctgtcgccgtccttacatgtatactaattagccactttccttccactaaccagactgaggcccaacccaatgaaagatatgcagagtaggattactaagggtgcatgtggttggggtaatttttagagagtttgagagttaaaagagatatatctattaactgaaggaatatggagttgggaggaaatttctcctttacgttgtgttctgtttagttgaaggaatatggagttgggaggaaatttctcctttacgttgcctaaacaacgtacccgtcgatagcgaggcgcatgcagtggcttcgttaatctcaaggatttgccggcccagtcttcgaagatgctcataggggtagggttgcgtgcgtgcgttcatagaggtgagtgcgcgtgagttatgagtgtctgcgttgtactgtgtaattctaaaaaaaaatcagccatctattttcattaaaaatctagtctatatatattaattcttgccaattttaatttcactacctctaccaaacaaaaagactagtattaaaaatcaaattcattcatgtattaatcttaccatcaatttactcatccaaactcccgatactcttgccaaacaagccgttaaaaagcaagaagccaggccaaggcatcggcttcctttcttctgcacagtgcacactacttttcctctccacctgattctttcttatccctttcttcacatactaattgcttcttcgtgttagccatcgcaaccaaaatcgtgttagccatatcttagcaaataaggcacgatgtgagtctatgtctaatttctggcttgaaaacagttgtaatttcatctctcaccttgtttgtgaggagtaatatattcccttttccccgaaaaaaaaattgcttcttcgtagtctatgcctctaattctcttatatatacttgtaatttatccggtttggtaatagatttctcatatggatcgtaacgatcttttctgtggatgtattgtcgttgatcgtttcaatcctcctttgttatcgctgtggttgtacgtatgtatcttcgtggagcaagcctcttccacttctcagtcacgattaagtaacacaatttgagaaagaaatttgtaaattgtacaagttatatatgtcaaatatatcaaacaagttgacacgattatatatatggcgatagtacaatattcttgcataacattaatatctaaacacacatacacaatcacatgtagtactatctaatttcttttataagataataatcaacatattcatcccagtctctacattcatgtatgcatggttaacttaacacacatgagagtaattggtaatcaccggtaactggcggtgccactagtacatataagatcaaatcacagctggttcaaaatccgacatcctaaaacataacaacttagtatataatatggtatatcctactactgtaaatctaagcatacctcaaatcccgaatcgtagaactaggatgtgtgtctcattttgtactacgacttagttaatttcgccgcggtccacaacaacacagcaagcttgccagcaacccggaggagcgatccttactagtgtcgtttggtagtccacgacttgtgaagttctcattgttattcttctccccagctcgattaacaggagtcctctcctttttttgtttgtcgttttgatcctcatctccgtcgttgtcgtcgaacaagaaatttgctcgtctggacttctccatcagatcctgcaaaatatttactagtttatttacatgtgcatgcaggttaattattaagtgatatatatatttattcttcctaatcaattaatttgcaaactaaaaaaattgtagtagagcacacaccaatggacaaaaaaaagtgagtaaaagtatagtattgaagatatattaccatggctgcaggctttagtttggagctctcagatgatataagatcaacctagagaagaagaagagcaccctgcagctttcaaaagaaaaatggaaggaactctgtatatatatgtgtgtgtggtgtgtgggttggcttcagtttgcacacttgcactagggcatcagattcatgagaggtttcgtaggccgcatggcatatgcacgcgcacacacatatatatagtgaagatgcttcttgtgttcttgaattttcatgatttctttaaatgttgtgtttagataaatttatgtatatgctgagtgtgcacgtgtgtatgtgagggtatgcgtttgtactgtgtttgccaaaaaaacaaccatgtgattttgaatcagtaatatatacatttatgatttatatataaaatcgatattggtagattttgtatggcaagtactcctacttaattagctagttatatcttccataattctcataattaaatgattcaaaaaatataatatatgtgcactggaaataactatgtcaatgtccagaacgcaactgccgaattaaggatatactagccacgtagtcgtgctctgcgcgacttttgatcccgtataagaacttttgtatccgtatattagtttatagaaggttttagcatgagttgattgatttacaaagtatcaattggtctagctaactatagatttaactaagctgtactatatgagaaatcactagaagcctcctggtttttttatttctttatttattatctttgcccctctctcgacactagaaacctccagaaattaccatacatttatcccatttgttgttttttatattgtatatgtacccttttgatccaatggtccttatttatctatccgacggttaatatatttttgatgatgtagcgcatcatcgtgtatgaaagtttgttgcttttactatatataagatgccttgggttaggatgaaagctttagctagctagctagctggagtggggcagcatgataataattaagcgtaaaagtcacagaagctatgaatatagctagctagtacatacactcctttcgttaacaaataaatataagtcgtttaaactcgtgcatttaaacctcaaaatattaaatcactaatacaaaaatattaagatttgataagtaaaagacaatattattagctagatttatcctaaaagatcgatacttcaatgtagtgatattttcaatagttttgatacaaatatatggctagctatagaaaaaaggtgatgataaatcatgtgcatcgaaaattatatagatgtcctaaccgactagtgaaaaaggaaccaagaattaaaggagatgacgatgctgatgctgatgctgatctagctatgagaaagcaaagaaaatgatatcgtcaaaggagaggaatacgattcctttgaatgagaaaagaatttgagtggcttaattggttggcacacgaatatgattccttgccgtggaatgcactcatcacaatatgtacgtccaatgcaacgcatatatgtagattacttttggaaattatgagctatatatagcttttaagtccctatcacatcggatttttggatactaattataaatattaaacatagactattaataaaacccatccataatcttggactaattcgcgagacgaatctattgaacctaattaatccatgattagcatatgtgatgctacagtaaacatgcgctatttatggattaattaggcttaaaaaatttatcacgcgaattaactcttatttatgtaactagttttataagtagtctatgtttaatactctaaattcatccgatatgctagaagttcctggatccaaacaccaccttagtatatatggcatcatgaacagtccagtacgtatgcaatgcagaccgtcgatatgcggacttgaacggccaggattgacccggaagaggagcgagcgaggcaccgtgttgatatcacagtagcacatattcttgcatatataacgggctatcactggcggttccaagtataccgttcggataacattcaaattgatggtgctttttttttaatataatggaataaaatattattgccggcatttgtttaattaagagttacagccaattattacaaggtttacacaaaagcaaactcacgcaaatcgatggtgctcttttaatggtgataactattgaacagtacaagaagagatagctaagaatatacgatgattagctagctgggaatcgctcccttgtgaattgtatgaaaagaatagtatgataacaatggaacaaagctgaactttttcttattcagtttacatctgaatcatccccttgcattgcgaattgtgatgactgaaagcaaaatatgcacttaggatatgttttgcattatggttaggatagaaacggtcggaaaaatgcttcaacgagcaccatcgtctgccttttggtttattagccgagcgtaaaatttgaattgtaaaacttaaatgtttgagctaatttgaagtatttatctagtttattttccagtgttgacttttatttaaatcattaaggacaaatatataaaagtttttatcaatatttttttaataagccattttacaacttatcaattgtaggctagatgatattaaactacatttttgttaccaatttttctctcagaaacataatcggagtggtagtatcggaaacaataacgatattggtacataccggagcattggaatatatcaaaaacggaattatcgggatagagagcttcaaaattaaggcatcaaaggaataagcaagttatggtgcctatggactccaatttatggggtctatgagatcggctttcagccaatccatttggaaagcatgggcccctccaaaatgcaattttttctcctggctcgccacccaaaatagactctggacaactgatagactcgagaaaagaggttggcaaaatcagaagatatgcccgctatgctgcataatcaaccgctatgctgcataatcaacgaatcagcgatccatctgctggcgcactgcagagtcaccaagagggtatgggcggaattacaaaggtggacccaaactgacctccaaatgagcaaatagagtgactgcgactcggtggagcaatggtggaacctagtggtagacactcctaacaccccccgctttcctttgcgagcactggtgatcttggtttcatgggaagtttggtgcgaatgaaacgcaagaatcttccgaaacaccgcctcaacaccggcttccatcatcgccaagatcaaggaggaggctcgagcctaggtcaaggctggagcctcaaggcttcaagagtttggaattttgggagatatcacttagtctctttgtcaattcttgcgggtgtagctcttttggcttgccctgtaaatatttccctttctgattttgttttgttttttctccatctctattaatatacgagacaaagcttttgccctcctttcaaaaaaaaataagcaagttatggtcatgtttacatgataaattaatgtagacatatattagtgaagattccgatttaaattttcataacgatattataacatcaacaataacaacacgtaagttttatggttaagtttttatattttgatgggttgttggtattatatagtaattcattcggaacttctgcatagaaacagcataccactaaaacacggttgtcaaaacatataccatttccatctcattttagacaaaacagaaacggaataaaacaattggtataacagaaatgatagctcacacggtcgggaatttccataccattttcatatataattatagagtaaatttcacaaaacaactgatattttaactaaattatcatagaactacatatttaaggtaatatatcataaaactatagatttaacaataaatttatctcaaaactacaagtttaaggctaaaatacatgtagtattgtgataatttggttaaattttaaaaatcaaactgaatttgatatataactcttagcttatgtttatataggtataaattacacattgtataaaaactaatgattaatccatatcgctataa
